United States Patent Application Publication US 2023/0026259 A1 - sequence listing, part 43

SEQ ID NO: 132480 - DNA, 4340 bp, Homo sapiens
  Payload ID: 5877
  Gene Symbol: FAM210A
  Gene Name: family with sequence similarity 210, member A
  Uniprot ID: Q96ND0
  ENST ID: ENST00000322247
  CDS Start-End: 389-1207
gcagaagcttcactgagcgggcactggaggtcgcgagcacgttgctagtgggcgcggctggcggggccgggggcggcagggggctagcgtccggctgagcccggcgggttcctgcacgcggacccacgctttgtcgggctgctctgctgagtgacaccgccgtggcatccgaggagctgtggtccagcctgcgcggcgggaagcggcggcggcggctccagcgtcctaagagagtctcactctgtctcccaggctgcaacatccacctcccaggttcaagtgattcttgtgcctcagcctctccagtagctgggattacaggtgtgtgccagcatgcctggccaattgttggattgtatgaagctgaaacctatcaacactcttcaaaatgcaatggaatgtaccacggactgtatctcgactggcacgcaggacatgcttggaaccacataatgctggtctctttggacactgtcaaaatgtaaagggacctttacttttatacaatgctgaatccaaagtggttttggtacaaggccctcaaaaacaatggttgcatttatctgctgcccagtgtgttgcaaaggaaaggaggccattggatgctcatccaccccaaccaggagtccttcgccataagcaagggaagcaacatgtttcattcaggagggttttttcatccagtgccacagctcagggaactccggaaaaaaaggaagagcctgatcctttgcaagacaaatctattagtctttatcaacgattcaagaagacatttagacagtatggaaaagttctgattccagtgcatctaataacttctggtgtttggtttggaacattttattatgcagccttgaaaggagtgaatgtcgttccttttctagaactcattgggttacctgacagtgtggtaagcatcctgaaaaactcccagagtggaaatgccctcacagcatatgccttgtttaagattgcaacacctgctcggtataccgtgactttgggaggaacatctgtcactgtgaagtatctgcgcagtcatggctacatgtccacgccgccacccgtcaaggagtatctgcaggacaggatggaagagacaaaggagcttatcacagagaaaatggaagaaacaaaagatagactcactgaaaagttacaagaaaccaaagaaaaagtttcctttaagaaaaaagtggaataaggtgccttatatagcagtatagaaaattcctgcactttaaccctttggaaactatgggcaaagatacatgtgtctgattatttttttggttagttgccgaaatatactagttctctgagggttaaagaagtaaaatacctttttaaagttaaatatcactagaaaaatcagtgttattacaagggaagaaatgaacccagtttaagaatttgccatcagtagcagtattaagcagtggttaatgtcttagaagtcagacttctttttcaaggtcttcagaaccacacttgatttctgttttgttgcagctgtaattgacacatactaggcagctgactccttgaatatccagtgtgacccataaaatagtctgttaataccggatcttaatttttatgttattcattaagattttaactatattcagtacgtaatttggagacaaactagcatcatcaaaactgcctgtaaataaggtgtttagtctttctataaaaacagaatagagcagttacctaccagttaaaatatcttatatgaagaaaatagaataaagatccagtcatatatgtaaataagatgtactgattgtacgtaaatgaaaaatggaccctttaaaaattatttttacctgaagcttgtcataatttttttaaagcaaatatatatatggtgatggtacttttcaaagtgtgtattagtggtgatcacctcaaacataaacctctgttgtgaatcatttgtgtccttttcaactgtctttcagaggaaaggtaaaaaatcattaaaccttaaattcattgttaaaatcaaatatttgtcagcagtaactcaagctcatggttctcaagcagaaaaaggtttgggagactaaaaatggagtcaggttttcatggagactgctaactccttggggtagacatgggccttgcctcagcaaaccagtgcaatttcccaatgtcttagtttcagaattcatgctgatttcattatggagtaaagttttaaattgtggctgctgctttttgtcttacattgaagggaaatatccttgtttgagcattctacttgattttttttttttttttttttttttttgagacggagcctccctctctctctcccagactggagtgcaatggtacaatctcggctcactgcatcctctgcctcccaggttcaagtgatcctcccgcctcagctttccaagtagctgggagtataagcgtgtgccaccacactcagctaatttttgtatttttagtggaggtggagtttcaccatgttagccaggctagtctccaactcctgacctcagcctcccgagtagctgggactacaggcgcccaccaccacgcccagctaatttttttgtatttttagtagagatggggtttcaccatcttaacaaagctatcattaaatcatttgcttgtaatgaaattcagccgttgtcagctgtgagcgttgcggggctggtggggtgtgtttgagtatgtaagtgtctatttcctgtgctctaacagtgactatttcagttctaacccttcaattgctaattggatgagggaatggcctcttagattgtccttgttttgacttatctgctaaggcgagagaatgtctgggtttgccacacagtcccgcagggacccctgctctttgccaggatttttatatcaagtacttagtttggccaaatttagagtatagtttaaaggggaaaaaaagtttgtatttgatgagtctaattactatattagaatgctttttaaatgaatatgctgtgattggaatctcttcttgggggccggggagagtgctgagagatgcagctgtgtctctgctctctgcagtcttgggcaggcagcaccgctgtctcctgatacagagggttgaatgcactgcttcacattgatgccacattttcaaatctaaacatgattaacatgttttttaagtatttatcaaataattcacatttttgcaggtttaagtgctgttttttaagatattaaacatgttccttgtttcttttttctttttaaccactggagactatgtgaaaatcttgtgttatatggaatttttctaaaacaatttccttttacttttcatgttgcatattttccagtggggataaattggaggttcttattactaataatcctgaaactaaaatttgcttttcctgcatagacatcttttgttagtccatttgagttttgttgccatccagtttcatgatcatgttgtgttagtctaatagacaatgagttactgcttgaatgatatgaaattctctagtaaaaaatgctctgaagatgtgagaagctctgttgtattacttggcaccaggaatgttacaaaaatgttgttgctagcatattgctaacctagtccttaagtttcagggattcctgtaatatgttgagtttggagtattaatagcaggctaacagaatacagtaccaatatgccaagttaaataattgagaatatatacagtatagtttgctatgtataatagacctcatttcatttacagtacacctcacacttgggattaattcacctataacctctgtgaactgcgagtgctcggcagaagcagccctgtgtcttacatgtctacatttatatttatatttatatttatttttttgagacagagtctcactctgtcacccaggctagagtgcagtggcatgatcatagctcacttgcgtcttgaactcctggctcaagtgatcctcccacctcagcctgctgagtagctgggactacaggtgcacaccaccatgcctggctaaaggcatgtctgcatttatgcgaggtgtgttgaccgggtggggagggagctaggactgagattcgcctgtgtaaaatgcacaaaaagggtttgctaagcaaattgatatttgaaatgaaagatggattaggtgagagacttagtttattcaggaataagagcaaaaccaaccacatcaaaaaatgtatttcactgagacagccttttgtacatacagcagggtgctgtttacagatttcaagaaaggagaaaaagaatgcttatactgagattacctacctcccagtagtgaaaataataaatttatcccttgaaatataa

SEQ ID NO: 132481 - DNA, 4240 bp, Homo sapiens
  Payload ID: 5877
  Gene Symbol: FAM210A
  Gene Name: family with sequence similarity 210, member A
  Uniprot ID: Q96ND0
  ENST ID: ENST00000402563
  CDS Start-End: 293-1111
aactacgagtcccgacgtgccgcgcgcggcatgcagaagcttcactgagcgggcactggaggtcgcgagcacgttgctagtgggcgcggctggcggggccgggggcggcagggggctagcgtccggctgagcccggcgggttcctgcacgcggacccacgctttgtcgggctgctctgctgagtgacaccgccgtggcatccgaggagctgtggtccagcctgcgcggcgggaagcggcggcggcggctccagcgtcctaagagaagctgaaacctatcaacactcttcaaaatgcaatggaatgtaccacggactgtatctcgactggcacgcaggacatgcttggaaccacataatgctggtctctttggacactgtcaaaatgtaaagggacctttacttttatacaatgctgaatccaaagtggttttggtacaaggccctcaaaaacaatggttgcatttatctgctgcccagtgtgttgcaaaggaaaggaggccattggatgctcatccaccccaaccaggagtccttcgccataagcaagggaagcaacatgtttcattcaggagggttttttcatccagtgccacagctcagggaactccggaaaaaaaggaagagcctgatcctttgcaagacaaatctattagtctttatcaacgattcaagaagacatttagacagtatggaaaagttctgattccagtgcatctaataacttctggtgtttggtttggaacattttattatgcagccttgaaaggagtgaatgtcgttccttttctagaactcattgggttacctgacagtgtggtaagcatcctgaaaaactcccagagtggaaatgccctcacagcatatgccttgtttaagattgcaacacctgctcggtataccgtgactttgggaggaacatctgtcactgtgaagtatctgcgcagtcatggctacatgtccacgccgccacccgtcaaggagtatctgcaggacaggatggaagagacaaaggagcttatcacagagaaaatggaagaaacaaaagatagactcactgaaaagttacaagaaaccaaagaaaaagtttcctttaagaaaaaagtggaataaggtgccttatatagcagtatagaaaattcctgcactttaaccctttggaaactatgggcaaagatacatgtgtctgattatttttttggttagttgccgaaatatactagttctctgagggttaaagaagtaaaatacctttttaaagttaaatatcactagaaaaatcagtgttattacaagggaagaaatgaacccagtttaagaatttgccatcagtagcagtattaagcagtggttaatgtcttagaagtcagacttctttttcaaggtcttcagaaccacacttgatttctgttttgttgcagctgtaattgacacatactaggcagctgactccttgaatatccagtgtgacccataaaatagtctgttaataccggatcttaatttttatgttattcattaagattttaactatattcagtacgtaatttggagacaaactagcatcatcaaaactgcctgtaaataaggtgtttagtctttctataaaaacagaatagagcagttacctaccagttaaaatatcttatatgaagaaaatagaataaagatccagtcatatatgtaaataagatgtactgattgtacgtaaatgaaaaatggaccctttaaaaattatttttacctgaagcttgtcataatttttttaaagcaaatatatatatggtgatggtacttttcaaagtgtgtattagtggtgatcacctcaaacataaacctctgttgtgaatcatttgtgtccttttcaactgtctttcagaggaaaggtaaaaaatcattaaaccttaaattcattgttaaaatcaaatatttgtcagcagtaactcaagctcatggttctcaagcagaaaaaggtttgggagactaaaaatggagtcaggttttcatggagactgctaactccttggggtagacatgggccttgcctcagcaaaccagtgcaatttcccaatgtcttagtttcagaattcatgctgatttcattatggagtaaagttttaaattgtggctgctgctttttgtcttacattgaagggaaatatccttgtttgagcattctacttgattttttttttttttttttttttttttgagacggagcctccctctctctctcccagactggagtgcaatggtacaatctcggctcactgcatcctctgcctcccaggttcaagtgatcctcccgcctcagctttccaagtagctgggagtataagcgtgtgccaccacactcagctaatttttgtatttttagtggaggtggagtttcaccatgttagccaggctagtctccaactcctgacctcagcctcccgagtagctgggactacaggcgcccaccaccacgcccagctaatttttttgtatttttagtagagatggggtttcaccatcttaacaaagctatcattaaatcatttgcttgtaatgaaattcagccgttgtcagctgtgagcgttgcggggctggtggggtgtgtttgagtatgtaagtgtctatttcctgtgctctaacagtgactatttcagttctaacccttcaattgctaattggatgagggaatggcctcttagattgtccttgttttgacttatctgctaaggcgagagaatgtctgggtttgccacacagtcccgcagggacccctgctctttgccaggatttttatatcaagtacttagtttggccaaatttagagtatagtttaaaggggaaaaaaagtttgtatttgatgagtctaattactatattagaatgctttttaaatgaatatgctgtgattggaatctcttcttgggggccggggagagtgctgagagatgcagctgtgtctctgctctctgcagtcttgggcaggcagcaccgctgtctcctgatacagagggttgaatgcactgcttcacattgatgccacattttcaaatctaaacatgattaacatgttttttaagtatttatcaaataattcacatttttgcaggtttaagtgctgttttttaagatattaaacatgttccttgtttcttttttctttttaaccactggagactatgtgaaaatcttgtgttatatggaatttttctaaaacaatttccttttacttttcatgttgcatattttccagtggggataaattggaggttcttattactaataatcctgaaactaaaatttgcttttcctgcatagacatcttttgttagtccatttgagttttgttgccatccagtttcatgatcatgttgtgttagtctaatagacaatgagttactgcttgaatgatatgaaattctctagtaaaaaatgctctgaagatgtgagaagctctgttgtattacttggcaccaggaatgttacaaaaatgttgttgctagcatattgctaacctagtccttaagtttcagggattcctgtaatatgttgagtttggagtattaatagcaggctaacagaatacagtaccaatatgccaagttaaataattgagaatatatacagtatagtttgctatgtataatagacctcatttcatttacagtacacctcacacttgggattaattcacctataacctctgtgaactgcgagtgctcggcagaagcagccctgtgtcttacatgtctacatttatatttatatttatatttatttttttgagacagagtctcactctgtcacccaggctagagtgcagtggcatgatcatagctcacttgcgtcttgaactcctggctcaagtgatcctcccacctcagcctgctgagtagctgggactacaggtgcacaccaccatgcctggctaaaggcatgtctgcatttatgcgaggtgtgttgaccgggtggggagggagctaggactgagattcgcctgtgtaaaatgcacaaaaagggtttgctaagcaaattgatatttgaaatgaaagatggattaggtgagagacttagtttattcaggaataagagcaaaaccaaccacatcaaaaaatgtatttcactgagacagccttttgtacatacagcagggtgctgtttacagatttcaagaaaggagaaaaagaatgcttatactgagattacctacctcccagtagtgaaaataataaatttatcccttgaaat

SEQ ID NO: 132482 - DNA, 1091 bp, Homo sapiens
  Payload ID: 5877
  Gene Symbol: FAM210A
  Gene Name: family with sequence similarity 210, member A
  ENST ID: ENST00000592976
  CDS Start-End: 287-1091
gagtcccgacgtgccgcgcgcggcatgcagaagcttcactgagcgggcactggaggtcgcgagcacgttgctagtgggcgcggctggcggggccgggggcggcagggggctagcgtccggctgagcccggcgggttcctgcacgcggacccacgctttgtcgggctgctctgctgagtgacaccgccgtggcatccgaggagctgtggtccagcctgcgcggcgggaagcggcggcggcggctccagcgtcctaagagaagctgaaacctatcaacactcttcaaaatgcaatggaatgtaccacggactgtatctcgactggcacgcaggacatgcttggaaccacataatgctggtctctttggacactgtcaaaatgtaaagggacctttacttttatacaatgctgaatccaaagtggttttggtacaaggccctcaaaaacaatggttgcatttatctgctgcccagtgtgttgcaaaggaaaggaggccattggatgctcatccaccccaaccaggagtccttcgccataagcaagggaagcaacatgtttcattcaggagggttttttcatccagtgccacagctcagggaactccggaaaaaaaggaagagcctgatcctttgcaagacaaatctattagtctttatcaacgattcaagaagacatttagacagtatggaaaagttctgattccagtgcatctaataacttctggtgtttggtttggaacattttattatgcagccttgaaaggagtgaatgtcgttccttttctagaactcattgggttacctgacagtgtggtaagcatcctgaaaaactcccagagtggaaatgccctcacagcatatgccttgtttaagattgcaacacctgctcggtataccgtgactttgggaggaacatctgtcactgtgaagtatctgcgcagtcatggctacatgtccacgccgccacccgtcaaggagtatctgcaggacaggatggaagagacaaaggagcttatcacagagaaaatggaagaaacaaaagatagactcactgaaaagttacaagaaaccaaagaaaaagtttcctttaaga

SEQ ID NO: 132483 - DNA, 659 bp, Homo sapiens
  Payload ID: 5877
  Gene Symbol: FAM210A
  Gene Name: family with sequence similarity 210, member A
  ENST ID: ENST00000589346
  CDS Start-End: 1-204
gggttacctgacagtgtggtaagcatcctgaaaaactcccagagtggaaatgccctcacagcatatgccttgtttaaggctggagtacaatggcgcgatctcggctcaccgcaacctctgcctcccgggttcaagcaattctcctgctttagcctcccaagtagctgggattacagattgcaacacctgctcggtataccgtgactttgggaggaacatctgtcactgtgaagtatctgcgcagtcatggctacatgtccacgccgccacccgtcaaggagtatctgcaggacaggatggaagagacaaaggagcttatcacagagaaaatggaagaaacaaaagatagactcactgaaaagttacaagaaaccaaagaaaaagtttcctttaagaaaaaagtggaataaggtgccttatatagcagtatagaaaattcctgcactttaaccctttggaaactatgggcaaagatacatgtgtctgattatttttttggttagttgccgaaatatactagttctctgagggttaaagaagtaaaatacctttttaaagttaaatatcactagaaaaatcagtgttattacaagggaagaaatgaacccagtttaagaatttgccatcagtagcagtattaagcagtggttaatgtctta

SEQ ID NO: 132484 - DNA, 1038 bp, Homo sapiens
  Payload ID: 5877
  Gene Symbol: FAM210A
  Gene Name: family with sequence similarity 210, member A
  ENST ID: ENST00000591269
  CDS Start-End: 504-1038
acttccggaggtgcgagagtcacgtggagacggtcaggcgagagtgccgcgacgcacgtcctccgcgccggaactacgagtcccgacgtgccgcgcgcggcatgcagaagcttcactgagcgggcactggaggtcgcgagcacgttgctagtgggcgcggctggcggggccgggggcggcagggggctagcgtccggctgagcccggcgggttcctgcacgcggacccacgctttgtcgggctgctctgctgagtgacaccgccgtggcatccgaggagctgtggtccagcctgcgcggcgggaagcggcggcggcggctccagcgtcctaagagaagaaagaatttgactgatgggcgtaaggaagaaaaagagaccgaggcaagtttcagagaagtagtggaagatttttcaaaaaagctgtagaacaagaaagaaagtatgcttgggaaagacccaagcgggcatgtgaaggaagctgaaacctatcaacactcttcaaaatgcaatggaatgtaccacggactgtatctcgactggcacgcaggacatgcttggaaccacataatgctggtctctttggacactgtcaaaatgtaaagggacctttacttttatacaatgctgaatccaaagtggttttggtacaaggccctcaaaaacaatggttgcatttatctgctgcccagtgtgttgcaaaggaaaggaggccattggatgctcatccaccccaaccaggagtccttcgccataagcaagggaagcaacatgtttcattcaggagggttttttcatccagtgccacagctcagggaactccggaaaaaaaggaagagcctgatcctttgcaagacaaatctattagtctttatcaacgattcaagaagacatttagacagtatggaaaagttctgattccagtgcatctaataacttctggtgtttggtttggaacattttattatgcagccttgaaaggagtgaatgtcgttccttttctagaactcattgggttacctgacagtgtggtaagcatcc

SEQ ID NO: 132485 - DNA, 3046 bp, Homo sapiens
  Payload ID: 5878
  Gene Symbol: FAM210B
  Gene Name: family with sequence similarity 210, member B
  Uniprot ID: Q96KR6
  ENST ID: ENST00000371384
  CDS Start-End: 92-670
agggccctcgccgggtcagctccgcccaccctccccggcctccgcccgcctcccgggtcagcggcgcgggtgctgcgcctagctgcgcaccatggccgggttgctggcgttgctgggtccggcaggcagggtgggcgcccgggtccggcctcgcgccacctggctcctgggcgccaccgccccctgcgccccgccgcccctggccctggccctgctcccgcccaggctagacgcccggctgctccgcacggcgcgcggggactgccgcggccaccaggaccccagccaggccacggggacaacaggcagcagcgtcagctgcacagaggagaaaaagcaaagcaagtcacagcaactgaaaaagatttttcaagagtatggcactgttggcgtgtcattgcacattggaatctcattaatttccttgggcatattttacatggttgtgtcaagtggtgtggacatgcctgcaatcctgctgaaactcggatttaaagagtccctggtacagtcaaaaatggcagcaggcacaagtaccttcgtggtggcctatgcaatccacaagctgtttgcgccagtgagaatcagcattacgctagtctctgtgcccttgattgtcagatattttcgaaaagtgggattttttaaacctccagctgcaaaaccttaatgaactcttcagtcgtacacactgaaaacctatttcttctaaattacatgatttggattggttttagggttttagggttgtagggtttcttttggagaggtagggggctaattgctatgttctcatggataaactttgccagcaaaaatcaggcttttgaacaattttaattttttgcctcataaattttgtgaatgctattcattatagggcttgtatatataatctaaaatgtcagcaaggcatcggagatgggttaacatctcaaaacaaaatagcctacaaatgttccttgtgggagactttggcgagggtctgtgggtaaaagcaccagggggttaatcttggctcagtttcctaaaaagcattgattaatttaactggcttttaaatatccccttccgctgatatttgttgtcagctgcctacagtttaatatgcagcgttcacaaaacagctgccagtgctacaattaatgaagcaaaacttaatatgtaatcacaatctaaattagcatcaatactttgacattcattacattggtttgggggaagaaaagtagttctggtatgtttcattgatccccagataccttccaatctggacatgatggggctgattccagatggtttttctgaaatttcattaaggtaggtcagcgtcatttgtctctgtttaggtaaaatataaaaaccctgcccagtagcagtggcatcgcttggttcctgatgcccatgttccagaggaattcggataccacaaacagctaagacaatctcagcttttcttagacaatcttctatctcaaacttcagacattccagaattgtcatgatgtttacactgtctgagttaaaaatcctgttcaagaaaaaaaaagattttgtatcacttcttaaaaaggaatattcatagcacttgtcacaaatagaaggcaaccatgagataatacaagccagggagaggcttgtattacatgacaggtgtaattagtctgctgagccagctttacccaatgaagggcatatgtgttagagagattagctaagagtagaaattcgagcatagaggccaggtgcggtggctcacgcctgtaatcccagcactttgggaggttgaggcaggcgtgtcacttgaggccaggagttcgagaccagcctggccaacatgatgaaaccccgtctctactacaaatacaaaaattagccgggtgtggtggcacacgcctgtagtcccagctactggggaggctgaggcagcattgcttgaacccaggaggtggaggttgcagtgagccaagatcacaccactgcactccagcctgggcgacagagggagacactgtctccaaaagaaagaaatcccagcgtagatccaaactgagacactgaggcttcgtccttatagtagtcaggagcaggcgattgaagtaattctgtcctgcggggttcagcatcatgcacgttccccctgggccattctctgatgcagggcacttgctccacactctgggaacccagattcaccagtctgccctgtcacgtagttgaaggagttgcatttatctttctggctcctaattcctttaaaattacatttgttgcagaacctccacaaggctaaataaaattacatttgtgaccatcagagaactgaataaaccattaactggccatcctggttttgcagagatcaggttgttgacagttcctggttgacccacagctacccatgtcagttatctccactaacatatccaagaatctttgtaggacaatttctccacctgcaaggtctttcaggtagaactcttcttttaaggcaattagcccattgccaaaaggttttactgtcttaaagctgtctttctgagatctaattccaaggacttctccacagctaagtgagatgcctcacaccattaggtgatgctttggacagaacagagtattttcatcttgtgtttaaagcaattccttggcttcggctcctcaccactttctatgccagtctcccatttatgtccctagtaatgcctatgcaaaaaaaaaaaaagaaaaaaaagaaaaactgatggtgaaacctacaggtttaagggcttaaatctcaaactttgttaggagtaacaggagcgtgctgagcgggcaagcaataaaacaaatcataccaaaaagccacattgctctctcctaagccccaaccccactccactcctgtggccaggggtccaaacagaaaataaccggagaagacaaggaggtcaaaggatcagggaactaagcattatgtgaattcaccagcaagatgtacagaacgcctgtgtttacattgtttttatggaactagcagaataaaacatctattttaaaaatgaaa

SEQ ID NO: 132486 - DNA, 614 bp, Homo sapiens
  Payload ID: 5878
  Gene Symbol: FAM210B
  Gene Name: family with sequence similarity 210, member B
  ENST ID: ENST00000437418
  CDS Start-End: 1-158
cgcccctggccctggccctgctcccgcccaggctagacgcccggctgctccgcacggcgcgcggggactgccgcggccaccagtccgacaggtggcacacaggtcttggggatcctctccagagtggcaccttctgcacacaccgtgccgcctcctgatgattcttcagggcccagcccagctgttccttcctccgggaagccctctctaacgacctgtgaggtctcggatgcctccactgggcctgcttccaccccatggctgtgggtcttctctgcactcatctggaatggcctcttgtcctgcctgtcagccacattgaccttgtccccagctcaggccctggcactggagcggtgtgtgtgtatacagtggcaaagagttggcctcagactccctggattcctctctctactcacttgttgttgactttgatcaaattcccttctctctatctcaggcccctcatctgtaaaatgggacgttaataattcagacttcatagaatatgaatgtaaaatgagatatgttcatacctggcatctggtgtgtcctaaattaaggttagaaatgactataattgcagtaaatatatacagtcacaaggccccagg

SEQ ID NO: 132487 - DNA, 1040 bp, Homo sapiens
  Payload ID: 5879
  Gene Symbol: FAM212A
  Gene Name: family with sequence similarity 212, member A
  Uniprot ID: Q96EL1
  ENST ID: ENST00000333323
  CDS Start-End: 134-997
gggagctacggagagcgaggagtcgcgcaggcaggcggaggctgagggcgccgctggccggccctcccagccctctccgcgcggctccgccggggttccaagaggagctagtaggttcggtgggggccctggcatggacatgcacagcgctcggcttgacagcttccttagccagctccgctgggaactgttgtgtggtcgggacacaggctcaccctcaatgcctggtcccctgcagccaacctcccaaactggcccagatgtgcagcccagccaccagcttagggcctcgggtgccttggaagaggactcagtctgctgtgtggaggaggaggaagaggaggaggaggaagcagtggtgacagaagacagggatgcagccttgggaggccccagggagcatgccctggactgggactctggcttctcggaggtgtcaggcagcacatggcgagaggaagaactgcctgtatcccagcgcccagcaccctcagcacagccccttcgtaggcagtgcctctcagtcagtggcctccccatgcccagcagggcccctgtagccagtgtaccacctgtccaccatccacggcccaagtccaccccagacgcctgcctggagcactggcagggactggaagcagaggactggacagcagccctactgaacaggggtcgcagtcgccagcccctggtactaggggacaattgctttgctgacttggtgcacaactggatggagctgcctgagacagggagtgaagggggtgacggaggtgggcaccgtgcccgtgctcggccccctcagttcctgcttggcctctctgagcagcttcggcgccggctggccagggctcggcggacagctatggcaggaaagcggctgtcatgcccacctcgcccagaacctgaactgcctgcggatgtctcacgctttgcagctctcatgagctgtcgtagccgccagcccatcatctgcaatgatgtcagctacctctgaccctgccctccagcctgggacaataaaagccttttttctagac

SEQ ID NO: 132488 - DNA, 5980 bp, Homo sapiens
  Payload ID: 5880
  Gene Symbol: FAM212B
  Gene Name: family with sequence similarity 212, member B
  Uniprot ID: Q9NTI7
  ENST ID: ENST00000357260
  CDS Start-End: 183-1076
gaccgcgcgcggctagccgctggggaagcgactctgagtcccgggctcggagcgcaggctcagctccgcgctgcgagcgctacgggcgcaggggcggggagccggcccggagcgcagtttccagtggggccggggtttcacccgggccctctctgtttgaaccgaacccgacaaatgggcgcatgacgatggagagcagggaaatggactgctatctccgtcgcctcaaacaggagctgatgtccatgaaggaggtgggtgatggcttacaggatcagatgaactgcatgatgggtgcactgcaagaactgaagctcctccaggtgcagacagcactggaacagctggagatctctggagggggtcctgtgccaggcagccctgaaggtcccaggacccagtgcgagcacccttgttgggagggtggcagaggtcctgccaggcccacagtctgttccccctccagtcaaccttctcttggcagcagcaccaagtttccatcccataggagtgtctgtggaagggatttagcccccttgcccaggacacagccacatcaaagctgtgctcagcaggggccagagcgagtggaaccggatgactggacctccacgttgatgtcccggggccggaatcgacagcctctggtgttaggggacaacgtttttgcagacctggtgggcaattggctagacttgccagaactggagaagggtggggagaagggtgagactgggggggcacgtgaacccaaaggagagaaaggccagccccaggagctgggccgcaggttcgccctgacagcaaacatctttaagaagttcttgcgtagtgtgcggcctgaccgtgaccggctgctgaaggagaagccaggctgggtgacacccatggtccctgagtcccgaaccggccgctcacagaaggtcaagaagcggagcctttccaagggctctggacatttccccttcccaggcaccggggagcacaggcgaggggagaatccccccacaagctgccccaaggccctggagcactcaccctcaggatttgatattaacacagctgtttgggtctgaatcctagagacagaaagttgactgagcctgaaagggccaggtcccagtgctgggcccctggggaggagggagggtgggcggtatggctctcgaaagcccaactccaagttcctttcccccagaaagcggggagaagccagagttcttggctcaggactgaagggaaggtggttgggagaggctgtcttgggggctagctggtggaggaggtaagagtagctggagagtgagctgtgcgtgtgtgtgtgtgtgtgtgcatgtgtgtgtctgtctggcatgcatgcactcactttggggctggaggtgacagtaggtgagggcagaggaggagatcagaaaatccctctgacatctccactgcccccaaagacctccgttgaacattctgtatggaaaagagccctggagcatcaggttccccagataggcccccaaataaagacctgtctatggctctcccaaccttctgtcagcttctttggcaagacattgctccaggcacagggactgaaccccaggcctcctgggactggagcagcagtgaggcaaaacccgacctgctagccctttctgccttggaggtttcagtccatacctggactctgagaaaatgagctgaataaggagtacagtgtgtaaggagcagccagggaagccctagacactccccgcgtctcccccatgcacaggggaaggatgttgacatagcactgggctgtttgaatgccttttcatctccatggtctcatttgaaagtgagcgaggcaggcaggcatgatcccattttccagataaggaaacaagcctagatatgctacatgtccaggaacaactgcagccaggaggcagaacagcctaggtctaactgcagagtagaagctggaccctggagttaccaacactcctccccaacagttcttagcaccccgcaggctgggcgctgtggctcacgcctgtaatcccagcactttgggagggcaaggcaggcggattacctggggtcaggagttcatgaccagcctggccaacatggtgaaaccccgtctctactaaaaaaatacgtaaaaattagccaggcgtggtggcacacgcctgtaaacccagctacttgggaggctgaggcaggagaattgcttgagcccgggagagggaggttgcagtgaggcgagatcatgccactgcactccagcctggctgacagagcaagactcccctgtctcaaaaaaaataaaaaaaaacagttcgtagggccccataccccacaacccctgtctcctgcacttaactcccacctgggtcagagaacagccaattcaccagtgaggtagaagtgaacccagaagaaatagccacttgattttaaaattcccagctccattccgtggccttctccccactagacacagcagtcccaggcctcctgttccctcctcacctagaggcagccgggacggagggggaagggccaggcagcagctcagctccggcttctctaaagccactctgggcacgtggcccaggagggccacctagtgatccaggcccccccccaggactgccctgggaagccactgtccctcccactccagtagggaacactcactggctgggaaaagacaatgtggatcttcttttgggctgaccaagccaggagggcacaccctcccactgcccctctctgcctcccactgattgtccctcagcctgatggggtgtgacagctgcaattagaggcaggattccttcccaccctcaaagcattaatagccagttggagaggcaaaatagtaagaaaaggctcttctgcttgcttcctggatccctggggagagtggagagaggggcagagctcaagatgggattatgggggcgcagccgcggtggttagggtcactctcaaatcctacccagtcaaatggtaagatgtttcatttttggtgggggagctgcaggagggaggaaggcgctcatgctttttgggttttgttgagcactcactgtctgtcaggtaatgtgcacatctctcaaacttagaaggaccctagaaggcattgttctccagacacatctatggaggttattagggggcgtgtaaactgccccgattaggctgctagcaaaggaaaggacagagatttgaacagagggttgggttatctggctccaaaacccctgtccttttcttgctatttctctacctggagtttgccaactgagcaagcccactctggtggagccagccactgcaaatcctttgtgtcttcccagagaataccaacatttcagttttgagtgagggaacgttggctctgactgcctttggaggtggagatggtggaggtggtggtggtggtggtggtagtggtggtgtgtgtgtgtgtgtgtgtgtgtgtgtgtgtgtgcctgcgcgtgctaagaaactgcatgttaagattccacctactgaatcatgagcggaggaagtcgtgggacactggctggtggagaagccatctagcatattattcaagatgacaccagctccaagtctggaatgagtctgtgggaaaccaaggtacttcttggacattcacctataactcacgtgtttcgtggactggtcacagtggttcggataaattgaacagaactttatgaacacctcccagcaccaggtgttgttatagaaactaagaacagagcaatgagaaggacccaactcctgctctcaaatggatgcagtggaaaataagcagactttgaaccattggttagtcagaagagacttgggagactgaaaacttgtttcaacttgggccagaacaaaaaattaggaagcaacacttgctgccaacatgatttacaagtgccagcaccttcacctctgttacttccttctcactacacactgaaagcagttgctcttgttttacatggacaggctcagagaagttaagcaacttgtccaaggtcacacagtagtggaattgagattgaatcagttccaactgacttgcaatcttgtgcttttcagacgatcccactaattgtccatatctgttccaaagccaaatcaagaggaacaagagcaaaatctgtcctctcatattattcatggtcctgcgtggatcataaatggcatgctgactgtctgatggagacttacttttcccttccccctggacacctgccatggcaatgacagaggctgtattttactgaagtggagggaagaggtgaatgcaaatgcctagggcctaagtatacaggaaggtgtagggagaggtaagcagtgtgtatgtggaggagatagcagacgtaagcagagagaaatcagagagcttagttcttcctctggggcgcactttgtggttaattaggacatgcaaatgagctagaagctcatttaatatcctccctgacatgtagccccaccccaccctgccccacttccctggcaggtacaagggccacctgattggcccaggtatctgtggaaggttccacctgcttctttgtggcccagggaacagaaaagagtccctgctgggcatgctagtggggccggcctggtctccctcctccctttctcttcccaacctttcagacttgggacctctcttttccctctccctcagacacttcccttgtgccccgcccctcagggtgatctctgaacccaaacttgccccaaagaaggttgctctgtcctctccacatccccatctcctccctagggccttgttggggagaggctcctccatctttcccaagtcacaccatcgtttcctacgtggtctggacaagagcaagagcacaccttgtccccaccttctccagagcagccagaacccacctcaggtgccttccccatccggtgcagttaaggcacttctgccagcaccatggtatgagcactagacttggagttaagatttgagagccccctctgtcactgtggaagcttgagcatgttgcttgatctctctgaaccttgtgtttctcatctgtgaaaggtgataatgtggggctgctgtgagatttaaaggacataatgcacctacggtccaagcactgcctggaatacagcagaagctcagcagatactggacaacccatccccttagtagaggcactaaccatgtgacccaaggcaaaagtgcttaagaaaaagtgctttctctgagcgttggtctcttcttctgtcgaaacatttatattgatttaatatctcacaggattgtagcaagggtcagagaagacaataggtgacatgtttttgtacactgtatactagccacccagatgggctgttatttgctaaatggcaaatttacactgttccccaaaggatgacatgcactggggaggcggggggtgtggaggtggagaaaggctgagcttggagaaaaggtgcttgaggaccccactgcctaaggacctgctctaggaaacattcccactccctacaccctagctgcccctcacagtcaacccttaaggacctcaaattcttggcaaggggtaaagagttgaaagtgccaagtcctagtggttttgagaagcctctggtctgctctttctgctctgtaaagtcttagttgccagagtcccctatagcccccacatcgctcccttcctcctgccctccggccaccctggaaactaatggcctaaaggtgctgtggctgtcctcctaaaatccattccctcctgatggggtggaggaatctgtgaagcccaccttcaggagaggtctcggggctcgggctggtgctgccagagaaagggtgactgaaccagaaaggcctaggggaaagcagctcaaactgcagccatccccttagtacgattactaggatgtcccttgccttccttttgcctcctccacccaacccctaaaataaacagtatgatgaaacctc

SEQ ID NO: 132489 - DNA, 1423 bp, Homo sapiens
  Payload ID: 5880
  Gene Symbol: FAM212B
  Gene Name: family with sequence similarity 212, member B
  Uniprot ID: Q9NTI7
  ENST ID: ENST00000444059
  CDS Start-End: 113-961
aacacgcccggcctggaagtggaagaaagggacgggagtcggaggctgagagactgcccagacacacaaaaaatgtggcctgaggaaagccccaagagggaggagaggaaagatgaggcaactgatgtccatgaaggaggtgggtgatggcttacaggatcagatgaactgcatgatgggtgcactgcaagaactgaagctcctccaggtgcagacagcactggaacagctggagatctctggagggggtcctgtgccaggcagccctgaaggtcccaggacccagtgcgagcacccttgttgggagggtggcagaggtcctgccaggcccacagtctgttccccctccagtcaaccttctcttggcagcagcaccaagtttccatcccataggagtgtctgtggaagggatttagcccccttgcccaggacacagccacatcaaagctgtgctcagcaggggccagagcgagtggaaccggatgactggacctccacgttgatgtcccggggccggaatcgacagcctctggtgttaggggacaacgtttttgcagacctggtgggcaattggctagacttgccagaactggagaagggtggggagaagggtgagactgggggggcacgtgaacccaaaggagagaaaggccagccccaggagctgggccgcaggttcgccctgacagcaaacatctttaagaagttcttgcgtagtgtgcggcctgaccgtgaccggctgctgaaggagaagccaggctgggtgacacccatggtccctgagtcccgaaccggccgctcacagaaggtcaagaagcggagcctttccaagggctctggacatttccccttcccaggcaccggggagcacaggcgaggggagaatccccccacaagctgccccaaggccctggagcactcaccctcaggatttgatattaacacagctgtttgggtctgaatcctagagacagaaagttgactgagcctgaaagggccaggtcccagtgctgggcccctggggaggagggagggtgggcggtatggctctcgaaagcccaactccaagttcctttcccccagaaagcggggagaagccagagttcttggctcaggactgaagggaaggtggttgggagaggctgtcttgggggctagctggtggaggaggtaagagtagctggagagtgagctgtgcgtgtgtgtgtgtgtgtgtgcatgtgtgtgtctgtctggcatgcatgcactcactttggggctggaggtgacagtaggtgagggcagaggaggagatcagaaaatccctctgacatctccactgcccccaaagacctccgttgaacattctgtatggaaaagagccctggagcatcaggttccccagataggcccccaaataaagacctgtctatggctctcccaa

SEQ ID NO: 132490 - DNA, 1217 bp, Homo sapiens
  Payload ID: 5880
  Gene Symbol: FAM212B
  Gene Name: family with sequence similarity 212, member B
  ENST ID: ENST00000534365
  CDS Start-End: 122-466
agctccgcgctgcgagcgctacgggcgcaggggcggggagccggcccggagcgcagtttccagtggggccggggtttcacccgggccctctctgtttgaaccgaacccgacaaatgggcgcatgacgatggagagcagggaaatggactgctatctccgtcgcctcaaacaggagctgatgtccatgaaggaggtgggtgatggcttacaggatcagatgaactgcatgatgggtgcactgcaagaactgaagctcctccaggtgcagacagcactggaacagctggagatctctggagggggtcctgtgccaggcagccctgaaggtcccaggacccagtgcgagcacccttgttgggagggtggcagaggtcctgccaggcccacagtctgttccccctccagtcaaccttctcttgagcagccagaacccacctcaggtgccttccccatccggtgcagttaaggcacttctgccagcaccatggtatgagcactagacttggagttaagatttgagagccccctctgtcactgtggaagcttgagcatgttgcttgatctctctgaaccttgtgtttctcatctgtgaaaggtgataatgtggggctgctgtgagatttaaaggacataatgcacctacggtccaagcactgcctggaatacagcagaagctcagcagatactggacaacccatccccttagtagaggcactaaccatgtgacccaaggcaaaagtgcttaagaaaaagtgctttctctgagcgttggtctcttcttctgtcgaaacatttatattgatttaatatctcacaggattgtagcaagggtcagagaagacaataggtgacatgtttttgtacactgtatactagccacccagatgggctgttatttgctaaatggcaaatttacactgttccccaaaggatgacatgcactggggaggcggggggtgtggaggtggagaaaggctgagcttggagaaaaggtgcttgaggaccccactgcctaaggacctgctctaggaaacattcccactccctacaccctagctgcccctcacagtcaacccttaaggacctcaaattcttggcaaggggtaaagagttgaaagtgccaagtcctagtggttttgagaagcctctggtctgctctttctgctctgtaaagtcttagttgccagagtcccctatagcccccacatcgctccctt

SEQ ID NO: 132491 - DNA, 556 bp, Homo sapiens
  Payload ID: 5880
  Gene Symbol: FAM212B
  Gene Name: family with sequence similarity 212, member B
  ENST ID: ENST00000527621
  CDS Start-End: 12-556
caaatgggcgcatgacgatggagagcagggaaatggactgctatctccgtcgcctcaaacaggagctggccccatgctttctctctcccctgcagatgtccatgaaggaggtgggtgatggcttacaggatcagatgaactgcatgatgggtgcactgcaagaactgaagctcctccaggtgcagacagcactggaacagctggagatctctggagggggtcctgtgccaggcagccctgaaggtcccaggacccagtgcgagcacccttgttgggagggtggcagaggtcctgccaggcccacagtctgttccccctccagtcaaccttctcttggcagcagcaccaagtttccatcccataggagtgtctgtggaagggatttagcccccttgcccaggacacagccacatcaaagctgtgctcagcaggggccagagcgagtggaaccggatgactggacctccacgttgatgtcccggggccggaatcgacagcctctggtgttaggggacaacgtttttgcagacctggtgggcaattggctagacttgcc

SEQ ID NO: 132492 - DNA, 2058 bp, Homo sapiens
  Payload ID: 5881
  Gene Symbol: FAM213A
  Gene Name: family with sequence similarity 213, member A
  Uniprot ID: Q9BRX8
  ENST ID: ENST00000372181
  CDS Start-End: 471-1160
agtatcctctgatcacagaagagaaagctgcccctacccagggacatgatcctgagccacctggattgtgagggagaatcaggcattgatgaggaggggaatgaggaagtagtctgcctacaggggacatagctcggcacagctccacagagctaggggctgcaacttggggcatgagaagagagagcagcaagagaaccatttgagaaggctgtcctttctctgtcatcactcctgatgccctggtgagctccacggtgcaggaacctccatgtgtgtgctgcatccccaagttctggtggcagcaggtgcttagcagcccttgtccagtctcgcctgtgacactgctgctcccttcccctgtcctgacctcctggttggctgtcctgccagagccttgcctggaagatgaaattccagctaccctgtgggagcagtaacgccttcttccttcttctcaatctccagaaatgtctttcctccaggacccaagtttcttcaccatggggatgtggtccattggtgcaggagccctgggggctgctgccttggcattgctgcttgccaacacagacgtgtttctgtccaagccccagaaagcggccctggagtacctggaggatatagacctgaaaacactggagaaggaaccaaggactttcaaagcaaaggagctatgggaaaaaaatggagctgtgattatggccgtgcggaggccaggctgtttcctctgtcgagaggaagctgcggatctgtcctccctgaaaagcatgttggaccagctgggcgtccccctctatgcagtggtaaaggagcacatcaggactgaagtgaaggatttccagccttatttcaaaggagaaatcttcctggatgaaaagaaaaagttctatggtccacaaaggcggaagatgatgtttatgggatttatccgtctgggagtgtggtacaacttcttccgagcctggaacggaggcttctctggaaacctggaaggagaaggcttcatccttgggggagttttcgtggtgggatcaggaaagcagggcattcttcttgagcaccgagaaaaagaatttggagacaaagtaaacctactttctgttctggaagctgctaagatgatcaaaccacagactttggcctcagagaaaaaatgattgtgtgaaactgcccagctcagggataaccagggacattcacctgtgttcatgggatgtattgtttccactcgtgtccctaaggagtgagaaacccatttatactctactctcagtatggattattaatgtattttaatattctgtttaggcccactaaggcaaaatagccccaaaacaagactgacaaaaatctgaaaaactaatgaggattattaagctaaaacctgggaaataggaggcttaaaattgactgccaggctgggtgcagtggctcacacctgtaatcccagcactttgggaggccaaggtgagcaagtcacttgaggtcgggagttcgagaccagcctgagcaacatggcgaaaccccgtctctactaaaaatacaaaaatcacccgggtgtggtggcaggcacctgtagtcccagctacccgggaggctgaggcaggagaatcacttgaacctgggaggtggaggttgcggtgagctgagatcacaccactgtattccagcctgggtgactgagactctaactaaaaaaaaaaaaaaaaaaaaattgattgctgtgcctcattacaaatgcatatgatgtttgagtgctgttgtttgaaattatttttcttttcgggtcttcaaaaattcaagaaaagttgatgattgacttgaagattacaaaatttaaggttttttggcatgtgtgttttctattaataattggttatatgatgtcaaagtaatactttcataatagaattgacatgctctgggatagtttgacaaaggtaaattataaagtgaaatctcttgtttcattatcttccattctaacctcagagatctgtttctctagaaaaaatgtccatctctggctttaataaaattatgcatcagaaatca

SEQ ID NO: 132493 - DNA, 1723 bp, Homo sapiens
  Payload ID: 5881
  Gene Symbol: FAM213A
  Gene Name: family with sequence similarity 213, member A
  Uniprot ID: Q9BRX8
  ENST ID: ENST00000372185
  CDS Start-End: 169-825
tggcggtggcgcggtagcgcgcgatgcagcacaggctagaggctgcgcaagcgcggggcccgcccctgggaccctccgggccgggcggtttggccccttagcgcccgggcgtcggggcggtaaaaggccggcagaagggaggcacttgaggacccaagtttcttcaccatggggatgtggtccattggtgcaggagccctgggggctgctgccttggcattgctgcttgccaacacagacgtgtttctgtccaagccccagaaagcggccctggagtacctggaggatatagacctgaaaacactggagaaggaaccaaggactttcaaagcaaaggagctatgggaaaaaaatggagctgtgattatggccgtgcggaggccaggctgtttcctctgtcgagaggaagctgcggatctgtcctccctgaaaagcatgttggaccagctgggcgtccccctctatgcagtggtaaaggagcacatcaggactgaagtgaaggatttccagccttatttcaaaggagaaatcttcctggatgaaaagaaaaagttctatggtccacaaaggcggaagatgatgtttatgggatttatccgtctgggagtgtggtacaacttcttccgagcctggaacggaggcttctctggaaacctggaaggagaaggcttcatccttgggggagttttcgtggtgggatcaggaaagcagggcattcttcttgagcaccgagaaaaagaatttggagacaaagtaaacctactttctgttctggaagctgctaagatgatcaaaccacagactttggcctcagagaaaaaatgattgtgtgaaactgcccagctcagggataaccagggacattcacctgtgttcatgggatgtattgtttccactcgtgtccctaaggagtgagaaacccatttatactctactctcagtatggattattaatgtattttaatattctgtttaggcccactaaggcaaaatagccccaaaacaagactgacaaaaatctgaaaaactaatgaggattattaagctaaaacctgggaaataggaggcttaaaattgactgccaggctgggtgcagtggctcacacctgtaatcccagcactttgggaggccaaggtgagcaagtcacttgaggtcgggagttcgagaccagcctgagcaacatggcgaaaccccgtctctactaaaaatacaaaaatcacccgggtgtggtggcaggcacctgtagtcccagctacccgggaggctgaggcaggagaatcacttgaacctgggaggtggaggttgcggtgagctgagatcacaccactgtattccagcctgggtgactgagactctaactaaaaaaaaaaaaaaaaaaaaattgattgctgtgcctcattacaaatgcatatgatgtttgagtgctgttgtttgaaattatttttcttttcgggtcttcaaaaattcaagaaaagttgatgattgacttgaagattacaaaatttaaggttttttggcatgtgtgttttctattaataattggttatatgatgtcaaagtaatactttcataatagaattgacatgctctgggatagtttgacaaaggtaaattataaagtgaaatctcttgtttcattatcttccattctaacctcagagatctgtttctctagaaaaaatgtccatctctggctttaataaaattatgcatcagaaatca

SEQ ID NO: 132494 - DNA, 1647 bp, Homo sapiens
  Payload ID: 5881
  Gene Symbol: FAM213A
  Gene Name:: family with sequence similarity 213, member A
  Uniprot ID: Q9BRX8
  ENST ID: ENST00000372187
  CDS Start-End: 61-750
gctcacccctggatatacttctttgtcaagagaagcagaggtgtggacgctgtgtatgaaatgtctttcctccaggacccaagtttcttcaccatggggatgtggtccattggtgcaggagccctgggggctgctgccttggcattgctgcttgccaacacagacgtgtttctgtccaagccccagaaagcggccctggagtacctggaggatatagacctgaaaacactggagaaggaaccaaggactttcaaagcaaaggagctatgggaaaaaaatggagctgtgattatggccgtgcggaggccaggctgtttcctctgtcgagaggaagctgcggatctgtcctccctgaaaagcatgttggaccagctgggcgtccccctctatgcagtggtaaaggagcacatcaggactgaagtgaaggatttccagccttatttcaaaggagaaatcttcctggatgaaaagaaaaagttctatggtccacaaaggcggaagatgatgtttatgggatttatccgtctgggagtgtggtacaacttcttccgagcctggaacggaggcttctctggaaacctggaaggagaaggcttcatccttgggggagttttcgtggtgggatcaggaaagcagggcattcttcttgagcaccgagaaaaagaatttggagacaaagtaaacctactttctgttctggaagctgctaagatgatcaaaccacagactttggcctcagagaaaaaatgattgtgtgaaactgcccagctcagggataaccagggacattcacctgtgttcatgggatgtattgtttccactcgtgtccctaaggagtgagaaacccatttatactctactctcagtatggattattaatgtattttaatattctgtttaggcccactaaggcaaaatagccccaaaacaagactgacaaaaatctgaaaaactaatgaggattattaagctaaaacctgggaaataggaggcttaaaattgactgccaggctgggtgcagtggctcacacctgtaatcccagcactttgggaggccaaggtgagcaagtcacttgaggtcgggagttcgagaccagcctgagcaacatggcgaaaccccgtctctactaaaaatacaaaaatcacccgggtgtggtggcaggcacctgtagtcccagctacccgggaggctgaggcaggagaatcacttgaacctgggaggtggaggttgcggtgagctgagatcacaccactgtattccagcctgggtgactgagactctaactaaaaaaaaaaaaaaaaaaaaattgattgctgtgcctcattacaaatgcatatgatgtttgagtgctgttgtttgaaattatttttcttttcgggtcttcaaaaattcaagaaaagttgatgattgacttgaagattacaaaatttaaggttttttggcatgtgtgttttctattaataattggttatatgatgtcaaagtaatactttcataatagaattgacatgctctgggatagtttgacaaaggtaaattataaagtgaaatctcttgtttcattatcttccattctaacctcagagatctgtttctctagaaaaaatgtccatctctggctttaataaaattatgcatcagaaatc

SEQ ID NO: 132495 - DNA, 829 bp, Homo sapiens
  Payload ID: 5881
  Gene Symbol: FAM213A
  Gene Name: family with sequence similarity 213, member A
  Uniprot ID: Q9BRX8
  ENST ID: ENST00000372188
  CDS Start-End: 131-820
tgcccagactggtcttgaactcctgggctcaagcgatcctcccaaagccctgagattacaggcgtgagccagcgcgccggacacaacctcctactttcatgaaagagtgggcacttccaacaggaggaaaatgtctttcctccaggacccaagtttcttcaccatggggatgtggtccattggtgcaggagccctgggggctgctgccttggcattgctgcttgccaacacagacgtgtttctgtccaagccccagaaagcggccctggagtacctggaggatatagacctgaaaacactggagaaggaaccaaggactttcaaagcaaaggagctatgggaaaaaaatggagctgtgattatggccgtgcggaggccaggctgtttcctctgtcgagaggaagctgcggatctgtcctccctgaaaagcatgttggaccagctgggcgtccccctctatgcagtggtaaaggagcacatcaggactgaagtgaaggatttccagccttatttcaaaggagaaatcttcctggatgaaaagaaaaagttctatggtccacaaaggcggaagatgatgtttatgggatttatccgtctgggagtgtggtacaacttcttccgagcctggaacggaggcttctctggaaacctggaaggagaaggcttcatccttgggggagttttcgtggtgggatcaggaaagcagggcattcttcttgagcaccgagaaaaagaatttggagacaaagtaaacctactttctgttctggaagctgctaagatgatcaaaccacagactttggcctcagagaaaaaatgattgtgtgaa

SEQ ID NO: 132496 - DNA, 2213 bp, Homo sapiens
  Payload ID: 5881
  Gene Symbol: FAM213A
  Gene Name: family with sequence similarity 213, member A
  Uniprot ID: Q9BRX8
  ENST ID: ENST00000615554
  CDS Start-End: 627-1316
gggtcacatggcggtggcgcggtagcgcgcgatgcagcacaggctagaggctgcgcaagcgcggggcccgcccctgggaccctccgggccgggcggtttggccccttagcgcccgggcgtcggggcggtaaaaggccggcagaagggaggcacttgagtatcctctgatcacagaagagaaagctgcccctacccagggacatgatcctgagccacctggattgtgagggagaatcaggcattgatgaggaggggaatgaggaagtagtctgcctacaggggacatagctcggcacagctccacagagctaggggctgcaacttggggcatgagaagagagagcagcaagagaaccatttgagaaggctgtcctttctctgtcatcactcctgatgccctggtgagctccacggtgcaggaacctccatgtgtgtgctgcatccccaagttctggtggcagcaggtgcttagcagcccttgtccagtctcgcctgtgacactgctgctcccttcccctgtcctgacctcctggttggctgtcctgccagagccttgcctggaagatgaaattccagctaccctgtgggagcagtaacgccttcttccttcttctcaatctccagaaatgtctttcctccaggacccaagtttcttcaccatggggatgtggtccattggtgcaggagccctgggggctgctgccttggcattgctgcttgccaacacagacgtgtttctgtccaagccccagaaagcggccctggagtacctggaggatatagacctgaaaacactggagaaggaaccaaggactttcaaagcaaaggagctatgggaaaaaaatggagctgtgattatggccgtgcggaggccaggctgtttcctctgtcgagaggaagctgcggatctgtcctccctgaaaagcatgttggaccagctgggcgtccccctctatgcagtggtaaaggagcacatcaggactgaagtgaaggatttccagccttatttcaaaggagaaatcttcctggatgaaaagaaaaagttctatggtccacaaaggcggaagatgatgtttatgggatttatccgtctgggagtgtggtacaacttcttccgagcctggaacggaggcttctctggaaacctggaaggagaaggcttcatccttgggggagttttcgtggtgggatcaggaaagcagggcattcttcttgagcaccgagaaaaagaatttggagacaaagtaaacctactttctgttctggaagctgctaagatgatcaaaccacagactttggcctcagagaaaaaatgattgtgtgaaactgcccagctcagggataaccagggacattcacctgtgttcatgggatgtattgtttccactcgtgtccctaaggagtgagaaacccatttatactctactctcagtatggattattaatgtattttaatattctgtttaggcccactaaggcaaaatagccccaaaacaagactgacaaaaatctgaaaaactaatgaggattattaagctaaaacctgggaaataggaggcttaaaattgactgccaggctgggtgcagtggctcacacctgtaatcccagcactttgggaggccaaggtgagcaagtcacttgaggtcgggagttcgagaccagcctgagcaacatggcgaaaccccgtctctactaaaaatacaaaaatcacccgggtgtggtggcaggcacctgtagtcccagctacccgggaggctgaggcaggagaatcacttgaacctgggaggtggaggttgcggtgagctgagatcacaccactgtattccagcctgggtgactgagactctaactaaaaaaaaaaaaaaaaaaaaattgattgctgtgcctcattacaaatgcatatgatgtttgagtgctgttgtttgaaattatttttcttttcgggtcttcaaaaattcaagaaaagttgatgattgacttgaagattacaaaatttaaggttttttggcatgtgtgttttctattaataattggttatatgatgtcaaagtaatactttcataatagaattgacatgctctgggatagtttgacaaaggtaaattataaagtgaaatctcttgtttcattatcttccattctaacctcagagatctgtttctctagaaaaaatgtccatctctggctttaataaaattatgcatcagaaatc

SEQ ID NO: 132497 - DNA, 5859 bp, Homo sapiens
  Payload ID: 5881
  Gene Symbol: FAM213A
  Gene Name: family with sequence similarity 213, member A
  Uniprot ID: Q9BRX8
  ENST ID: ENST00000606162
  CDS Start-End: 154-843
atggcggtggcgcggtagcgcgcgatgcagcacaggctagaggctgcgcaagcgcggggcccgcccctgggaccctccgggccgggcggtttggccccttagcgcccgggcgtcggggcggtaaaaggccggcagaagggaggcacttgagaaatgtctttcctccaggacccaagtttcttcaccatggggatgtggtccattggtgcaggagccctgggggctgctgccttggcattgctgcttgccaacacagacgtgtttctgtccaagccccagaaagcggccctggagtacctggaggatatagacctgaaaacactggagaaggaaccaaggactttcaaagcaaaggagctatgggaaaaaaatggagctgtgattatggccgtgcggaggccaggctgtttcctctgtcgagaggaagctgcggatctgtcctccctgaaaagcatgttggaccagctgggcgtccccctctatgcagtggtaaaggagcacatcaggactgaagtgaaggatttccagccttatttcaaaggagaaatcttcctggatgaaaagaaaaagttctatggtccacaaaggcggaagatgatgtttatgggatttatccgtctgggagtgtggtacaacttcttccgagcctggaacggaggcttctctggaaacctggaaggagaaggcttcatccttgggggagttttcgtggtgggatcaggaaagcagggcattcttcttgagcaccgagaaaaagaatttggagacaaagtaaacctactttctgttctggaagctgctaagatgatcaaaccacagactttggcctcagagaaaaaatgattgtgtgaaactgcccagctcagggataaccagggacattcacctgtgttcatgggatgtattgtttccactcgtgtccctaaggagtgagaaacccatttatactctactctcagtatggattattaatgtattttaatattctgtttaggcccactaaggcaaaatagccccaaaacaagactgacaaaaatctgaaaaactaatgaggattattaagctaaaacctgggaaataggaggcttaaaattgactgccaggctgggtgcagtggctcacacctgtaatcccagcactttgggaggccaaggtgagcaagtcacttgaggtcgggagttcgagaccagcctgagcaacatggcgaaaccccgtctctactaaaaatacaaaaatcacccgggtgtggtggcaggcacctgtagtcccagctacccgggaggctgaggcaggagaatcacttgaacctgggaggtggaggttgcggtgagctgagatcacaccactgtattccagcctgggtgactgagactctaactaaaaaaaaaaaaaaaaaaaaattgattgctgtgcctcattacaaatgcatatgatgtttgagtgctgttgtttgaaattatttttcttttcgggtcttcaaaaattcaagaaaagttgatgattgacttgaagattacaaaatttaaggttttttggcatgtgtgttttctattaataattggttatatgatgtcaaagtaatactttcataatagaattgacatgctctgggatagtttgacaaaggtaaattataaagtgaaatctcttgtttcattatcttccattctaacctcagagatctgtttctctagaaaaaatgtccatctctggctttaataaaattatgcatcagaaatcacctgtatgtataagattttctgataaaactaataattatatttaccatataattggctgaaagtaaaaaaagtcagcattctccatggctgaggggtaaagtgcctcgggggattcctctggttctagctatctaagtggtttgaaaatgaccaggaaaaattcatcctgtcattcacgttagtaattttgctgtctttcctagaggaatgactttggtgtttaaaattggtagctgtttttctattggtcttttagcctaatttggcaaatcagaagaaaggacatagagatgatgaaatataactttatcttttttgtttgaattttgtcgtgtaagtttgagtgacatcatcaagacctaccagggagctcggccacagggagtctactcaaggcatcaaactggcccaggagtagaaaggtgggggtggaaataggaaatagtgtttacccaggggactggcccagccaggaggagaaaggaatcagtgtttacccaggaaagcaagaatggatactgatgttggaggtaaagctgggaaagtaggagagcatcgggattgagtatgcagagtgagttagggttgagtggttcgggactaagacccactaagaccatgcctgcacctgacttcatgtagcagtggttgcatggggtatgcatgggcccttaaagggctgggcttctgcagcatttgaggccatagcctttggtacttgcacagggttggtacctgtcatccttgggactccagctactgataggataactcagtacctaaacttagaactttaatacctaagacacttgatggtgaaacagttctcttgcaactaaagaagaacctgaggtcaggtgtggtggctcacgcctgtaatcctagcactttgggaagtcgaggtagaaggatcacttgaggtcaggagttcgagaccagcctggccagcatggtgaaaccccatctctactaaaaatacaaaatattagacagacggggtggtacatgcctgtaatcccagctacttgggaggctgaggcaggagaatcgcttgaacccaggaggcagaggttgcagtgagccgagatcgtgccactgcactccagcttgggcaacaagagcgaaactccatatcaaaaaaaaaaacctgagaggacattgcaccaatggagatgcatcaagagaaacatgtttggttttttgtgagctctcaccaacttttttcccctgggtcctcacgtgcagtgtggtcttctctttctgattagcatgtcattttggaaagagcactggattgagtcatgaggcataatcaatttctagtttaccagtgtgatcttaagcaaagatctaactcattggcaaaatgggcgtgattccttcccattcagggctgtttatgataagtcactgagggaatgataaatattatgacactgcttctcagactgtaatgtacatgcacatcacataaggaccttattaaaatggagacttaaaaagctggacgctaaaggcaataatgacagattttactcaataactactgcagaaggagagagtcctcagtatagaactgagcttagctccaatctgtgcagaggtgatggaattttaaagaggggagggaggaggttcaaatagaactagggaagtgcaaaattacaaaaagctggtaaggagattggtcaatgtgattcggctatctgtgtctactaactctcaaatttatttatcaaagttaggatcctagcctcccacagagaccaggagtcggccttatcattcctgataattatatgacaaagggatggctcccagaaaaagtgagaaacacattcctgtgcagcagaagatacatatatcccccaaagggacagaaaggatttacaattgtaaattttataaagtatgtcctctaagaagagggagggactgggtgccatggctcatgcctataatcccagcactttgggtggccaaggtgggtgcatcacctgaggtcaggagttcaagagcagcctggccaacatggtgaaaccctgtctctactaaaaatacaaaagttagcctgttgtggtggcgcgcacctgtaatcccagctactcgggtggctgaggcaggagaatcgcttgaacccaggaggcggagggtgcagtgagccgggatcacgccactgcacttcagcctgggtgacagagtgtgactccatctcaagaaaaacgagggagattagaaacctatgatcaggcattggctgaaacaaatggtaaattcttttggcagccttgagcttccccaggcagggacccaaaggggcctgggttatccctgagacagggccttgagctgctagaaactatgctagtgtttgttcaagtctctccgtgtccggggtgagcaaaattgtttgtgctgaaaatcaatgatttgcagctctcaagattccagtgggcagtctgggtgggcctgagtttctgctttttttttttctttatgtacagggtcttgctctgtcacctaggctagagtgtaattagtggccccagtcatggctcactgcagctgcaaactggctgcaagctgttctggctcagcctaccaagttactgggcttacaggtggatgccaccgtacccaacagattttatttttgtagggatgggggtctccctgtattgcccaggctggtctcaaactcctggcctcccaaagtgtttagattacaggtgtaagccaccacacgtggccagcctctgcatttctaacaggttccaggtgatcttgatgttctgctggtccatgggtcacactttgagaagcatggttctaaaggactatacagattaaagtcattaatctctgtgggctttggacttgaagtttcagcagcctttgacaagcatttgcaggtttcctttttatttatttgataaactgagaatccacatgcaaagaaatgcaagaaaattcaaagaacgtaagaaaatgtccttgctgtaaagctggtggttctcaatctcggatacacagtagaatcacctggtgcgggggttgggggcggggtgcagtgtaaaaattattaaatcagaatctctggggtaggccccaagcaacttttttttttttttttttagatagaatcttgcttgtcacctaggctagagtgcagtaatgcaatcatggctcactgctgccttaacttctgggctcaagtgatatcctcccacctcagcctccctagtagctgggactacaggcgtggactaccacacccaacaaatttttaaattttttgtagaggcaagctcttatactatcttgcacaggctggtctcgaactcctgggctcaagcagtcatcctgcctcagccttccaaagctcagggattacagacatgagccacagcaccaggccaacaatatttcttaaagctcctggagtgattccaatatgcagccaaggttgaaaaccaccctttaaaaggctcggcatccagtgtggaagaccagcacactcacgtcaggagaccttacctggagccaggatgcccctgatcatctctgataactttaaaaggaaggcctcagaagcagccccagaagcaaaagtttctctctgaccttctcctgccctcttgtttctggcttttcattctcccccaaggctacccatagaaactagaatccctcttccccaaggcaggtcatcagaaaccagaaccggttttacccaaagccagccataaaacctaaaaatagtcctctcactccccattcccctttctgtgtaaaaactggttggaaagaaatgatctgacctaccgtgtttgactgtcgtaagatacccattccagagagggtcccaccccgtgcccagaaggaaggaatcctgcacagagaggccaagaagaatctagacagccttgctgggtttcccctctcagtctattactattagatcatacccttcttgtccaatcatatttctacacagtccataatctgttgaacctaaacataaaaatggacaattcccctgtatcttggggtcttcattctgagggctcacatacaattatgatcaaataaatttgtttgctttttctcctgttaa

SEQ ID NO: 132498 - DNA, 2765 bp, Homo sapiens
  Payload ID: 5882
  Gene Symbol: FAM213B
  Gene Name: family with sequence similarity 213, member B
  ENST ID: ENST00000378424
  CDS Start-End: 17-712
gcttggggctggatctatgagccgggagcggggatccaggagcgaggagccgggagcggggaacagggagtcggggagccgggaaccagggctggcagcggccgccatgagcacggtggaccttgctcgcgtgggcgcgtgcatcctgaagcatgcggtgaccggggaggccgtggagctgcggagcctgtggcgggagcacgcgtgcgtggtggccgggctgcggcgcttcgggtgcgtggtgtgccgctggatcgcccaggacctcagcagccttgctgggctcctggaccaacacggcgtgcgcctggtgggcgtagggcccgaggccctgggtctgcaggagttcctggacggcgactacttcgcgggagagctctacctggatgagagcaagcagctttacaaggagctaggcttcaagcggctctggacccaggcttctccggagtttggccaagcgacctggtgtcttcgcaggtacaacagcctgagcatcctcccagcagctctggggaagcccgtgcgtgatgtggctgccaaggccaaggctgttggcatccaggggaacttgtctggggacctgctgcagagcggagggctgctggtggtcagcaaagaagtccccaggcgactacgtccccaaggagcacatcctgcaggtcctgggcatctctgcggaggtctgtgccagcgacccgcctcagtgtgacagagaggtgtgagggaggcgaaggccctggcctccgaggatctgggtggcgtctgctgccctaggtgtgctggaagtccacttggaagaactgttccggaggcgctgggtcgggatgccgaacctctcctgatccgccggcagcaacgagccattaaaactgcagttcctgaccacgcactgcttcgcaggctccgagccctgcatcctccacagcccccgccttgctcactgttgggccctcagggcgggcagggtggctgtgagtcccaggtgtcatcttcctgctctgcgactttctctggagaccttgggcctttggcctgtggggcactggggatggtaacctcactgccccgtcactcccttcaaaggcgacagacccaagcccacgtcaggagaggagcgtggggtcagctccagcagggtcggggtcagtgcctgtgtctggtgggggccactcaggagagttgggttttcagggcagagatgggcttgattccacctggtggggtgggtggaccctggagactctcaggtgatgggccagcctgccccaaggctctttactgatgtcagaatcattgtttgcacctgctgggtatggcctttggggcggccggcccgggagggtcttagtctaattaggtgtgtccagcttcttggccacctttccctggggaccctaacaggcccagagcagagccccttacctcccaggtcagactacctgctcaggccctcccctcccatgcaggccgatgacaactgcagccctctctgcactccctagtccagacctggggaccactgtgggttcctgtgggtctcccggctcccttcctgcccccaatgccacccttgcagtggccatttaaaaatgcatagcaggtgacccactgcgtccctttgcgttcagcccctcctctggctttcagttacaccaagctaaaatttcaggttcccagctgcagctctctgggtcccccggtgccccagtggggctccccgcatctgaatgtgtggtccctgggggtgggcacttgggggcatcctggtcactgctggccctagcattggaccctaggagacctgactggaactggctccctccccatcagctcccagctgtcactctctcccacccccgggcagctgttttgcccaagaccactgctacctgtttacccaccctggtccctcccagacaagcaaggcctctgatttctttgaagcatttacttagctcaagtctgaagctgtagatactggaagacaatgcaccttggagggtgggcaggacacagttgattgtctctacagagctgtgacgggggcactgagccccgcgggtgtctgtggagggggctccggtccaggtactgcactggacactgctcatccctgggtgtcaggcaggtggctgcaccctaggccaggcgcagaggcctggcaggcaggcttggcatggttggccggggcgggacgtacactgggtcgccgctagctgcaccttcgcacagatgcctccgagcagcgggtgggcgtgggccgcacagcgcggcagggccttggctaccacacgcggcatcgctccttggggtgcatgggggtgccccgggcacagtggaacgtgtctgcgaaggcggccaggttctgcagcgaccccagtaccctgtgggtgggtgggtgtgacagcaggagcattgccatcttggacaaacatggccattttaagttctccgtgattaaaaaccagcccaaaacatcagcctaatggctcatgtcagtatgagcagaaacatttcaaccatgagataaacccccatctgaccagaaacatgccaatcctgagaataacctcccctccagccagagatattccaactctgcaataaaactctccttcacacagaaacattcgcagcctgcggtaggctcccccttcctaaacccttaaatgcccttagtctgtaagagaatgtccctgaccgaaatcggccagaagcccctctcaggtttattcccaaaataaacctgtctctgttgagcc

SEQ ID NO: 132499 - DNA, 2665 bp, Homo sapiens
  Payload ID: 5882
  Gene Symbol: FAM213B
  Gene Name: family with sequence similarity 213, member B
  ENST ID: ENST00000378425
  CDS Start-End: 47-625
aaaggcgggaccggggcatctcggggcggggcttggggctggatctatgagccgggagcggggatccaggagcgaggagccgggagcggggaacagggagtcggggagccgggaaccagggctggcagcggccgccatgagcacggtggaccttgctcgcgtgggcgcgtgcatcctgaagcatgcggtgaccggggaggccgtggagctgcggagcctgtggcgggagcacgcgtgcgtggtggccgggctgcggcgcttcgggtgcgtggtgtgccgctggatcgcccaggacctcagcagccttgctgggctcctggaccaacacggcgtgcgcctggtgggcgtagggcccgaggccctgggtctgcaggagttcctggacggcgactacttcgcgggagagctctacctggatgagagcaagcagctttacaaggagctaggcttcaagcggtacaacagcctgagcatcctcccagcagctctggggaagcccgtgcgtgatgtggctgccaagaagtccccaggcgactacgtccccaaggagcacatcctgcaggtcctgggcatctctgcggaggtctgtgccagcgacccgcctcagtgtgacagagaggtgtgagggaggcgaaggccctggcctccgaggatctgggtggcgtctgctgccctaggtgtgctggaagtccacttggaagaactgttccggaggcgctgggtcgggatgccgaacctctcctgatccgccggcagcaacgagccattaaaactgcagttcctgaccacgcactgcttcgcaggctccgagccctgcatcctccacagcccccgccttgctcactgttgggccctcagggcgggcagggtggctgtgagtcccaggtgtcatcttcctgctctgcgactttctctggagaccttgggcctttggcctgtggggcactggggatggtaacctcactgccccgtcactcccttcaaaggcgacagacccaagcccacgtcaggagaggagcgtggggtcagctccagcagggtcggggtcagtgcctgtgtctggtgggggccactcaggagagttgggttttcagggcagagatgggcttgattccacctggtggggtgggtggaccctggagactctcaggtgatgggccagcctgccccaaggctctttactgatgtcagaatcattgtttgcacctgctgggtatggcctttggggcggccggcccgggagggtcttagtctaattaggtgtgtccagcttcttggccacctttccctggggaccctaacaggcccagagcagagccccttacctcccaggtcagactacctgctcaggccctcccctcccatgcaggccgatgacaactgcagccctctctgcactccctagtccagacctggggaccactgtgggttcctgtgggtctcccggctcccttcctgcccccaatgccacccttgcagtggccatttaaaaatgcatagcaggtgacccactgcgtccctttgcgttcagcccctcctctggctttcagttacaccaagctaaaatttcaggttcccagctgcagctctctgggtcccccggtgccccagtggggctccccgcatctgaatgtgtggtccctgggggtgggcacttgggggcatcctggtcactgctggccctagcattggaccctaggagacctgactggaactggctccctccccatcagctcccagctgtcactctctcccacccccgggcagctgttttgcccaagaccactgctacctgtttacccaccctggtccctcccagacaagcaaggcctctgatttctttgaagcatttacttagctcaagtctgaagctgtagatactggaagacaatgcaccttggagggtgggcaggacacagttgattgtctctacagagctgtgacgggggcactgagccccgcgggtgtctgtggagggggctccggtccaggtactgcactggacactgctcatccctgggtgtcaggcaggtggctgcaccctaggccaggcgcagaggcctggcaggcaggcttggcatggttggccggggcgggacgtacactgggtcgccgctagctgcaccttcgcacagatgcctccgagcagcgggtgggcgtgggccgcacagcgcggcagggccttggctaccacacgcggcatcgctccttggggtgcatgggggtgccccgggcacagtggaacgtgtctgcgaaggcggccaggttctgcagcgaccccagtaccctgtgggtgggtgggtgtgacagcaggagcattgccatcttggacaaacatggccattttaagttctccgtgattaaaaaccagcccaaaacatcagcctaatggctcatgtcagtatgagcagaaacatttcaaccatgagataaacccccatctgaccagaaacatgccaatcctgagaataacctcccctccagccagagatattccaactctgcaataaaactctccttcacacagaaacattcgcagcctgcggtaggctcccccttcctaaacccttaaatgcccttagtctgtaagagaatgtccctgaccgaaatcggccagaagcccctctcaggtttattcccaaaataaacctgtctctgttgagcc

SEQ ID NO: 132500 - DNA, 2689 bp, Homo sapiens
  Payload ID: 5882
  Gene Symbol: FAM213B
  Gene Name: family with sequence similarity 213, member B
  ENST ID: ENST00000378427
  CDS Start-End: 1-640
gagccgggagcggggatccaggagcgaggagccgggagcggggaacagggagtcggggagccgggaaccagggctggcagcggccgccatgagcacggtggaccttgctcgcgtgggcgcgtgcatcctgaagcatgcggtgaccggggaggccgtggagctgcggagcctgtggcgggagcacgcgtgcgtggtggccgggctgcggcgcttcgggtgcgtggtgtgccgctggatcgcccaggacctcagcagccttgctgggctcctggaccaacacggcgtgcgcctggtgggcgtagggcccgaggccctgggtctgcaggagttcctggacggcgactacttcgcgggagagctctacctggatgagagcaagcagctttacaaggagctaggcttcaagcggtacaacagcctgagcatcctcccagcagctctggggaagcccgtgcgtgatgtggctgccaaggccaaggctgttggcatccaggggaacttgtctggggacctgctgcagagcggagggctgctggtggtcagcaaagaagtccccaggcgactacgtccccaaggagcacatcctgcaggtcctgggcatctctgcggaggtctgtgccagcgacccgcctcagtgtgacagagaggtgtgagggaggcgaaggccctggcctccgaggatctgggtggcgtctgctgccctaggtgtgctggaagtccacttggaagaactgttccggaggcgctgggtcgggatgccgaacctctcctgatccgccggcagcaacgagccattaaaactgcagttcctgaccacgcactgcttcgcaggctccgagccctgcatcctccacagcccccgccttgctcactgttgggccctcagggcgggcagggtggctgtgagtcccaggtgtcatcttcctgctctgcgactttctctggagaccttgggcctttggcctgtggggcactggggatggtaacctcactgccccgtcactcccttcaaaggcgacagacccaagcccacgtcaggagaggagcgtggggtcagctccagcagggtcggggtcagtgcctgtgtctggtgggggccactcaggagagttgggttttcagggcagagatgggcttgattccacctggtggggtgggtggaccctggagactctcaggtgatgggccagcctgccccaaggctctttactgatgtcagaatcattgtttgcacctgctgggtatggcctttggggcggccggcccgggagggtcttagtctaattaggtgtgtccagcttcttggccacctttccctggggaccctaacaggcccagagcagagccccttacctcccaggtcagactacctgctcaggccctcccctcccatgcaggccgatgacaactgcagccctctctgcactccctagtccagacctggggaccactgtgggttcctgtgggtctcccggctcccttcctgcccccaatgccacccttgcagtggccatttaaaaatgcatagcaggtgacccactgcgtccctttgcgttcagcccctcctctggctttcagttacaccaagctaaaatttcaggttcccagctgcagctctctgggtcccccggtgccccagtggggctccccgcatctgaatgtgtggtccctgggggtgggcacttgggggcatcctggtcactgctggccctagcattggaccctaggagacctgactggaactggctccctccccatcagctcccagctgtcactctctcccacccccgggcagctgttttgcccaagaccactgctacctgtttacccaccctggtccctcccagacaagcaaggcctctgatttctttgaagcatttacttagctcaagtctgaagctgtagatactggaagacaatgcaccttggagggtgggcaggacacagttgattgtctctacagagctgtgacgggggcactgagccccgcgggtgtctgtggagggggctccggtccaggtactgcactggacactgctcatccctgggtgtcaggcaggtggctgcaccctaggccaggcgcagaggcctggcaggcaggcttggcatggttggccggggcgggacgtacactgggtcgccgctagctgcaccttcgcacagatgcctccgagcagcgggtgggcgtgggccgcacagcgcggcagggccttggctaccacacgcggcatcgctccttggggtgcatgggggtgccccgggcacagtggaacgtgtctgcgaaggcggccaggttctgcagcgaccccagtaccctgtgggtgggtgggtgtgacagcaggagcattgccatcttggacaaacatggccattttaagttctccgtgattaaaaaccagcccaaaacatcagcctaatggctcatgtcagtatgagcagaaacatttcaaccatgagataaacccccatctgaccagaaacatgccaatcctgagaataacctcccctccagccagagatattccaactctgcaataaaactctccttcacacagaaacattcgcagcctgcggtaggctcccccttcctaaacccttaaatgcccttagtctgtaagagaatgtccctgaccgaaatcggccagaagcccctctcaggtttattcccaaaataaacctgtctctgttg

SEQ ID NO: 132501 - DNA, 2749 bp, Homo sapiens
  Payload ID: 5882
  Gene Symbol: FAM213B
  Gene Name: family with sequence similarity 213, member B
  Uniprot ID: Q8TBF2
  ENST ID: ENST00000419916
  CDS Start-End: 22-708
gcggggcttggggctggatctatgagccgggagcggggatccaggagcgaggagccgggagcggggaacagggagtcggggagccgggaaccagggctggcagcggccgccatgagcacggtggaccttgctcgcgtgggcgcgtgcatcctgaagcatgcggtgaccggggaggccgtggagctgcggagcctgtggcgggagcacgcgtgcgtggtggccgggctgcggcgcttcgggtgcgtggtgtgccgctggatcgcccaggacctcagcagccttgctgggctcctggaccaacacggcgtgcgcctggtgggcgtagggcccgaggccctgggtctgcaggagttcctggacggcgactacttcgcgggagagctctacctggatgagagcaagcagctttacaaggagctaggcttcaagcggtacaacagcctgagcatcctcccagcagctctggggaagcccgtgcgtgatgtggctgccaaggccaaggctgttggcatccaggggaacttgtctggggacctgctgcagagcggagggctgctggtggtcagcaaaggtggtgataaagtgctcctgcatttcgtccagaagtccccaggcgactacgtccccaaggagcacatcctgcaggtcctgggcatctctgcggaggtctgtgccagcgacccgcctcagtgtgacagagaggtgtgagggaggcgaaggccctggcctccgaggatctgggtggcgtctgctgccctaggtgtgctggaagtccacttggaagaactgttccggaggcgctgggtcgggatgccgaacctctcctgatccgccggcagcaacgagccattaaaactgcagttcctgaccacgcactgcttcgcaggctccgagccctgcatcctccacagcccccgccttgctcactgttgggccctcagggcgggcagggtggctgtgagtcccaggtgtcatcttcctgctctgcgactttctctggagaccttgggcctttggcctgtggggcactggggatggtaacctcactgccccgtcactcccttcaaaggcgacagacccaagcccacgtcaggagaggagcgtggggtcagctccagcagggtcggggtcagtgcctgtgtctggtgggggccactcaggagagttgggttttcagggcagagatgggcttgattccacctggtggggtgggtggaccctggagactctcaggtgatgggccagcctgccccaaggctctttactgatgtcagaatcattgtttgcacctgctgggtatggcctttggggcggccggcccgggagggtcttagtctaattaggtgtgtccagcttcttggccacctttccctggggaccctaacaggcccagagcagagccccttacctcccaggtcagactacctgctcaggccctcccctcccatgcaggccgatgacaactgcagccctctctgcactccctagtccagacctggggaccactgtgggttcctgtgggtctcccggctcccttcctgcccccaatgccacccttgcagtggccatttaaaaatgcatagcaggtgacccactgcgtccctttgcgttcagcccctcctctggctttcagttacaccaagctaaaatttcaggttcccagctgcagctctctgggtcccccggtgccccagtggggctccccgcatctgaatgtgtggtccctgggggtgggcacttgggggcatcctggtcactgctggccctagcattggaccctaggagacctgactggaactggctccctccccatcagctcccagctgtcactctctcccacccccgggcagctgttttgcccaagaccactgctacctgtttacccaccctggtccctcccagacaagcaaggcctctgatttctttgaagcatttacttagctcaagtctgaagctgtagatactggaagacaatgcaccttggagggtgggcaggacacagttgattgtctctacagagctgtgacgggggcactgagccccgcgggtgtctgtggagggggctccggtccaggtactgcactggacactgctcatccctgggtgtcaggcaggtggctgcaccctaggccaggcgcagaggcctggcaggcaggcttggcatggttggccggggcgggacgtacactgggtcgccgctagctgcaccttcgcacagatgcctccgagcagcgggtgggcgtgggccgcacagcgcggcagggccttggctaccacacgcggcatcgctccttggggtgcatgggggtgccccgggcacagtggaacgtgtctgcgaaggcggccaggttctgcagcgaccccagtaccctgtgggtgggtgggtgtgacagcaggagcattgccatcttggacaaacatggccattttaagttctccgtgattaaaaaccagcccaaaacatcagcctaatggctcatgtcagtatgagcagaaacatttcaaccatgagataaacccccatctgaccagaaacatgccaatcctgagaataacctcccctccagccagagatattccaactctgcaataaaactctccttcacacagaaacattcgcagcctgcggtaggctcccccttcctaaacccttaaatgcccttagtctgtaagagaatgtccctgaccgaaatcggccagaagcccctctcaggtttattcccaaaataaacctgtctctgttgagcca

SEQ ID NO: 132502 - DNA, 2827 bp, Homo sapiens
  Payload ID: 5882
  Gene Symbol: FAM213B
  Gene Name: family with sequence similarity 213, member B
  ENST ID: ENST00000444521
  CDS Start-End: 47-787
aaaggcgggaccggggcatctcggggcggggcttggggctggatctatgagccgggagcggggatccaggagcgaggagccgggagcggggaacagggagtcggggagccgggaaccagggctggcagcggccgccatgagcacggtggaccttgctcgcgtgggcgcgtgcatcctgaagcatgcggtgaccggggaggccgtggagctgcggagcctgtggcgggagcacgcgtgcgtggtggccgggctgcggcgcttcgggtgcgtggtgtgccgctggatcgcccaggacctcagcagccttgctgggctcctggaccaacacggcgtgcgcctggtgggcgtagggcccgaggccctgggtctgcaggagttcctggacggcgactacttcgcgggagagctctacctggatgagagcaagcagctttacaaggagctaggcttcaagcggctctggacccaggcttctccggagtttggccaagcgacctggtgtcttcgcaggtacaacagcctgagcatcctcccagcagctctggggaagcccgtgcgtgatgtggctgccaaggccaaggctgttggcatccaggggaacttgtctggggacctgctgcagagcggagggctgctggtggtcagcaaaggtggtgataaagtgctcctgcatttcgtccagaagtccccaggcgactacgtccccaaggagcacatcctgcaggtcctgggcatctctgcggaggtctgtgccagcgacccgcctcagtgtgacagagaggtgtgagggaggcgaaggccctggcctccgaggatctgggtggcgtctgctgccctaggtgtgctggaagtccacttggaagaactgttccggaggcgctgggtcgggatgccgaacctctcctgatccgccggcagcaacgagccattaaaactgcagttcctgaccacgcactgcttcgcaggctccgagccctgcatcctccacagcccccgccttgctcactgttgggccctcagggcgggcagggtggctgtgagtcccaggtgtcatcttcctgctctgcgactttctctggagaccttgggcctttggcctgtggggcactggggatggtaacctcactgccccgtcactcccttcaaaggcgacagacccaagcccacgtcaggagaggagcgtggggtcagctccagcagggtcggggtcagtgcctgtgtctggtgggggccactcaggagagttgggttttcagggcagagatgggcttgattccacctggtggggtgggtggaccctggagactctcaggtgatgggccagcctgccccaaggctctttactgatgtcagaatcattgtttgcacctgctgggtatggcctttggggcggccggcccgggagggtcttagtctaattaggtgtgtccagcttcttggccacctttccctggggaccctaacaggcccagagcagagccccttacctcccaggtcagactacctgctcaggccctcccctcccatgcaggccgatgacaactgcagccctctctgcactccctagtccagacctggggaccactgtgggttcctgtgggtctcccggctcccttcctgcccccaatgccacccttgcagtggccatttaaaaatgcatagcaggtgacccactgcgtccctttgcgttcagcccctcctctggctttcagttacaccaagctaaaatttcaggttcccagctgcagctctctgggtcccccggtgccccagtggggctccccgcatctgaatgtgtggtccctgggggtgggcacttgggggcatcctggtcactgctggccctagcattggaccctaggagacctgactggaactggctccctccccatcagctcccagctgtcactctctcccacccccgggcagctgttttgcccaagaccactgctacctgtttacccaccctggtccctcccagacaagcaaggcctctgatttctttgaagcatttacttagctcaagtctgaagctgtagatactggaagacaatgcaccttggagggtgggcaggacacagttgattgtctctacagagctgtgacgggggcactgagccccgcgggtgtctgtggagggggctccggtccaggtactgcactggacactgctcatccctgggtgtcaggcaggtggctgcaccctaggccaggcgcagaggcctggcaggcaggcttggcatggttggccggggcgggacgtacactgggtcgccgctagctgcaccttcgcacagatgcctccgagcagcgggtgggcgtgggccgcacagcgcggcagggccttggctaccacacgcggcatcgctccttggggtgcatgggggtgccccgggcacagtggaacgtgtctgcgaaggcggccaggttctgcagcgaccccagtaccctgtgggtgggtgggtgtgacagcaggagcattgccatcttggacaaacatggccattttaagttctccgtgattaaaaaccagcccaaaacatcagcctaatggctcatgtcagtatgagcagaaacatttcaaccatgagataaacccccatctgaccagaaacatgccaatcctgagaataacctcccctccagccagagatattccaactctgcaataaaactctccttcacacagaaacattcgcagcctgcggtaggctcccccttcctaaacccttaaatgcccttagtctgtaagagaatgtccctgaccgaaatcggccagaagcccctctcaggtttattcccaaaataaacctgtctctgttgagcc

SEQ ID NO: 132503 - DNA, 1096 bp, Homo sapiens
  Payload ID: 5882
  Gene Symbol: FAM213B
  Gene Name: family with sequence similarity 213, member B
  Uniprot ID: Q8TBF2
  ENST ID: ENST00000537325
  CDS Start-End: 1-576
atgagccgggagcggggatccaggagcgaggagccgggagcggggaacagggagtcggggagccgggaaccagggctggcagcggccgccatgagcacggtggaccttgctcgcgtgggcgcgtgcatcctgaagcatgcggtgaccggggaggccgtggagctgcggagcctgtggcgggagcacgcgtgcgtggtggccgggctgcggcgcttcgggtgcgtggtgtgccgctggatcgcccaggacctcagcagccttgctgggctcctggaccaacacggcgtgcgcctggtgggcgtagggcccgaggccctgggtctgcaggagttcctggacggcgactacttcgcgggagagctctacctggatgagagcaagcagctttacaaggagctaggcttcaagcggtacaacagcctgagcatcctcccagcagctctggggaagcccgtgcgtgatgtggctgccaagtccccaggcgactacgtccccaaggagcacatcctgcaggtcctgggcatctctgcggaggtctgtgccagcgacccgcctcagtgtgacagagaggtgtgagggaggcgaaggccctggcctccgaggatctgggtggcgtctgctgccctaggtgtgctggaagtccacttggaagaactgttccggaggcgctgggtcgggatgccgaacctctcctgatccgccggcagcaacgagccattaaaactgcagttcctgaccacgcactgcttcgcaggctccgagccctgcatcctccacagcccccgccttgctcactgttgggccctcagggcgggcagggtggctgtgagtcccaggtgtcatcttcctgctctgcgactttctctggagaccttgggcctttggcctgtggggcactggggatggtaacctcactgccccgtcactcccttcaaaggcgacagacccaagcccacgtcaggagaggagcgtggggtcagctccagcagggtcggggtcagtgcctgtgtctggtgggggccactcaggagagttgggttttcagggcagagatgggcttgattccacctggtggggtgggtggaccctggagact

SEQ ID NO: 132504 - DNA, 589 bp, Homo sapiens
  Payload ID: 5882
  Gene Symbol: FAM213B
  Gene Name: family with sequence similarity 213, member B
  ENST ID: ENST00000465233
  CDS Start-End: 1-589
gagcggggaacagggagtcggggagccgggaaccagggctggcagcggccgccatgagcacggtggaccttgctcgcgtgggcgcgtgcatcctgaagcatgcggtgaccggggaggccgtggagctgcggagcctgtggcgggagcacgcgtgcgtggtggccgggctgcggcgcttcgggtgcgtggtgtgccgctggatcgcccaggacctcagcagccttgctgggctcctggaccaacacggcgtgcgcctggtgggcgtagggcccgaggccctgggtctgcaggagttcctggacggcgactacttcgcgggagagctctacctggatgagagcaagcagctttacaaggagctaggcttcaagcggtacaacagcctgagcatcctcccagcagctctggggaagcccgtgcgtgatgtggctgccaaggctgtacccactcctgacaggccaaggctgttggcatccaggggaacttgtctggggacctgctgcagagcggagggctgctggtggtcagcaaaggtggtgataaagtgctcctgcatttcgtccagaagtccccaggcgactacgtcccc

SEQ ID NO: 132505 - DNA, 464 bp, Homo sapiens
  Payload ID: 5882
  Gene Symbol: FAM213B
  Gene Name: family with sequence similarity 213, member B
  ENST ID: ENST00000498083
  CDS Start-End: 1-464
gcggccgccatgagcacggtggaccttgctcgcgtgggcgcgtgcatcctgaagcatgcggtgaccggggaggccgtggagctgcggagcctgtggcgggagcacgcgtgcgtggtggccgggctgcggcgcttcgggtgcgtggtgtgccgctggatcgcccaggacctcagcagccttgctgggctcctggaccaacacggcgtgcgcctggtgggcgtagggcccgaggccctgggtctgcaggagttcctggacggcgactacttcgcgggagagctctacctggatgagagcaagcagctttacaaggagctaggcttcaagcggtacaacagcctgagcatcctcccagcagctctggggaagcccgtgcgtgatgtggctgccaaggtggtgataaagtgctcctgcatttcgtccagaagtccccaggcgactacgtccccaaggagcacatcctg

SEQ ID NO: 132506 - DNA, 2827 bp, Homo sapiens; identical to SEQ ID NO: 132502
  Payload ID: 5882
  Gene Symbol: FAM213B
  Gene Name: family with sequence similarity 213, member B
  ENST ID: ENST00000616280
  CDS Start-End: 47-787

SEQ ID NO: 132507 - DNA, 2665 bp, Homo sapiens; identical to SEQ ID NO: 132499
  Payload ID: 5882
  Gene Symbol: FAM213B
  Gene Name: family with sequence similarity 213, member B
  ENST ID: ENST00000617400
  CDS Start-End: 47-625

SEQ ID NO: 132508 - DNA, 2689 bp, Homo sapiens; identical to SEQ ID NO: 132500
  Payload ID: 5882
  Gene Symbol: FAM213B
  Gene Name: family with sequence similarity 213, member B
  ENST ID: ENST00000628389
  CDS Start-End: 1-640

SEQ ID NO: 132509 - DNA, 2765 bp, Homo sapiens; identical to SEQ ID NO: 132498
  Payload ID: 5882
  Gene Symbol: FAM213B
  Gene Name: family with sequence similarity 213, member B
  ENST ID: ENST00000626354
  CDS Start-End: 17-712

SEQ ID NO: 132510 - DNA, 2749 bp, Homo sapiens; identical to SEQ ID NO: 132501
  Payload ID: 5882
  Gene Symbol: FAM213B
  Gene Name: family with sequence similarity 213, member B
  Uniprot ID: Q8TBF2
  ENST ID: ENST00000629512
  CDS Start-End: 22-708

SEQ ID NO: 132511 - DNA, 589 bp, Homo sapiens; identical to SEQ ID NO: 132504
  Payload ID: 5882
  Gene Symbol: FAM213B
  Gene Name: family with sequence similarity 213, member B
  ENST ID: ENST00000630935
  CDS Start-End: 1-589

SEQ ID NO: 132512 - DNA, 1096 bp, Homo sapiens; identical to SEQ ID NO: 132503
  Payload ID: 5882
  Gene Symbol: FAM213B
  Gene Name: family with sequence similarity 213, member B
  Uniprot ID: Q8TBF2
  ENST ID: ENST00000627654
  CDS Start-End: 1-576

SEQ ID NO: 132513 - DNA, 464 bp, Homo sapiens; identical to SEQ ID NO: 132505
  Payload ID: 5882
  Gene Symbol: FAM213B
  Gene Name: family with sequence similarity 213, member B
  ENST ID: ENST00000630439
  CDS Start-End: 1-464

SEQ ID NO: 132514 - DNA, 4217 bp, Homo sapiens
  Payload ID: 5883
  Gene Symbol: FAM214A
  Gene Name: family with sequence similarity 214, member A
  Uniprot ID: Q32MH5
  ENST ID: ENST00000261844
  CDS Start-End: 154-3384
taaacttggccgcggttgccgcaggaaggctagccagagggtaattacacagcattttgaaagcgaagcagaagccgtagaatcagcggcgagcctgttgaaagaacccacaggtgcatttcacagcactctgggcgaaaattggatgtgaaaatgaagccagaccgagatactctggatgaatattttgaatatgatgcagaggagttcttggtctctttggccttgctgataacagaaggacgaacacctgaatgttctgtaaaaggtcgaacagaaagctttcattgccctccagcacagtcttgttacccagtaactaccaaacatgaatgtagtgacaagctggcccagtgccgccaagccagacgaactaggtctgaggtcacattgttgtggaagaataaccttccaatcatggtggaaatgatgctactaccagactgctgctacagcgatgatgggcccaccacagagggaattgatctaaatgatcctgcgattaagcaagatgcattattattagaaagatggatcttggagccagttcctcgacagaatggtgaccgatttattgaagagaagacgcttctgttggctgtccgctcatttgtgtttttttctcagttaagtgcatggctgagtgtttctcatggtgctattccacgaaatattctctacagaatcagtgctgctgatgtagacctacagtggaatttttcacagactccaattgagcatgtgtttcctgttcccaatgtttctcacaatgttgccttgaaagtcagtgttcagtccttgcccagacaatctaattatccagttttgacgtgcagtattcacactaatattggcctttatgagaaaagaattcaacaacataaacttaaaactcatcagcaccataacccaaatgaagcagaacaatgtggtacaaacagttcacagcgtctgtgtagcaaacaaacttggaccatggcacctgaaagtgtgttacatgcaaaaagtggcccaagtccagaatatactgcagctgtcaaaaatatcaaactatatccaggcactggcagtaaatctgaccatgggacatctcaagccaatattctaggctttagtggtataggtgatataaaatcacaagaaacatcagtgagaactttaaaatcattttcaatggttgattccagtatctctaaccgccagagtttctggcagtcagctggtgagactaaccctttaataggctctttaattcaggagcggcaagaaatcattgcaagaattgcccaacatttgattcattgtgatccaagcacttcacatgtttctggacgtccatttaatactcaagagtctagttcactccattcaaaacttttccgggtttcacaagaaaatgagaacgtgggaaaaggtaaagaagctttctccatgacttttggtagtccagagtttagttccccagaagacaccaatgaggggaaaattcgactaaaaccagaaactcctcgaagtgaaacttgtatttctaatgacttttattctcatatgcctgttggagagactaatcctttgataggctctttactccaggagcggcaagatgttattgcaaggattgctcaacacttggagcacattgatccaacagcatcacatatcccccggcagtcattcaacatgcatgactccagttcggttgcatctaaagtgtttaggagttcatatgaagacaaaaatttgttgaagaaaaataaggatgagtcctcagtttccatttctcacacaaaatgttccttgttaggagacatcagtgatgggaaaaacttagtacctaataaatgttttacttcttttaaaaataatagtaaagaaaagtgttctttgaaacatcaaacaagaaatcagtgtcagaacaatcctagtgaaatcatccaaagtacgtatcaggagacacagaacaaaagttctagtttatcaacttcctcaattttgtctcagcacaaagaaaataacttagatttgacaagcagattcaaggagcaagaaatgagcaatggaattgataaacagtattcaaattgcaccactattgacaaacagatttgtacaaataagtataaggaaaaaataataaatgagaactataatccaaaattctttggcaatcttcagtctgatgattccaaaaaaaatgactcaaaaataaaagttactgtgttggaaatgtctgaatatttgaacaaatatgaaagcatgtcctcaaataaagactcaaaaaggcctaagacatgtgagcaaaatactcaacttaatagcatagagaattatctcaataaagataatgaaggtttcaaatgtaaaaagtcagaccaattaaaaaatgaacaagataagcaagaagatccaactaatgaaaaatcccaaaactattctcagagaagaagtataaaagactgtttgtctacatgtgagcaaccaaaaaatacagaggtattgaggactacactgaaacattcaaatgtgtggcgaaaacataattttcattccttggatggaacttcaaccagagcctttcatcctcaaactggattgcctcttctttcaagccctgttcctcaaagaaaaacacaatcaggttgctttgatctggattcttcattactacatctgaaaagcttctcatctagaagtcctcgaccatgtttaaacattgaagatgatccagatattcatgaaaaaccatttttgagttctagtgctccacctataacaagtcttagtctcctaggaaattttgaggaatctgtcttgaactatcgtttcgatcctctcggcattgttgatggttttactgccgaggtaggggcaagtggtgctttctgccccacacatttgactcttccagttgaagtgtcattctacagtgtttcagatgacaatgctccctctccttatatgggtgtgattactttagagtcccttggtaaaaggggttatcgagtacctccttcaggaacaatacaagtgaccttatttaatcctaataagactgtggtgaagatgtttgttgtgatatatgatttacgagatatgccagccaatcatcagacattcctacgacaaagaactttttctgtacctgttaaacaagaagtgaagagaagtgttaataaagagaacatccgacacacagaagaacggttattacgctacctcatacatctgaggttccagagttctaaatctggaaagatctacctccatagagacgtacggctcctgttctctagaaagtcaatggaggttgatagcggtgctgcatatgaactcaaatcttacactgaatcaccaacaaaccctcagttttcaccaagatgttgataaggagtgatgatttaaagtatttactcagtacccaagtttgcaagtaaaaattagcatagaatggagtgtaccaaattaacaatcaggagagtggattctctcctgttatcctggaccagtttttatgaaaggattcctgaaatgaaatccatatattccatgtagactggaaaaactcatgtcctaatcctttttgtactgttgaaaccacttcattggacatgttgcaatagcaaaacccccagttagattagtgtttacacattttctcagttatttaatatttaatgttttccttaatactcaagtgatgtttgtctctagtgttctaatgtagcacaaatcctatgtaaaatcatactatgtatttttgacattaatgttgaaatcaaatatatgcacaagtctttaattttgtgtaatgtgttaagtgctgttcatttaagttattgaaaatgagaataaaatgttgagcttctttaaaagtaacacactatgcaagcatgtgtactttttatatctctcatgtttagtttttataacaccatatccaggttgctatctcacatagtagtcctttaacatattgtattagcagtgcaatgtggactaagctgcttcactttccctttgcaagttcagatcatcatgcccattcatagccaggattccttatccccaaaacagttctatttttccttaatcactactatagagtctttacattaaattactgtcgtatgctagataattttctcaaattgttaaaagaatatgtactttggaaacaaattagtatttatattgtaaatatattcaaaaaaaactaa

SEQ ID NO: 132515 - DNA, 3048 bp, Homo sapiens
  Payload ID: 5883
  Gene Symbol: FAM214A
  Gene Name: family with sequence similarity 214, member A
  ENST ID: ENST00000399202
  CDS Start-End: 234-3048
caggctgtaaacacctcccccggagccggccgcggaggactggttgggagttgcattttgaaagcgaagcagaagccgtagaatcagcggcgagcctgttgaaagaacccacaggtgcatttcacagcactctgggcgaaaattggatgtgaaaatgaagccagaccgagtgccgccaagccagacgaactaggtctgaggtcacattgttgtggaagaataaccttccaatcatggtggaaatgatgctactaccagactgctgctacagcgatgatgggcccaccacagagggaattgatctaaatgatcctgcgattaagcaagatgcattattattagaaagatggatcttggagccagttcctcgacagaatggtgaccgatttattgaagagaagacgcttctgttggctgtccgctcatttgtgtttttttctcagttaagtgcatggctgagtgtttctcatggtgctattccacgaaatattctctacagaatcagtgctgctgatgtagacctacagtggaatttttcacagactccaattgagcatgtgtttcctgttcccaatgtttctcacaatgttgccttgaaagtcagtgttcagtccttgcccagacaatctaattatccagttttgacgtgcagtattcacactaatattggcctttatgagaaaagaattcaacaacataaacttaaaactcatcagcaccataacccaaatgaagcagaacaatgtggtacaaacagttcacagcgtctgtgtagcaaacaaacttggaccatggcacctgaaagtgtgttacatgcaaaaagtggcccaagtccagaatatactgcagctgtcaaaaatatcaaactatatccaggcactggcagtaaatctgaccatgggacatctcaagccaatattctaggctttagtggtataggtgatataaaatcacaagaaacatcagtgagaactttaaaatcattttcaatggttgattccagtatctctaaccgccagagtttctggcagtcagctggtgagactaaccctttaataggctctttaattcaggagcggcaagaaatcattgcaagaattgcccaacatttgattcattgtgatccaagcacttcacatgtttctggacgtccatttaatactcaagagtctagttcactccattcaaaacttttccgggtttcacaagaaaatgagaacgtgggaaaaggtaaagaagctttctccatgacttttggtagtccagagtttagttccccagaagacaccaatgaggggaaaattcgactaaaaccagaaactcctcgaagtgaaacttgtatttctaatgacttttattctcatatgcctgttggagagactaatcctttgataggctctttactccaggagcggcaagatgttattgcaaggattgctcaacacttggagcacattgatccaacagcatcacatatcccccggcagtcattcaacatgcatgactccagttcggttgcatctaaagtgtttaggagttcatatgaagacaaaaatttgttgaagaaaaataaggatgagtcctcagtttccatttctcacacaaaatgttccttgttaggagacatcagtgatgggaaaaacttagtacctaataaatgttttacttcttttaaaaataatagtaaagaaaagtgttctttgaaacatcaaacaagaaatcagtgtcagaacaatcctagtgaaatcatccaaagtacgtatcaggagacacagaacaaaagttctagtttatcaacttcctcaattttgtctcagcacaaagaaaataacttagatttgacaagcagattcaaggagcaagaaatgagcaatggaattgataaacagtattcaaattgcaccactattgacaaacagatttgtacaaataagtataaggaaaaaataataaatgagaactataatccaaaattctttggcaatcttcagtctgatgattccaaaaaaaatgactcaaaaataaaagttactgtgttggaaatgtctgaatatttgaacaaatatgaaagcatgtcctcaaataaagactcaaaaaggcctaagacatgtgagcaaaatactcaacttaatagcatagagaattatctcaataaagataatgaaggtttcaaatgtaaaaagtcagaccaattaaaaaatgaacaagataagcaagaagatccaactaatgaaaaatcccaaaactattctcagagaagaagtataaaagactgtttgtctacatgtgagcaaccaaaaaatacagaggtattgaggactacactgaaacattcaaatgtgtggcgaaaacataattttcattccttggatggaacttcaaccagagcctttcatcctcaaactggattgcctcttctttcaagccctgttcctcaaagaaaaacacaatcaggttgctttgatctggattcttcattactacatctgaaaagcttctcatctagaagtcctcgaccatgtttaaacattgaagatgatccagatattcatgaaaaaccatttttgagttctagtgctccacctataacaagtcttagtctcctaggaaattttgaggaatctgtcttgaactatcgtttcgatcctctcggcattgttgatggttttactgccgaggtaggggcaagtggtgctttctgccccacacatttgactcttccagttgaagtgtcattctacagtgtttcagatgacaatgctccctctccttatatgggtgtgattactttagagtcccttggtaaaaggggttatcgagtacctccttcaggaacaatacaagtgaccttatttaatcctaataagactgtggtgaagatgtttgttgtgatatatgatttacgagatatgccagccaatcatcagacattcctacgacaaagaactttttctgtacctgttaaacaagaagtgaagagaagtgttaataaagagaacatccgacacacagaagaacggttattacgctacctcatacatctgaggt

SEQ ID NO: 132516 - DNA, 3697 bp, Homo sapiens
  Payload ID: 5883
  Gene Symbol: FAM214A
  Gene Name: family with sequence similarity 214, member A
  Uniprot ID: Q32MH5
  ENST ID: ENST00000546305
  CDS Start-End: 145-3396
gaaaaaccttacacggagggaagcgggatcagcacccaacgctgaacatttgttttaaccgctgcagacatctggatccctcagttactgatagtatagctattgatagccagaaggcaacttcctttatacaaggattccagtatggttttcagtggaaacaaagggcttcacagagaagatactctggatgaatattttgaatatgatgcagaggagttcttggtctctttggccttgctgataacagaaggacgaacacctgaatgttctgtaaaaggtcgaacagaaagctttcattgccctccagcacagtcttgttacccagtaactaccaaacatgaatgtagtgacaagctggcccagtgccgccaagccagacgaactaggtctgaggtcacattgttgtggaagaataaccttccaatcatggtggaaatgatgctactaccagactgctgctacagcgatgatgggcccaccacagagggaattgatctaaatgatcctgcgattaagcaagatgcattattattagaaagatggatcttggagccagttcctcgacagaatggtgaccgatttattgaagagaagacgcttctgttggctgtccgctcatttgtgtttttttctcagttaagtgcatggctgagtgtttctcatggtgctattccacgaaatattctctacagaatcagtgctgctgatgtagacctacagtggaatttttcacagactccaattgagcatgtgtttcctgttcccaatgtttctcacaatgttgccttgaaagtcagtgttcagtccttgcccagacaatctaattatccagttttgacgtgcagtattcacactaatattggcctttatgagaaaagaattcaacaacataaacttaaaactcatcagcaccataacccaaatgaagcagaacaatgtggtacaaacagttcacagcgtctgtgtagcaaacaaacttggaccatggcacctgaaagtgtgttacatgcaaaaagtggcccaagtccagaatatactgcagctgtcaaaaatatcaaactatatccaggcactggcagtaaatctgaccatgggacatctcaagccaatattctaggctttagtggtataggtgatataaaatcacaagaaacatcagtgagaactttaaaatcattttcaatggttgattccagtatctctaaccgccagagtttctggcagtcagctggtgagactaaccctttaataggctctttaattcaggagcggcaagaaatcattgcaagaattgcccaacatttgattcattgtgatccaagcacttcacatgtttctggacgtccatttaatactcaagagtctagttcactccattcaaaacttttccgggtttcacaagaaaatgagaacgtgggaaaaggtaaagaagctttctccatgacttttggtagtccagagtttagttccccagaagacaccaatgaggggaaaattcgactaaaaccagaaactcctcgaagtgaaacttgtatttctaatgacttttattctcatatgcctgttggagagactaatcctttgataggctctttactccaggagcggcaagatgttattgcaaggattgctcaacacttggagcacattgatccaacagcatcacatatcccccggcagtcattcaacatgcatgactccagttcggttgcatctaaagtgtttaggagttcatatgaagacaaaaatttgttgaagaaaaataaggatgagtcctcagtttccatttctcacacaaaatgttccttgttaggagacatcagtgatgggaaaaacttagtacctaataaatgttttacttcttttaaaaataatagtaaagaaaagtgttctttgaaacatcaaacaagaaatcagtgtcagaacaatcctagtgaaatcatccaaagtacgtatcaggagacacagaacaaaagttctagtttatcaacttcctcaattttgtctcagcacaaagaaaataacttagatttgacaagcagattcaaggagcaagaaatgagcaatggaattgataaacagtattcaaattgcaccactattgacaaacagatttgtacaaataagtataaggaaaaaataataaatgagaactataatccaaaattctttggcaatcttcagtctgatgattccaaaaaaaatgactcaaaaataaaagttactgtgttggaaatgtctgaatatttgaacaaatatgaaagcatgtcctcaaataaagactcaaaaaggcctaagacatgtgagcaaaatactcaacttaatagcatagagaattatctcaataaagataatgaaggtttcaaatgtaaaaagtcagaccaattaaaaaatgaacaagataagcaagaagatccaactaatgaaaaatcccaaaactattctcagagaagaagtataaaagactgtttgtctacatgtgagcaaccaaaaaatacagaggtattgaggactacactgaaacattcaaatgtgtggcgaaaacataattttcattccttggatggaacttcaaccagagcctttcatcctcaaactggattgcctcttctttcaagccctgttcctcaaagaaaaacacaatcaggttgctttgatctggattcttcattactacatctgaaaagcttctcatctagaagtcctcgaccatgtttaaacattgaagatgatccagatattcatgaaaaaccatttttgagttctagtgctccacctataacaagtcttagtctcctaggaaattttgaggaatctgtcttgaactatcgtttcgatcctctcggcattgttgatggttttactgccgaggtaggggcaagtggtgctttctgccccacacatttgactcttccagttgaagtgtcattctacagtgtttcagatgacaatgctccctctccttatatgggtgtgattactttagagtcccttggtaaaaggggttatcgagtacctccttcaggaacaatacaagtgaccttatttaatcctaataagactgtggtgaagatgtttgttgtgatatatgatttacgagatatgccagccaatcatcagacattcctacgacaaagaactttttctgtacctgttaaacaagaagtgaagagaagtgttaataaagagaacatccgacacacagaagaacggttattacgctacctcatacatctgaggttccagagttctaaatctggaaagatctacctccatagagacgtacggctcctgttctctagaaagtcaatggaggttgatagcggtgctgcatatgaactcaaatcttacactgaatcaccaacaaaccctcagttttcaccaagatgttgataaggagtgatgatttaaagtatttactcagtacccaagtttgcaagtaaaaattagcatagaatggagtgtaccaaattaacaatcaggagagtggattctctcctgttatcctggaccagtttttatgaaaggattcctgaaatgaaatccatatattccatgtagactggaaaaactcatgtcctaatcctttttgtactgttgaaaccacttcattggacatgttgcaatagcaaaacccccagttagattagtgtttacacattttctcagttatttaatatttaatgttttcctt

SEQ ID NO: 132517 - DNA, 4590 bp, Homo sapiens
  Payload ID: 5883
  Gene Symbol: FAM214A
  Gene Name: family with sequence similarity 214, member A
  Uniprot ID: Q32MH5
  ENST ID: ENST00000534964
  CDS Start-End: 432-3323
gcacaggctgtaaacacctcccccggagccggccgcggaggactggttgggagttggtagggtcgccccgggacagcccggaagagttcgtttggggctgggggctgggcgggaggaggtgactcgggtttctgtgtaaacttggccgcggttgccgcaggaaggctagccagagggtaattacacaggtgaggcccggcggggcgggcggagggctcgggaggcgcaggggactggaagagttggctgcgcccaggcaccaggtggaagaatttccataccagccctgcggaggtgcctctgtttccagaggcgtttttgtacgaagggcattttgaaagcgaagcagaagccgtagaatcagcggcgagcctgttgaaagaacccacaggtgcatttcacagcactctgggcgaaaattggatgtgaaaatgaagccagaccgagatactctggatgaatattttgaatatgatgcagaggagttcttggtctctttggccttgctgataacagaaggacgaacacctgaatgttctgtaaaaggtcgaacagaaagctttcattgccctccagcacagtcttgttacccagtaactaccaaacatgaatgtagtgacaagctggcccagtgccgccaagccagacgaactaggtctgaggtcacattgttgtggaagaataaccttccaatcatggtggaaatgatgctactaccagactgctgctacagcgatgatgggcccaccacagagggaattgatctaaatgatcctgcgattaagcaagatgcattattattagaaagatggatcttggagccagttcctcgacagaatggtgaccgatttattgaagagaagacgcttctgttggctgtccgctcatttgtgtttttttctcagttaagtgcatggctgagtgtttctcatggtgctattccacgaaatattctctacagaatcagtgctgctgatgtagacctacagtggaatttttcacagactccaattgagcatgtgtttcctgttcccaatgtttctcacaatgttgccttgaaagtcagtgttcagtccttgcccagacaatctaattatccagttttgacgtgcagtattcacactaatattggcctttatgagaaaagaattcaacaacataaacttaaaactcatcagcaccataacccaaatgaagcagaacaatgtggtacaaacagttcacagcgtctgtgtagcaaacaaacttggaccatggcacctgaaagtgtgttacatgcaaaaagtggcccaagtccagaatatactgcagctgtcaaaaatatcaaactatatccaggcactggcagtaaatctgaccatgggacatctcaagccaatattctaggctttagtggtataggtgatataaaatcacaagaaacatcagtgagaactttaaaatcattttcaatggttgattccagtatctctaaccgccagagtttctggcagtcagctggtgagactaaccctttaataggctctttaattcaggagcggcaagaaatcattgcaagaattgcccaacatttgattcattgtgatccaagcacttcacatgtttctggacgtccatttaatactcaagagtctagttcactccattcaaaacttttccgggtttcacaagaaaatgagaacgtgggaaaaggtaaagaagctttctccatgacttttggtagtccagagtttagttccccagaagacaccaatgaggggaaaattcgactaaaaccagaaactcctcgaagtgaaacttgtatttctaatgacttttattctcatatgcctgttggagagactaatcctttgataggctctttactccaggagcggcaagatgttattgcaaggattgctcaacacttggagcacattgatccaacagcatcacatatcccccggcagtcattcaacatgcatgactccagttcggttgcatctaaagtgtttaggagttcatatgaagacaaaaatttgttgaagaaaaataaggatgagtcctcagtttccatttctcacacaaaatgttccttgttaggagacatcagtgatgggaaaaacttagtacctaataaatgttttacttcttttaaaaataatagtaaagaaaagtgttctttgaaacatcaaacaagaaatcagtgtcagaacaatcctagtgaaatcatccaaagtacgtatcaggagacacagaacaaaagttctagtttatcaacttcctcaattttgtctcagcacaaagaaaataacttagatttgacaagcagattcaaggagcaagaaatgagcaatggaattgataaacagtattcaaattgcaccactattgacaaacagatttgtacaaataagtataaggaaaaaataataaatgagaactataatccaaaattctttggcaatcttcagtctgatgattccaaaaaaaatgactcaaaaataaaagttactgtgttggaaatgtctgaatatttgaacaaatatgaaagcatgtcctcaaataaagactcaaaaaggcctaagacatgtgagcaaaatactcaacttaatagcatagagaattatctcaataaagataatgaaggtttcaaatgtaaaaagtcagaccaattaaaaaatgaacaagataagcaagaagatccaactaatgaaaaatcccaaaactattctcagagaagaagtataaaagactgtttgtctacatgtgagcaaccaaaaaatacagaggtattgaggactacactgaaacattcaaatgtgtggcgaaaacataattttcattccttggatggaacttcaaccagagcctttcatcctcaaactggattgcctcttctttcaagccctgttcctcaaagaaaaacacaatcaggttgctttgatctggattcttcattactacatctgaaaagcttctcatctagaagtcctcgaccatgtttaaacattgaagatgatccagatattcatgaaaaaccatttttgagttctagtgctccacctataacaagtcttagtctcctaggaaattttgaggaatctgtcttgaactatcgtttcgatcctctcggcattgttgatggttttactgccgaggtaggggcaagtggtgctttctgccccacacatttgactcttccagttgaagtgtcattctacagtgtttcagatgacaatgctccctctccttatatgggtgtgattactttagagtcccttggtaaaaggggttatcgagtacctccttcaggaacaatacaagtggtatgtgttttatagcctacaattgcaataatcattctctcacatacatatagaacttagccctttctcctgctactgctgctgcaacaactttgaccttatttaatcctaataagactgtggtgaagatgtttgttgtgatatatgatttacgagatatgccagccaatcatcagacattcctacgacaaagaactttttctgtacctgttaaacaagaagtgaagagaagtgttaataaagagaacatccgacacacagaagaacggttattacgctacctcatacatctgaggttccagagttctaaatctggaaagatctacctccatagagacgtacggctcctgttctctagaaagtcaatggaggttgatagcggtgctgcatatgaactcaaatcttacactgaatcaccaacaaaccctcagttttcaccaagatgttgataaggagtgatgatttaaagtatttactcagtacccaagtttgcaagtaaaaattagcatagaatggagtgtaccaaattaacaatcaggagagtggattctctcctgttatcctggaccagtttttatgaaaggattcctgaaatgaaatccatatattccatgtagactggaaaaactcatgtcctaatcctttttgtactgttgaaaccacttcattggacatgttgcaatagcaaaacccccagttagattagtgtttacacattttctcagttatttaatatttaatgttttccttaatactcaagtgatgtttgtctctagtgttctaatgtagcacaaatcctatgtaaaatcatactatgtatttttgacattaatgttgaaatcaaatatatgcacaagtctttaattttgtgtaatgtgttaagtgctgttcatttaagttattgaaaatgagaataaaatgttgagcttctttaaaagtaacacactatgcaagcatgtgtactttttatatctctcatgtttagtttttataacaccatatccaggttgctatctcacatagtagtcctttaacatattgtattagcagtgcaatgtggactaagctgcttcactttccctttgcaagttcagatcatcatgcccattcatagccaggattccttatccccaaaacagttctatttttccttaatcactactatagagtctttacattaaattactgtcgtatgctagataattttctcaaattgttaaaagaatatgtactttggaaacaaattagtatttatattgtaaatatattcaaaaaaaactaa

SEQ ID NO: 132518 - DNA, 393 bp, Homo sapiens
  Payload ID: 5883
  Gene Symbol: FAM214A
  Gene Name: family with sequence similarity 214, member A
  ENST ID: ENST00000570204
  CDS Start-End: 1-138
agagcctttcatcctcaaactggattgcctcttctttcaagccctgttcctcaaagaaaaacacaatcaggttgctttgatctggattcttcattactacatctgaaaagcttctcatctagaaggaatctgtcttgaactatcgtttcgatcctctcggcattgttgatggttttactgccgaggtaggggcaagtggtgctttctgccccacacatttgactcttccagttgaagtgtcattctacagtgtttcagatgacaatgctccctctccttatatgggtgtgattactttagagtcccttggtaaaaggggttatcgagtacctccttcaggaacaatacaagtgaccttatttaatcctaataagactgtggtgaagatgtttg

SEQ ID NO: 132519 - DNA, 576 bp, Homo sapiens
  Payload ID: 5883
  Gene Symbol: FAM214A
  Gene Name: family with sequence similarity 214, member A
  ENST ID: ENST00000566768
  CDS Start-End: 199-576
aaacagcagagaaagaactggccgagcgagggggacggggagccggggcgccagagctagagacagcgggcgggcaaggagctggcagaggcgctggcattttgaaagcgaagcagaagccgtagaatcagcggcgagcctgttgaaagaacccacaggtgcatttcacagcactctgggcgaaaattggatgtgaaaatgaagccagaccgagatactctggatgaatattttgaatatgatgcagaggagttcttggtctctttggccttgctgataacagaaggacgaacacctgaatgttctgtaaaaggtcgaacagaaagctttcattgccctccagcacagtcttgttacccagtaactaccaaacatgaatgtagtgacaagctggcccagtgccgccaagccagacgaactaggtctgaggtcacattgttgtggaagaataaccttccaatcatggtggaaatgatgctactaccagactgctgctacagcgatgatgggcccaccacagagggaattgatctaaatgatcctgcgattaagcaagatgcattattattagaaaga

SEQ ID NO: 132520 - DNA, 468 bp, Homo sapiens
  Payload ID: 5883
  Gene Symbol: FAM214A
  Gene Name: family with sequence similarity 214, member A
  ENST ID: ENST00000568863
  CDS Start-End: 201-468
gcagttggtgccaggaagaggcctaacttaacagtagtttacttgcaaggtccgggtattagaatagggccagattaattttatttttgtctctttcagcattttgaaagcgaagcagaagccgtagaatcagcggcgagcctgttgaaagaacccacaggtgcatttcacagcactctgggcgaaaattggatgtgaaaatgaagccagaccgagatactctggatgaatattttgaatatgatgcagaggagttcttggtctctttggccttgctgataacagaaggacgaacacctgaatgttctgtaaaaggtcgaacagaaagctttcattgccctccagcacagtcttgttacccagtaactaccaaacatgaatgtagtgacaagctggcccagtgccgccaagccagacgaactaggtctgaggtcacattgttgtggaagaataaccttccaatcatgg

SEQ ID NO: 132521 - DNA, 931 bp, Homo sapiens
  Payload ID: 5883
  Gene Symbol: FAM214A
  Gene Name: family with sequence similarity 214, member A
  ENST ID: ENST00000561543
  CDS Start-End: 647-931
aaacagcagagaaagaactggccgagcgagggggacggggagccggggcgccagagctagagacagcgggcgggcaaggagctggcagaggcgctgggcaagagggccggccggggctacgggcgggggaagcccgggggtcgcggggctcgggtgccagtcaggcagggcggaggggctgagcgcagggagcggagcgaggcggtggctgaggcgcgggtggatggccacaggggcgccggggagccgcttcgggctggtcgtctcgggtccccacggtcacctgaggcagccgcgggggccgctgcgctccatactccgctcccgctggccctgcgcctctcggagcctggggtctgaggtgggagtgtgatgtgagctgctgggcgagcggtggagagaagtgccaagaggaggcgggattgggacgggagaggagagcgagttagtcagcagaggtcggccgagggagcggaggagccggccagctcgagagcgccatgaaaacaactctccagcggggagaggggcagacgcggcgctcgcattttgaaagcgaagcagaagccgtagaatcagcggcgagcctgttgaaagaacccacaggtgcatttcacagcactctgggcgaaaattggatgtgaaaatgaagccagaccgagatactctggatgaatattttgaatatgatgcagaggagttcttggtctctttggccttgctgataacagaaggacgaacacctgaatgttctgtaaaaggtcgaacagaaagctttcattgccctccagcacagtcttgttacccagtaactaccaaacatgaatgtagtgacaagctggcccagtgccgccaagccagacgaactaggtctgaggtcacattgttgtggaagaataaccttccaatcatggtggaaatgatgctacta

SEQ ID NO: 132522 - DNA, 547 bp, Homo sapiens
  Payload ID: 5883
  Gene Symbol: FAM214A
  Gene Name: family with sequence similarity 214, member A
  ENST ID: ENST00000561490
  CDS Start-End: 194-547
ctactgctgctgccgctgcctgtagactttcagatcatctccctcttctgtgtcagggaatgctcctggctggtgcggacacaacccaatagcattttgaaagcgaagcagaagccgtagaatcagcggcgagcctgttgaaagaacccacaggtgcatttcacagcactctgggcgaaaattggatgtgaaaatgaagccagaccgagatactctggatgaatattttgaatatgatgcagaggagttcttggtctctttggccttgctgataacagaaggacgaacacctgaatgttctgtaaaaggtcgaacagaaagctttcattgccctccagcacagtcttgttacccagtaactaccaaacatgaatgtagtgacaagctggcccagtgccgccaagccagacgaactaggtctgaggtcacattgttgtggaagaataaccttccaatcatggtggaaatgatgctactaccagactgctgctacagcgatgatgggcccaccacagagggaattgatctaaatgatcctgcgattaag

SEQ ID NO: 132523 - DNA, 581 bp, Homo sapiens
  Payload ID: 5883
  Gene Symbol: FAM214A
  Gene Name: family with sequence similarity 214, member A
  ENST ID: ENST00000562135
  CDS Start-End: 155-581
caggctgtaaacacctcccccggagccggccgcggaggactggttgggagttgcattttgaaagcgaagcagaagccgtagaatcagcggcgagcctgttgaaagaacccacaggtgcatttcacagcactctgggcgaaaattggatgtgaaaatgaagccagaccgagatactctggatgaatattttgaatatgatgcagaggagttcttggtctctttggccttgctgataacagaaggacgaacacctgaatgttctgtaaaaggtcgaacagaaagctttcattgccctccagcacagtcttgttacccagtaactaccaaacatgaatgtagtgacaagctggcccagtgccgccaagccagacgaactaggtctgaggtcacattgttgtggaagaataaccttccaatcatggtggaaatgatgctactaccagactgctgctacagcgatgatgggcccaccacagagggaattgatctaaatgatcctgcgattaagcaagatgcattattattagaaagatggatcttggagccagttcctcgacagaatggtgaccgatttattgaag

SEQ ID NO: 132524 - DNA, 667 bp, Homo sapiens
  Payload ID: 5883
  Gene Symbol: FAM214A
  Gene Name: family with sequence similarity 214, member A
  ENST ID: ENST00000568637
  CDS Start-End: 1-667
ttcctcaaagaaaaacacaatcaggttgctttgatctggattcttcattactacatctgaaaagcttctcatctagaagtcctcgaccatgtttaaacattgaagatgatccagatattcatgaaaaaccatttttgagttctagtgctccacctataacaagtcttagtctcctaggaaattttgaggaatctgtcttgaactatcgtttcgatcctctcggcattgttgatggttttactgccgaggtaggggcaagtggtgctttctgccccacacatttgactcttccagttgaagtgtcattctacagtgtttcagatgacaatgctccctctccttatatgaccttatttaatcctaataagactgtggtgaagatgtttgttgtgatatatgatttacgagatatgccagccaatcatcagacattcctacgacaaagaactttttctgtacctgttaaacaagaagtgaagagaagtgttaataaagagaacatccgacacacagaagaacggttattacgctacctcatacatctgaggttccagagttctaaatctggaaagatctacctccatagagacgtacggctcctgttctctagaaagtcaatggaggttgatagcggtgctgcatatgaactcaaatcttacactgaatc

SEQ ID NO: 132525 - DNA, 2993 bp, Homo sapiens
  Payload ID: 5883
  Gene Symbol: FAM214A
  Gene Name: family with sequence similarity 214, member A
  ENST ID: ENST00000562351
  CDS Start-End: 233-325
cggggcgggcggagggctcgggaggcgcaggggactggaagagttggctgcgcccaggcaccaggtggaagaatttccataccagccctgcggaggtgcctctgtttccagaggcgtttttgtacgaagggcattttgaaagcgaagcagaagccgtagaatcagcggcgagcctgttgaaagaacccacaggtgcatttcacagcactctgggcgaaaattggatgtgaaaatgaagccagaccgagaaacgaggtctcactctgttgctcagcctggtcttaaactcatgtcctcaagcaatcttcctgtatcagcctcctaaagtctggaattacaagcatgagccaccatgcctggcctccactatccctttctgtttgtggtggtctcctatattttgagtttgaatgggaagggagcatgcatgtttgatggtttgttttgtttttgtgaatgaagaatgaaaatttattcccattaagtgcgagcttcaattgaggcactcagtttatgaggtcttactgatgtttcctctcttaggtgctgtagttaaaatcttgctggtctaaaatggtgaaaactattgaggtattcaaatgataagtactttataaactgaaattgcattgaaaacggagagctcttgacagaaaggttgactctagcatttatataaggaaaaagacaactattatctccctctacacagaaagctatattcagtagttataggatttgtacattgtgaatccttagggatctctaaacatctgtgtctttagaagtagtgtcacctctagtaaaagagggccagtagaattgagtggtggcagcctgtgatgtatatgaattttggctgtacgtctctagcgactattttctccaactctatttagtaaaattctacctaatttcagctattgtgcttccaaagtccatgtttgttgaatatgatatggtaaaaaccaatatctatttggagacagtggaggggatggtagtaattgagagacagtgtcagatggagcagtgactttacaatttttttgactgcaatccacaattagacatttcacattgctcccccatgacaacatccctatcgacccctgcccaaaaacaagttatttaccaatcttgctataagcaatgatgactgattttttcttttttctactttatttaaaaagaaaattatagtctcaactctttatattaattttacacacattaattctacagattgttttagcacttagaactaaaagtgttcaagatttgattttgttaccttctctgtgtaagctaaagttgctgacttttctgagtttccattttattgattaaaactgggatagtaatagtattttacaccattttataactttattagaatgacataatctgagtgaagtggttgtgccaggcacttactaaacacacagtcaatgagtatgttctctccgaagtttgttagcttagggaattgggaggatgccactgataataatggtgactcttattcagaggaaaactaattcagttttagacatgctagagtttgaggtagccaaaagagtttagtcatatcacttggaagcaaaccaatgtgaaatagtttcaaataagcaaattttaaaaaatgttaaatgcaaagcaaacagtattaaagctttggggacttaatgattgagtctccttacacctacacaagattggctaaatacacatacaactgtgtcactctaccagatttctgttaacattctccagaatttaaactgcagaatcagtcatttgtatgactgtttgtctctattagcagaggtaatgacatgtatcagtgataggtaattgtggaaaaaaaaacagcacttggaattaaacctagagttggtgattcttacagggtaacccaacggctaccttaatttctatgattcagtttcttcatctacaaaatattatttcacaaagttgcagttgtcaaagggacaagtaaatatgggatccattgtcttcatggaaaaacttttcataaaatgttattttattataataaaaaatgtgtgattggttttcaatttcagattgaatcaaacatagcattctttgtaatagcaggagattaacaacatcccagaatatatctttaaaagaagtatggataaagaaaaacccgtatgcacctctgcacacattttatgtaatagtggtgatactaatttacaaagacaaagtatataggatattaaaagtgaattcttaatacctgatcttgattcttattaaatctgacttatgtgtatacaagatattattagatgaagtgtttgtccagtagcttagcttataaataacccccattctagctcattttaaacaatgtagtatgaatgatgccaaaaacaggctagaacattttcttctttccaagatcttagatttggtaaacaagctactgctcctggaactaatctaggtcatcataacccaaaatcttttgaaatatgagagtcccaattaagtctcttaggtactttttagcattttaattttaagaatgtgtttaactcttaaaacagtatattttggttgctgtttggccatttggtttatttgtaccttgttataatgaatgcaagtcagtgggtaatcattgcagcaaatatgattgctaggaatctcatgtaagtggaagtcaatataatgtatggcttaatttatccctgaactgacctaacatcacattttgttttttaataaaaactggtttaatgatatgataaatttctgtattttccacaactgttaataatgttatattttaactattgcttagtcttcattacaaattattcagctgttaaatgtgttgttcaatgtgacattatttaaaaacttaaaaaaaaatcagcttcacagaaatctttctttgatcaagagttgtctcattcccattgttattaatacagtatacaactaatgta

SEQ ID NO: 132526 - DNA, 3548 bp, Homo sapiens
  Payload ID: 5883
  Gene Symbol: FAM214A
  Gene Name: family with sequence similarity 214, member A
  Uniprot ID: Q32MH5
  ENST ID: ENST00000619572
  CDS Start-End: 96-3326
gaaagcgaagcagaagccgtagaatcagcggcgagcctgttgaaagaacccacaggtgcatttcacagcactctgggcgaaaattggatgtgaaaatgaagccagaccgagatactctggatgaatattttgaatatgatgcagaggagttcttggtctctttggccttgctgataacagaaggacgaacacctgaatgttctgtaaaaggtcgaacagaaagctttcattgccctccagcacagtcttgttacccagtaactaccaaacatgaatgtagtgacaagctggcccagtgccgccaagccagacgaactaggtctgaggtcacattgttgtggaagaataaccttccaatcatggtggaaatgatgctactaccagactgctgctacagcgatgatgggcccaccacagagggaattgatctaaatgatcctgcgattaagcaagatgcattattattagaaagatggatcttggagccagttcctcgacagaatggtgaccgatttattgaagagaagacgcttctgttggctgtccgctcatttgtgtttttttctcagttaagtgcatggctgagtgtttctcatggtgctattccacgaaatattctctacagaatcagtgctgctgatgtagacctacagtggaatttttcacagactccaattgagcatgtgtttcctgttcccaatgtttctcacaatgttgccttgaaagtcagtgttcagtccttgcccagacaatctaattatccagttttgacgtgcagtattcacactaatattggcctttatgagaaaagaattcaacaacataaacttaaaactcatcagcaccataacccaaatgaagcagaacaatgtggtacaaacagttcacagcgtctgtgtagcaaacaaacttggaccatggcacctgaaagtgtgttacatgcaaaaagtggcccaagtccagaatatactgcagctgtcaaaaatatcaaactatatccaggcactggcagtaaatctgaccatgggacatctcaagccaatattctaggctttagtggtataggtgatataaaatcacaagaaacatcagtgagaactttaaaatcattttcaatggttgattccagtatctctaaccgccagagtttctggcagtcagctggtgagactaaccctttaataggctctttaattcaggagcggcaagaaatcattgcaagaattgcccaacatttgattcattgtgatccaagcacttcacatgtttctggacgtccatttaatactcaagagtctagttcactccattcaaaacttttccgggtttcacaagaaaatgagaacgtgggaaaaggtaaagaagctttctccatgacttttggtagtccagagtttagttccccagaagacaccaatgaggggaaaattcgactaaaaccagaaactcctcgaagtgaaacttgtatttctaatgacttttattctcatatgcctgttggagagactaatcctttgataggctctttactccaggagcggcaagatgttattgcaaggattgctcaacacttggagcacattgatccaacagcatcacatatcccccggcagtcattcaacatgcatgactccagttcggttgcatctaaagtgtttaggagttcatatgaagacaaaaatttgttgaagaaaaataaggatgagtcctcagtttccatttctcacacaaaatgttccttgttaggagacatcagtgatgggaaaaacttagtacctaataaatgttttacttcttttaaaaataatagtaaagaaaagtgttctttgaaacatcaaacaagaaatcagtgtcagaacaatcctagtgaaatcatccaaagtacgtatcaggagacacagaacaaaagttctagtttatcaacttcctcaattttgtctcagcacaaagaaaataacttagatttgacaagcagattcaaggagcaagaaatgagcaatggaattgataaacagtattcaaattgcaccactattgacaaacagatttgtacaaataagtataaggaaaaaataataaatgagaactataatccaaaattctttggcaatcttcagtctgatgattccaaaaaaaatgactcaaaaataaaagttactgtgttggaaatgtctgaatatttgaacaaatatgaaagcatgtcctcaaataaagactcaaaaaggcctaagacatgtgagcaaaatactcaacttaatagcatagagaattatctcaataaagataatgaaggtttcaaatgtaaaaagtcagaccaattaaaaaatgaacaagataagcaagaagatccaactaatgaaaaatcccaaaactattctcagagaagaagtataaaagactgtttgtctacatgtgagcaaccaaaaaatacagaggtattgaggactacactgaaacattcaaatgtgtggcgaaaacataattttcattccttggatggaacttcaaccagagcctttcatcctcaaactggattgcctcttctttcaagccctgttcctcaaagaaaaacacaatcaggttgctttgatctggattcttcattactacatctgaaaagcttctcatctagaagtcctcgaccatgtttaaacattgaagatgatccagatattcatgaaaaaccatttttgagttctagtgctccacctataacaagtcttagtctcctaggaaattttgaggaatctgtcttgaactatcgtttcgatcctctcggcattgttgatggttttactgccgaggtaggggcaagtggtgctttctgccccacacatttgactcttccagttgaagtgtcattctacagtgtttcagatgacaatgctccctctccttatatgggtgtgattactttagagtcccttggtaaaaggggttatcgagtacctccttcaggaacaatacaagtgaccttatttaatcctaataagactgtggtgaagatgtttgttgtgatatatgatttacgagatatgccagccaatcatcagacattcctacgacaaagaactttttctgtacctgttaaacaagaagtgaagagaagtgttaataaagagaacatccgacacacagaagaacggttattacgctacctcatacatctgaggttccagagttctaaatctggaaagatctacctccatagagacgtacggctcctgttctctagaaagtcaatggaggttgatagcggtgctgcatatgaactcaaatcttacactgaatcaccaacaaaccctcagttttcaccaagatgttgataaggagtgatgatttaaagtatttactcagtacccaagtttgcaagtaaaaattagcatagaatggagtgtaccaaattaacaatcaggagagtggattctctcctgttatcctggaccagtttttatgaaaggattcctgaaatgaaatccatatattccatgtagactggaaaaactcatgtcctaatcctttttgtactgttgaaaccacttcattgg

SEQ ID NO: 132527 - DNA, 3028 bp, Homo sapiens
  Payload ID: 5884
  Gene Symbol: FAM214B
  Gene Name: family with sequence similarity 214, member B
  Uniprot ID: Q7L5A3
  ENST ID: ENST00000322813
  CDS Start-End: 312-1928
ggtttgcaggcggaggctacagctagggctgctcagtaactgccccaaccactaccacgtccccaagtgcaacgggacccacggaactacagggtcctgctgagctcaggagctgcacggaatggtggcagtcaccttgccagtgcagcaggcatggatcagactgcaagctaggggcacgaggcatcagttgggaagaggggacgcacagctaggcttgaggcctcttcatcgggatgtccccaggccccccagcccaggcccagcataaaggccgtgttggggggcccccctgacccaaggggggcttcatgcgccacgtgcaggcggagccgtctccatcctcagagccggaggctggcccttcacagcctccagtcaggcagggggccctccagggtggcctgctcatgggctacagcccagcagggggggcgacatcccccggggtctaccaggtatccatcttttcccctccggctggtacctctgagcctcatagggccctgaaacgacaagccccatccactgagggtccccgggagctgaagagaggccctgggctgggggccagagagggactaccccctgaagaaccatctactgtggggctcttaggcccagagggaccggggctgggactaggtgtggccagccagcatttctcccaccgtggcctctgtgttgtggaacagagaagtagtgtcacctcatcttggacttcgggggcctggagtcccccctgccccccatcaaatgcttcctgcaatactttgcacaccagagactgggcctccccagatccagggggacaggggtccctgggggagtccccagggccagcccctccaggccagctgcacacacttgacactgatttgcacagtcttgcacaaatagggggtaagagcccagtggctggggtgggcaatgggggtagcctctggcctagggagtcccctggcactgccaatgggcacagtcccgagcacacaccccctggccctggacccccaggcccctgccccaccaagcgaaggctgcttcctgctggagaagccccagatgtcagctctgaggaagaggggccagcccctcggaggcgccggggatccctgggccaccctactgctgccaacagttctgatgccaaagccacacccttctggagccacctgctgcctgggcccaaagagcctgttttggacccaacagactgcggtcccatggggcggaggctgaaaggagcccgtcgcctgaagctgagcccccttcgaagcctccggaaggggccaggcctgctgagcccccccagtgcctcccctgttcctacccctgctgtcagccgtaccctgctgggcaactttgaggaatcattgctgcgaggacgttttgcaccatctggccacattgagggcttcacagcagaaattggagctagtgggtcatactgcccccagcacgtcacgctgcctgtcactgtcacattctttgatgtttctgagcaaaatgccccggctcccttcctgggcatcgtggatctgaaccccttggggaggaagggttacagcgtgcccaaggtgggcaccgtccaagtgaccttatttaaccccaaccagactgtggtaaagatgttccttgtgacctttgacttctcggacatgcctgctgcccacatgaccttcctgcgccatcgcctctttttggtgcctgtgggtgaggagggaaatgctaaccccacccaccgcctcctctgctacttgctgcacctcaggttccggagctcccgctcaggccgcttaagcctgcatggagatatccgcctgcttttttcccgccggagcctggagctggacacagggctcccctacgaactgcaggctgtgaccgaggcccctcataatccacgttattcacctttgccctgattgccagcactctgaacccatgcgggctaatgacctgcccatcctgctccatcttagagaacatatatggagagacagcaagagacccttcaggcttgaattaaagccctcaccatgctcacgcccaaatggattatttgggtgtttaaagcttctgattcttactacaccctgccctacttcgggtactccatgtgcctgtcccctcccttgggtttcccaggccagcttaggtagtagggaggaactggagctaccctgagattttctcaagttcccaggcaagttatgccagcgttgcctccctgtcctgggcaggggccacttgttattttatttatttttaatttataatttattcaaattggattgccttggtaacctcccacacctgataattggcatcactcctccccgcttcccactctcagatattgctccaacctcaggagttgaagaggcttatgcggtgggggcaggaggagaactgctttccctcagctgagggaagaggggctattccagagggactgagtcagtagccaaagactcagcttcccctgtccttccccagtcccttcacttcccctaccctctgacctatctctgaaagccaagttatgcgtatgtgtgtgtgcacaagcttgtctttgtgtggtatgtgtgtgtgagtgtgcatgtatgcacacacacaggggttaaccacccctcacctagggctccagactccagttgtccctctcctcctacctgtgtctccttgttttggggtcctgactgaagaaggtgtccagggggcagagtcagggccaagcactggggtgcctcctctcacctggccagactctgacccacctacctcagctggggtgaggggcacccctcaaactcagtcatgtggttccaaactaccccattccccactccagactctgacccagcctcagtcctaactcctggggctgggctgaggggaacaagcatttgctgaaacttgaaaaaacaaagcaaatcaaaaacaggaaaaaattgtacctggtacttttttttagaaaaaaagattaaaaaagaaagaataaattcttgtttggaaacttgaa

SEQ ID NO: 132528 - DNA, 3070 bp, Homo sapiens
  Payload ID: 5884
  Gene Symbol: FAM214B
  Gene Name: family with sequence similarity 214, member B
  Uniprot ID: Q7L5A3
  ENST ID: ENST00000378557
  CDS Start-End: 375-1991
agcctagcagagcagggctcagcctgagccaccctttgtctgggttgggggcccgtggcagggaggaccggggaaccaaggggagggaccgggacgggacgggacggaagggcccggagcagcggccacctccgcggagccaatttgggagcgggggtcctgctgagctcaggagctgcacggaatggtggcagtcaccttgccagtgcagcaggcatggatcagactgcaagctaggggcacgaggcatcagttgggaagaggggacgcacagctaggcttgaggcctcttcatcgggatgtccccaggccccccagcccaggcccagcataaaggccgtgttggggggcccccctgacccaaggggggcttcatgcgccacgtgcaggcggagccgtctccatcctcagagccggaggctggcccttcacagcctccagtcaggcagggggccctccagggtggcctgctcatgggctacagcccagcagggggggcgacatcccccggggtctaccaggtatccatcttttcccctccggctggtacctctgagcctcatagggccctgaaacgacaagccccatccactgagggtccccgggagctgaagagaggccctgggctgggggccagagagggactaccccctgaagaaccatctactgtggggctcttaggcccagagggaccggggctgggactaggtgtggccagccagcatttctcccaccgtggcctctgtgttgtggaacagagaagtagtgtcacctcatcttggacttcgggggcctggagtcccccctgccccccatcaaatgcttcctgcaatactttgcacaccagagactgggcctccccagatccagggggacaggggtccctgggggagtccccagggccagcccctccaggccagctgcacacacttgacactgatttgcacagtcttgcacaaatagggggtaagagcccagtggctggggtgggcaatgggggtagcctctggcctagggagtcccctggcactgccaatgggcacagtcccgagcacacaccccctggccctggacccccaggcccctgccccaccaagcgaaggctgcttcctgctggagaagccccagatgtcagctctgaggaagaggggccagcccctcggaggcgccggggatccctgggccaccctactgctgccaacagttctgatgccaaagccacacccttctggagccacctgctgcctgggcccaaagagcctgttttggacccaacagactgcggtcccatggggcggaggctgaaaggagcccgtcgcctgaagctgagcccccttcgaagcctccggaaggggccaggcctgctgagcccccccagtgcctcccctgttcctacccctgctgtcagccgtaccctgctgggcaactttgaggaatcattgctgcgaggacgttttgcaccatctggccacattgagggcttcacagcagaaattggagctagtgggtcatactgcccccagcacgtcacgctgcctgtcactgtcacattctttgatgtttctgagcaaaatgccccggctcccttcctgggcatcgtggatctgaaccccttggggaggaagggttacagcgtgcccaaggtgggcaccgtccaagtgaccttatttaaccccaaccagactgtggtaaagatgttccttgtgacctttgacttctcggacatgcctgctgcccacatgaccttcctgcgccatcgcctctttttggtgcctgtgggtgaggagggaaatgctaaccccacccaccgcctcctctgctacttgctgcacctcaggttccggagctcccgctcaggccgcttaagcctgcatggagatatccgcctgcttttttcccgccggagcctggagctggacacagggctcccctacgaactgcaggctgtgaccgaggcccctcataatccacgttattcacctttgccctgattgccagcactctgaacccatgcgggctaatgacctgcccatcctgctccatcttagagaacatatatggagagacagcaagagacccttcaggcttgaattaaagccctcaccatgctcacgcccaaatggattatttgggtgtttaaagcttctgattcttactacaccctgccctacttcgggtactccatgtgcctgtcccctcccttgggtttcccaggccagcttaggtagtagggaggaactggagctaccctgagattttctcaagttcccaggcaagttatgccagcgttgcctccctgtcctgggcaggggccacttgttattttatttatttttaatttataatttattcaaattggattgccttggtaacctcccacacctgataattggcatcactcctccccgcttcccactctcagatattgctccaacctcaggagttgaagaggcttatgcggtgggggcaggaggagaactgctttccctcagctgagggaagaggggctattccagagggactgagtcagtagccaaagactcagcttcccctgtccttccccagtcccttcacttcccctaccctctgacctatctctgaaagccaagttatgcgtatgtgtgtgtgcacaagcttgtctttgtgtggtatgtgtgtgtgagtgtgcatgtatgcacacacacaggggttaaccacccctcacctagggctccagactccagttgtccctctcctcctacctgtgtctccttgttttggggtcctgactgaagaaggtgtccagggggcagagtcagggccaagcactggggtgcctcctctcacctggccagactctgacccacctacctcagctggggtgaggggcacccctcaaactcagtcatgtggttccaaactaccccattccccactccagactctgacccagcctcagtcctaactcctggggctgggctgaggggaacaagcatttgctgaaacttgaaaaaacaaagcaaatcaaaaacaggaaaaaattgtacctggtacttttttttagaaaaaaagattaaaaaagaaagaataa

SEQ ID NO: 132529 - DNA, 5771 bp, Homo sapiens
  Payload ID: 5884
  Gene Symbol: FAM214B
  Gene Name: family with sequence similarity 214, member B
  Uniprot ID: Q7L5A3
  ENST ID: ENST00000378561
  CDS Start-End: 3057-4673
aatggcctgtgagtcagaggggcagtggagtcggcggcgcggagccggggcggccccggggagggaccgtcgcagggaggggcgcggcagcggctggggggctgcgggcgccagggcccgctagtgttgcacacgaagctgaacagcgaagagcctagcagagcagggctcagcctgagccaccctttgtctgggttgggggcccgtggcagggaggaccggggaaccaaggggagggaccgggacgggacgggacggaagggcccggagcagcggccacctccgcggagccaatttgggagcggggtgagtgtgctagagggaaagagcaaatctccgaagctccagtatagtatggggcctgtcccaggctgtggggaggagaggagtgagaagggacctgggaggctgggcagggggtaagggatcgtccagaagaaggagtccaggagtcaggtgagtctgcctggcttagtttagagagtctgctaaggtctgctctctcccctctgaagatagagggctctaggctgggggccgaggggttggtaagagagaagaagtcgaccttcctacccacagtggtggtccgtgggaacagcccccctagcttgtgtggatgtatgtagggacaaaatagagagcagctggcagcagttctctttgcataggatgagggtggaaagcacatggataggaattcatcctgtcactctccttgatcatggtagaaatggaaatctttaatactgaagggaaggggagaatgagccttgaagctgatacctataccaatacccacctcacccacctcccaggcctcaaaagtgtctaaaggtacagacgtattctgggacttgttgtttttgctggccttgctccctcagcatgttgggagctgtagtccttgccagccacagcctggcacagctgtttgatgccagctgctgcccaccccctgaacgaagagtgaggcttggcctactctgccctgcccccctcccctgcagtcctgccccatgagtcagcttgaagccatggtctagagccagactggctgggtggcaggggagtgaatatagagcgtcttgttgacagggtgggaactgagagggctctggggttaataagcagatgccaggtatgctggggtcaagtagggcatcatgtcatcccctggcttccccagggcaaggggtcaagagggcaactgggatgacctggaagtggtggtgctagggaaaaggcccctcctgaatctgtatggcttgggtggaggaaagaagggtagaaattagtgcaggttgtaccttctgacaaggttggttgcaggtaggatagtgcaggttgcgattggtgttctgccctttccagccatcccgcccaccacagggaaccaggattttcttagggatcccaattcttaggagaatttggtgaaatgggatagtggggtacaatgatgggaacttggtgtaggagagcttttcagtccctgggtacaaatctctcctttctgcctgctccccacccccacctctgttcctgattttcccttgtacaattaatctctctgcttctctcatctgggaaatttttctctccactctcaggactgctgctcagatgtctgggacttgcattctactttttttgagccctgctgtgtgcttacccctgtacttggggttggatggaggggtgggacacagatctgtcctcaggaactctatggtcggtctagaagatgccttacccacaggagtgagcagaactgttagtgagcttacaggaagtagtaacactgccataggtgaggtctcagagaagggagagatgcttatggtctggggtggacagagcagactttctggaggagatggcatttgacctatccaaggaggaaaagtcttgggtaggcattcaaagggcacttcttgaaggggaaagagcaccgtgaatgtcagacagcaaaagagaaggctgaccctgggggcagctggctttcaacttgacattcccctcaccctagtatgggctggaatagttagtgaagaccatcttatgcacccgtggtttggggttttggtgttgggtgtgtgagcactgggggaggggcgtggagaggtactccctagttgcttccagctgactgactgctgcggccttatctctagtttgcagggccttgcgggagggccctggaaagtgccttctggcagtgaccccttccccttccccttcttgtttttggtcggatttgttgcctcttgttaaagagacaggctgctggaggcaatttggagttcagggctgaaaggccagctctgagctgacttgaaatttgtacctctgaggaccgctgatggggtataactgtgtgggagacctctgcccttagtgccctaggatggcacttgtccctttggagatagacatataagaaggagttgtgcaatttggtggctttgagtaagaaagctgaattcttcccctggccgcctctcagctgacacggtctcttggatcttgggggtctctcatcccttcctccatgtagggcaggagtcctcaaatggtggccctgacaagtagttattctacctcaactcacttgtcacatccttattatactgagccaagacctgcctctttgactccttaggtagcccaactctgccatctgtgccctggaccccaagcctaccctttctgttcctgaagagcctctcacatgggagaaggatgtcctggagtgtactattagcctataattggtgacaggccttaccgctggctccagtgatcctggcttacgtctgttcttctctcctcagggtcctgctgagctcaggagctgcacggaatggtggcagtcaccttgccagtgcagcaggcatggatcagactgcaagctaggggcacgaggcatcagttgggaagaggggacgcacagctaggcttgaggcctcttcatcgggatgtccccaggccccccagcccaggcccagcataaaggccgtgttggggggcccccctgacccaaggggggcttcatgcgccacgtgcaggcggagccgtctccatcctcagagccggaggctggcccttcacagcctccagtcaggcagggggccctccagggtggcctgctcatgggctacagcccagcagggggggcgacatcccccggggtctaccaggtatccatcttttcccctccggctggtacctctgagcctcatagggccctgaaacgacaagccccatccactgagggtccccgggagctgaagagaggccctgggctgggggccagagagggactaccccctgaagaaccatctactgtggggctcttaggcccagagggaccggggctgggactaggtgtggccagccagcatttctcccaccgtggcctctgtgttgtggaacagagaagtagtgtcacctcatcttggacttcgggggcctggagtcccccctgccccccatcaaatgcttcctgcaatactttgcacaccagagactgggcctccccagatccagggggacaggggtccctgggggagtccccagggccagcccctccaggccagctgcacacacttgacactgatttgcacagtcttgcacaaatagggggtaagagcccagtggctggggtgggcaatgggggtagcctctggcctagggagtcccctggcactgccaatgggcacagtcccgagcacacaccccctggccctggacccccaggcccctgccccaccaagcgaaggctgcttcctgctggagaagccccagatgtcagctctgaggaagaggggccagcccctcggaggcgccggggatccctgggccaccctactgctgccaacagttctgatgccaaagccacacccttctggagccacctgctgcctgggcccaaagagcctgttttggacccaacagactgcggtcccatggggcggaggctgaaaggagcccgtcgcctgaagctgagcccccttcgaagcctccggaaggggccaggcctgctgagcccccccagtgcctcccctgttcctacccctgctgtcagccgtaccctgctgggcaactttgaggaatcattgctgcgaggacgttttgcaccatctggccacattgagggcttcacagcagaaattggagctagtgggtcatactgcccccagcacgtcacgctgcctgtcactgtcacattctttgatgtttctgagcaaaatgccccggctcccttcctgggcatcgtggatctgaaccccttggggaggaagggttacagcgtgcccaaggtgggcaccgtccaagtgaccttatttaaccccaaccagactgtggtaaagatgttccttgtgacctttgacttctcggacatgcctgctgcccacatgaccttcctgcgccatcgcctctttttggtgcctgtgggtgaggagggaaatgctaaccccacccaccgcctcctctgctacttgctgcacctcaggttccggagctcccgctcaggccgcttaagcctgcatggagatatccgcctgcttttttcccgccggagcctggagctggacacagggctcccctacgaactgcaggctgtgaccgaggcccctcataatccacgttattcacctttgccctgattgccagcactctgaacccatgcgggctaatgacctgcccatcctgctccatcttagagaacatatatggagagacagcaagagacccttcaggcttgaattaaagccctcaccatgctcacgcccaaatggattatttgggtgtttaaagcttctgattcttactacaccctgccctacttcgggtactccatgtgcctgtcccctcccttgggtttcccaggccagcttaggtagtagggaggaactggagctaccctgagattttctcaagttcccaggcaagttatgccagcgttgcctccctgtcctgggcaggggccacttgttattttatttatttttaatttataatttattcaaattggattgccttggtaacctcccacacctgataattggcatcactcctccccgcttcccactctcagatattgctccaacctcaggagttgaagaggcttatgcggtgggggcaggaggagaactgctttccctcagctgagggaagaggggctattccagagggactgagtcagtagccaaagactcagcttcccctgtccttccccagtcccttcacttcccctaccctctgacctatctctgaaagccaagttatgcgtatgtgtgtgtgcacaagcttgtctttgtgtggtatgtgtgtgtgagtgtgcatgtatgcacacacacaggggttaaccacccctcacctagggctccagactccagttgtccctctcctcctacctgtgtctccttgttttggggtcctgactgaagaaggtgtccagggggcagagtcagggccaagcactggggtgcctcctctcacctggccagactctgacccacctacctcagctggggtgaggggcacccctcaaactcagtcatgtggttccaaactaccccattccccactccagactctgacccagcctcagtcctaactcctggggctgggctgaggggaacaagcatttgctgaaacttgaaaaaacaaagcaaatcaaaaacaggaaaaaattgtacctggtacttttttttagaaaaaaagattaaaaaagaaagaataaattcttgtttggaaacttg

SEQ ID NO: 132530 - DNA, 2566 bp, Homo sapiens
  Payload ID: 5884
  Gene Symbol: FAM214B
  Gene Name: family with sequence similarity 214, member B
  Uniprot ID: Q7L5A3
  ENST ID: ENST00000378566
  CDS Start-End: 756-1457
aaccactaccacgtccccaagtgcaacgggacccacggaactacaggtgtggggcagggtgagcgtggaagaagggacgcggatgggggtgcgctttgcagacgatctggagactgctgtgtgttgagggaagatacgaagtcgcgggagcagttggggactcaatgtgtgggcaacaagggtcctgctgagctcaggagctgcacggaatggtggcagtcaccttgccagtgcagcaggcatggatcagactgcaagctaggggcacgaggcatcagttgggaagaggggacgcacagctaggcttgaggcctcttcatcgggatgtccccaggccccccagcccaggcccagcataaaggccgtgttggggggcccccctgacccaaggggggcttcatgcgccacgtgcaggcggagccgtctccatcctcagagccggaggctggcccttcacagcctccagtcaggcagggggccctccagggtggcctgctcatgggctacagcccagcagggggggcgacatcccccggggtctaccaggcccctgccccaccaagcgaaggctgcttcctgctggagaagccccagatgtcagctctgaggaagaggggccagcccctcggaggcgccggggatccctgggccaccctactgctgccaacagttctgatgccaaagccacacccttctggagccacctgctgcctgggcccaaagagcctgttttggacccaacagactgcggtcccatggggcggaggctgaaaggagcccgtcgcctgaagctgagcccccttcgaagcctccggaaggggccaggcctgctgagcccccccagtgcctcccctgttcctacccctgctgtcagccgtaccctgctgggcaactttgaggaatcattgctgcgaggacgttttgcaccatctggccacattgagggcttcacagcagaaattggagctagtgggtcatactgcccccagcacgtcacgctgcctgtcactgtcacattctttgatgtttctgagcaaaatgccccggctcccttcctgggcatcgtggatctgaaccccttggggaggaagggttacagcgtgcccaaggtgggcaccgtccaagtgaccttatttaaccccaaccagactgtggtaaagatgttccttgtgacctttgacttctcggacatgcctgctgcccacatgaccttcctgcgccatcgcctctttttggtgcctgtgggtgaggagggaaatgctaaccccacccaccgcctcctctgctacttgctgcacctcaggttccggagctcccgctcaggccgcttaagcctgcatggagatatccgcctgcttttttcccgccggagcctggagctggacacagggctcccctacgaactgcaggctgtgaccgaggcccctcataatccacgttattcacctttgccctgattgccagcactctgaacccatgcgggctaatgacctgcccatcctgctccatcttagagaacatatatggagagacagcaagagacccttcaggcttgaattaaagccctcaccatgctcacgcccaaatggattatttgggtgtttaaagcttctgattcttactacaccctgccctacttcgggtactccatgtgcctgtcccctcccttgggtttcccaggccagcttaggtagtagggaggaactggagctaccctgagattttctcaagttcccaggcaagttatgccagcgttgcctccctgtcctgggcaggggccacttgttattttatttatttttaatttataatttattcaaattggattgccttggtaacctcccacacctgataattggcatcactcctccccgcttcccactctcagatattgctccaacctcaggagttgaagaggcttatgcggtgggggcaggaggagaactgctttccctcagctgagggaagaggggctattccagagggactgagtcagtagccaaagactcagcttcccctgtccttccccagtcccttcacttcccctaccctctgacctatctctgaaagccaagttatgcgtatgtgtgtgtgcacaagcttgtctttgtgtggtatgtgtgtgtgagtgtgcatgtatgcacacacacaggggttaaccacccctcacctagggctccagactccagttgtccctctcctcctacctgtgtctccttgttttggggtcctgactgaagaaggtgtccagggggcagagtcagggccaagcactggggtgcctcctctcacctggccagactctgacccacctacctcagctggggtgaggggcacccctcaaactcagtcatgtggttccaaactaccccattccccactccagactctgacccagcctcagtcctaactcctggggctgggctgaggggaacaagcatttgctgaaacttgaaaaaacaaagcaaatcaaaaacaggaaaaaattgtacctggtacttttttttagaaaaaaagattaaaaaagaaagaataaattcttgtttggaaacttgaactaagctct

SEQ ID NO: 132531 - DNA, 3256 bp, Homo sapiens
  Payload ID: 5884
  Gene Symbol: FAM214B
  Gene Name: family with sequence similarity 214, member B
  Uniprot ID: Q7L5A3
  ENST ID: ENST00000603301
  CDS Start-End: 540-2156
atcagctggtaggaaatggcctgtgagtcagaggggcagtggagtcggcggcgcggagccggggcggccccggggagggaccgtcgcagggaggggcgcggcagcggctggggggctgcgggcgccagggcccgctagtgttgcacacgaagctgaacagcgaagagcctagcagagcagggctcagcctgagccaccctttgtctgggttgggggcccgtggcagggaggaccggggaaccaaggggagggaccgggacgggacgggacggaagggcccggagcagcggccacctccgcggagccaatttgggagcgggggtcctgctgagctcaggagctgcacggaatggtggcagtcaccttgccagtgcagcaggcatggatcagactgcaagctaggggcacgaggcatcagttgggaagaggggacgcacagctaggcttgaggcctcttcatcgggatgtccccaggccccccagcccaggcccagcataaaggccgtgttggggggcccccctgacccaaggggggcttcatgcgccacgtgcaggcggagccgtctccatcctcagagccggaggctggcccttcacagcctccagtcaggcagggggccctccagggtggcctgctcatgggctacagcccagcagggggggcgacatcccccggggtctaccaggtatccatcttttcccctccggctggtacctctgagcctcatagggccctgaaacgacaagccccatccactgagggtccccgggagctgaagagaggccctgggctgggggccagagagggactaccccctgaagaaccatctactgtggggctcttaggcccagagggaccggggctgggactaggtgtggccagccagcatttctcccaccgtggcctctgtgttgtggaacagagaagtagtgtcacctcatcttggacttcgggggcctggagtcccccctgccccccatcaaatgcttcctgcaatactttgcacaccagagactgggcctccccagatccagggggacaggggtccctgggggagtccccagggccagcccctccaggccagctgcacacacttgacactgatttgcacagtcttgcacaaatagggggtaagagcccagtggctggggtgggcaatgggggtagcctctggcctagggagtcccctggcactgccaatgggcacagtcccgagcacacaccccctggccctggacccccaggcccctgccccaccaagcgaaggctgcttcctgctggagaagccccagatgtcagctctgaggaagaggggccagcccctcggaggcgccggggatccctgggccaccctactgctgccaacagttctgatgccaaagccacacccttctggagccacctgctgcctgggcccaaagagcctgttttggacccaacagactgcggtcccatggggcggaggctgaaaggagcccgtcgcctgaagctgagcccccttcgaagcctccggaaggggccaggcctgctgagcccccccagtgcctcccctgttcctacccctgctgtcagccgtaccctgctgggcaactttgaggaatcattgctgcgaggacgttttgcaccatctggccacattgagggcttcacagcagaaattggagctagtgggtcatactgcccccagcacgtcacgctgcctgtcactgtcacattctttgatgtttctgagcaaaatgccccggctcccttcctgggcatcgtggatctgaaccccttggggaggaagggttacagcgtgcccaaggtgggcaccgtccaagtgaccttatttaaccccaaccagactgtggtaaagatgttccttgtgacctttgacttctcggacatgcctgctgcccacatgaccttcctgcgccatcgcctctttttggtgcctgtgggtgaggagggaaatgctaaccccacccaccgcctcctctgctacttgctgcacctcaggttccggagctcccgctcaggccgcttaagcctgcatggagatatccgcctgcttttttcccgccggagcctggagctggacacagggctcccctacgaactgcaggctgtgaccgaggcccctcataatccacgttattcacctttgccctgattgccagcactctgaacccatgcgggctaatgacctgcccatcctgctccatcttagagaacatatatggagagacagcaagagacccttcaggcttgaattaaagccctcaccatgctcacgcccaaatggattatttgggtgtttaaagcttctgattcttactacaccctgccctacttcgggtactccatgtgcctgtcccctcccttgggtttcccaggccagcttaggtagtagggaggaactggagctaccctgagattttctcaagttcccaggcaagttatgccagcgttgcctccctgtcctgggcaggggccacttgttattttatttatttttaatttataatttattcaaattggattgccttggtaacctcccacacctgataattggcatcactcctccccgcttcccactctcagatattgctccaacctcaggagttgaagaggcttatgcggtgggggcaggaggagaactgctttccctcagctgagggaagaggggctattccagagggactgagtcagtagccaaagactcagcttcccctgtccttccccagtcccttcacttcccctaccctctgacctatctctgaaagccaagttatgcgtatgtgtgtgtgcacaagcttgtctttgtgtggtatgtgtgtgtgagtgtgcatgtatgcacacacacaggggttaaccacccctcacctagggctccagactccagttgtccctctcctcctacctgtgtctccttgttttggggtcctgactgaagaaggtgtccagggggcagagtcagggccaagcactggggtgcctcctctcacctggccagactctgacccacctacctcagctggggtgaggggcacccctcaaactcagtcatgtggttccaaactaccccattccccactccagactctgacccagcctcagtcctaactcctggggctgggctgaggggaacaagcatttgctgaaacttgaaaaaacaaagcaaatcaaaaacaggaaaaaattgtacctggtacttttttttagaaaaaaagattaaaaaagaaagaataaattcttgtttggaaacttgaa

SEQ ID NO: 132532 - DNA, 3016 bp, Homo sapiens
  Payload ID: 5884
  Gene Symbol: FAM214B
  Gene Name: family with sequence similarity 214, member B
  Uniprot ID: Q7L5A3
  ENST ID: ENST00000605244
  CDS Start-End: 300-1916
actttgtctcctccttcctcctttggggccgccaccgccaatcagagccagcggatcctggttggagtgcgaccgcccggggtcctgctgagctcaggagctgcacggaatggtggcagtcaccttgccagtgcagcaggcatggatcagactgcaagctaggggcacgaggcatcagttgggaagaggggacgcacagctaggcttgaggcctcttcatcgggatgtccccaggccccccagcccaggcccagcataaaggccgtgttggggggcccccctgacccaaggggggcttcatgcgccacgtgcaggcggagccgtctccatcctcagagccggaggctggcccttcacagcctccagtcaggcagggggccctccagggtggcctgctcatgggctacagcccagcagggggggcgacatcccccggggtctaccaggtatccatcttttcccctccggctggtacctctgagcctcatagggccctgaaacgacaagccccatccactgagggtccccgggagctgaagagaggccctgggctgggggccagagagggactaccccctgaagaaccatctactgtggggctcttaggcccagagggaccggggctgggactaggtgtggccagccagcatttctcccaccgtggcctctgtgttgtggaacagagaagtagtgtcacctcatcttggacttcgggggcctggagtcccccctgccccccatcaaatgcttcctgcaatactttgcacaccagagactgggcctccccagatccagggggacaggggtccctgggggagtccccagggccagcccctccaggccagctgcacacacttgacactgatttgcacagtcttgcacaaatagggggtaagagcccagtggctggggtgggcaatgggggtagcctctggcctagggagtcccctggcactgccaatgggcacagtcccgagcacacaccccctggccctggacccccaggcccctgccccaccaagcgaaggctgcttcctgctggagaagccccagatgtcagctctgaggaagaggggccagcccctcggaggcgccggggatccctgggccaccctactgctgccaacagttctgatgccaaagccacacccttctggagccacctgctgcctgggcccaaagagcctgttttggacccaacagactgcggtcccatggggcggaggctgaaaggagcccgtcgcctgaagctgagcccccttcgaagcctccggaaggggccaggcctgctgagcccccccagtgcctcccctgttcctacccctgctgtcagccgtaccctgctgggcaactttgaggaatcattgctgcgaggacgttttgcaccatctggccacattgagggcttcacagcagaaattggagctagtgggtcatactgcccccagcacgtcacgctgcctgtcactgtcacattctttgatgtttctgagcaaaatgccccggctcccttcctgggcatcgtggatctgaaccccttggggaggaagggttacagcgtgcccaaggtgggcaccgtccaagtgaccttatttaaccccaaccagactgtggtaaagatgttccttgtgacctttgacttctcggacatgcctgctgcccacatgaccttcctgcgccatcgcctctttttggtgcctgtgggtgaggagggaaatgctaaccccacccaccgcctcctctgctacttgctgcacctcaggttccggagctcccgctcaggccgcttaagcctgcatggagatatccgcctgcttttttcccgccggagcctggagctggacacagggctcccctacgaactgcaggctgtgaccgaggcccctcataatccacgttattcacctttgccctgattgccagcactctgaacccatgcgggctaatgacctgcccatcctgctccatcttagagaacatatatggagagacagcaagagacccttcaggcttgaattaaagccctcaccatgctcacgcccaaatggattatttgggtgtttaaagcttctgattcttactacaccctgccctacttcgggtactccatgtgcctgtcccctcccttgggtttcccaggccagcttaggtagtagggaggaactggagctaccctgagattttctcaagttcccaggcaagttatgccagcgttgcctccctgtcctgggcaggggccacttgttattttatttatttttaatttataatttattcaaattggattgccttggtaacctcccacacctgataattggcatcactcctccccgcttcccactctcagatattgctccaacctcaggagttgaagaggcttatgcggtgggggcaggaggagaactgctttccctcagctgagggaagaggggctattccagagggactgagtcagtagccaaagactcagcttcccctgtccttccccagtcccttcacttcccctaccctctgacctatctctgaaagccaagttatgcgtatgtgtgtgtgcacaagcttgtctttgtgtggtatgtgtgtgtgagtgtgcatgtatgcacacacacaggggttaaccacccctcacctagggctccagactccagttgtccctctcctcctacctgtgtctccttgttttggggtcctgactgaagaaggtgtccagggggcagagtcagggccaagcactggggtgcctcctctcacctggccagactctgacccacctacctcagctggggtgaggggcacccctcaaactcagtcatgtggttccaaactaccccattccccactccagactctgacccagcctcagtcctaactcctggggctgggctgaggggaacaagcatttgctgaaacttgaaaaaacaaagcaaatcaaaaacaggaaaaaattgtacctggtacttttttttagaaaaaaagattaaaaaagaaagaataaattcttgtttggaaacttgaa

SEQ ID NO: 132533 - DNA, 2999 bp, Homo sapiens
  Payload ID: 5884
  Gene Symbol: FAM214B
  Gene Name: family with sequence similarity 214, member B
  Uniprot ID: Q7L5A3
  ENST ID: ENST00000488109
  CDS Start-End: 283-1899
attctgggcagaagctctcctatcccacttccctgtatgctctgtctccttgaacatgggcctggtcctgctgagctcaggagctgcacggaatggtggcagtcaccttgccagtgcagcaggcatggatcagactgcaagctaggggcacgaggcatcagttgggaagaggggacgcacagctaggcttgaggcctcttcatcgggatgtccccaggccccccagcccaggcccagcataaaggccgtgttggggggcccccctgacccaaggggggcttcatgcgccacgtgcaggcggagccgtctccatcctcagagccggaggctggcccttcacagcctccagtcaggcagggggccctccagggtggcctgctcatgggctacagcccagcagggggggcgacatcccccggggtctaccaggtatccatcttttcccctccggctggtacctctgagcctcatagggccctgaaacgacaagccccatccactgagggtccccgggagctgaagagaggccctgggctgggggccagagagggactaccccctgaagaaccatctactgtggggctcttaggcccagagggaccggggctgggactaggtgtggccagccagcatttctcccaccgtggcctctgtgttgtggaacagagaagtagtgtcacctcatcttggacttcgggggcctggagtcccccctgccccccatcaaatgcttcctgcaatactttgcacaccagagactgggcctccccagatccagggggacaggggtccctgggggagtccccagggccagcccctccaggccagctgcacacacttgacactgatttgcacagtcttgcacaaatagggggtaagagcccagtggctggggtgggcaatgggggtagcctctggcctagggagtcccctggcactgccaatgggcacagtcccgagcacacaccccctggccctggacccccaggcccctgccccaccaagcgaaggctgcttcctgctggagaagccccagatgtcagctctgaggaagaggggccagcccctcggaggcgccggggatccctgggccaccctactgctgccaacagttctgatgccaaagccacacccttctggagccacctgctgcctgggcccaaagagcctgttttggacccaacagactgcggtcccatggggcggaggctgaaaggagcccgtcgcctgaagctgagcccccttcgaagcctccggaaggggccaggcctgctgagcccccccagtgcctcccctgttcctacccctgctgtcagccgtaccctgctgggcaactttgaggaatcattgctgcgaggacgttttgcaccatctggccacattgagggcttcacagcagaaattggagctagtgggtcatactgcccccagcacgtcacgctgcctgtcactgtcacattctttgatgtttctgagcaaaatgccccggctcccttcctgggcatcgtggatctgaaccccttggggaggaagggttacagcgtgcccaaggtgggcaccgtccaagtgaccttatttaaccccaaccagactgtggtaaagatgttccttgtgacctttgacttctcggacatgcctgctgcccacatgaccttcctgcgccatcgcctctttttggtgcctgtgggtgaggagggaaatgctaaccccacccaccgcctcctctgctacttgctgcacctcaggttccggagctcccgctcaggccgcttaagcctgcatggagatatccgcctgcttttttcccgccggagcctggagctggacacagggctcccctacgaactgcaggctgtgaccgaggcccctcataatccacgttattcacctttgccctgattgccagcactctgaacccatgcgggctaatgacctgcccatcctgctccatcttagagaacatatatggagagacagcaagagacccttcaggcttgaattaaagccctcaccatgctcacgcccaaatggattatttgggtgtttaaagcttctgattcttactacaccctgccctacttcgggtactccatgtgcctgtcccctcccttgggtttcccaggccagcttaggtagtagggaggaactggagctaccctgagattttctcaagttcccaggcaagttatgccagcgttgcctccctgtcctgggcaggggccacttgttattttatttatttttaatttataatttattcaaattggattgccttggtaacctcccacacctgataattggcatcactcctccccgcttcccactctcagatattgctccaacctcaggagttgaagaggcttatgcggtgggggcaggaggagaactgctttccctcagctgagggaagaggggctattccagagggactgagtcagtagccaaagactcagcttcccctgtccttccccagtcccttcacttcccctaccctctgacctatctctgaaagccaagttatgcgtatgtgtgtgtgcacaagcttgtctttgtgtggtatgtgtgtgtgagtgtgcatgtatgcacacacacaggggttaaccacccctcacctagggctccagactccagttgtccctctcctcctacctgtgtctccttgttttggggtcctgactgaagaaggtgtccagggggcagagtcagggccaagcactggggtgcctcctctcacctggccagactctgacccacctacctcagctggggtgaggggcacccctcaaactcagtcatgtggttccaaactaccccattccccactccagactctgacccagcctcagtcctaactcctggggctgggctgaggggaacaagcatttgctgaaacttgaaaaaacaaagcaaatcaaaaacaggaaaaaattgtacctggtacttttttttagaaaaaaagattaaaaaagaaagaataaattcttgtttggaaacttgaa

SEQ ID NO: 132534 - DNA, 1582 bp, Homo sapiens
  Payload ID: 5885
  Gene Symbol: FAM216A
  Gene Name: family with sequence similarity 216, member A
  Uniprot ID: Q8WUB2
  ENST ID: ENST00000377673
  CDS Start-End: 513-1334
gagaaacgcgtcctgagaaaaaaggggaggggcgagggagaggatttgcgcgtgcgcaaaagtagttgatggaaatcggccgttgggatgctgtctaagcttggatacctgagtaataacggacaacagataaagctccgcatccttgcgccacgtgcttcggtccgtggtttgcgtgcagacgtttgacctgtatggtgaccctcgcgatttgcaaatgtgctgaggatctggaatactgaagtggaaggcacctcttgttttggggagcatgtatatttccctcctgtgacgcactgcttccacagagaggtgcaaacgtgcaaacgctcagcgaccgcagcgctcctgcccctcccccaccgtaactccggggtcgcggatctgcccgccccgctctcccgaagctgttcgggcagtgtccgaacggcttcggaggggcgagaagccagcatccgagccgcctctccggaataccagcagcctgacgcacgcgtgctgtcgggggagggatgctgggacagctgctcccgcacacggctcgcggtctcggcgccgcggagatgcccggccagggtccggggtccgactggacggagcgtagctcttctgcagagccgcccgctgtggccgggaccgagggtggcggcggcggatcagctggatactcttgttaccagaattccaaaggttctgatagaatcaaagatggatacaaagtgaactcacacatagctaagctgcaagagttatggaaaactccccaaaatcaaacaatccacctctctaaatcaatgatggaggcgtcctttttcaagcatccagacctcaccacaggccagaagcgttacctgtgcagcattgctaaaatctataatgcaaactatctgaagatgttaatgaagaggcagtacatgcacgtacttcagcacagctcacaaaagccaggtgtcctcactcatcacagaagccgccttagctcccgttactcacagaaacagcattacccttgcactacatggcgacatcaactggagagagaggactcggggtcttctgatatcgcagctgcatctgcacctgaaatgctcatacagcattccctttggcggccagtgagaaacaaagaagggataaaaactggatatgcatctaaaacaagatgtaagtcactgaagatttttagaagaccaaggaaactgttcatgcaaacagtttcttcagatgattctgaatcacacatgagtgaagaaaaaaaggaagaagatttactaaataattttatgcaatcaatgtcaattgaagaacagggagaacatctgatgttaacttgacagtcttgtctcgtgtattgaattcgtgccaaaggtgagggtaaggggttgtgagttgtgtcctgtatgtttaggatggtattgttatttattaaatcattaagtaattttggtttgttcagaaacttaaaacaatgtaattggtctgatgtagttccatgtaccaatgatagttatgtaagaaaatttacatgtaacatatacttgtacttctagctagatacaattaaaacttttcttgcattcaa

SEQ ID NO: 132535 - DNA, 929 bp, Homo sapiens
  Payload ID: 5885
  Gene Symbol: FAM216A
  Gene Name: family with sequence similarity 216, member A
  ENST ID: ENST00000548449
  CDS Start-End: 96-329
agtgtccgaacggcttcggaggggcgagaagccagcatccgagccgcctctccggaataccagcagcctgacgcacgcgtgctgtcgggggagggatgctgggacagctgctcccgcacacggctcgcggtctcggcgccgcggagatgcccggccagggtccggggtccgactggacggagcgtagctcttctgcagagccgcccgctgtggccgggaccgagggtggcggcggcggatcagctggatactcttgttaccagaattccaaaggttctgcatccagacctcaccacaggccagaagcgttacctgtgcagcattgctaaaatctataatgcaaactatctgaagatgttaatgaagaggcagtacatgcacgtacttcagcacagctcacaaaagccaggtgtcctcactcatcacagaagccgccttagctcccgttactcacagaaacagcattacccttgcactacatggcgacatcaactggagagagaggactcggggtcttctgatatcgcagctgcatctgcacctgaaatgctcatacagcattccctttggcggccagtgagaaacaaagaagggtctgtttcttagtgtaaaaggggggaaatgcatctcagtttaatttttttttttctcagacagggttttgttctctcacccaggctggagtgtagtggtgtgatacagtttactgtattctcaaactcctgggctcaagcaatgctcctgcctcagactcccaagtagctagggctaaaggcacaaaccaccatgccctgctagttaaaaaaaattgtttgtacagaaagcatctcactatgttggccaaggtactctcacctccgcctcccaaagcactgggattacaggcgtgagctactgtgcccagccttccccatctcttttgaagggta

SEQ ID NO: 132536 - DNA, 3243 bp, Homo sapiens
  Payload ID: 5886
  Gene Symbol: FAM216B
  Gene Name: family with sequence similarity 216, member B
  Uniprot ID: Q8N7L0
  ENST ID: ENST00000313851
  CDS Start-End: 65-484
acactgaataggaatggcagcttttaaaagtgggggaactacagtatagggtataggataaacgatgggacaaaactggaaaagacaacaaaagctttggaatgttccacaacttccttttattcgagttcctccctccatctatgacacttccttactaaaggccctcaaccaagggcaacagcgctacttttacagcattatgaggatttacaactccaggccccagtgggaggccctgcagacccgctacattcacagccttcagcaccaacagctgcttggctatattactcaacgggaagccttgtcttatgctcttgtacttagagattcaaccaagagagcctcagccaaggtagctcctcaaagaaccattccccggaaaacttcagccatgacaagaagatgtccatcagtactacctgtatctgtggttctacctagggcccaaagtaaaaggcgccaagtgctcaggaactgagacttggcagcattttcagaaacaggaagtttgcccatgtatccctggtatctagtgggtgctttgtgcatatttgttgaatgacagtgaataatttctaatataaaccccagacctaaaaataatctctgattcatataaattttgccagcaagaccaagaggtttaagagcaatggagccgagagtaagcaagcctttccacataacatccgtagagtaaaaggacttttaaagctttcaaagtaaaagtttactttggattagaacctcctagagaagtccccaaaacagtgaaaggggacaagtgaccagaaagggccaggtcctctgtcactgggtgaccatttctagcaaactatcatgtatacattttgaaaatatacaaaacaacacaggattaacactgatcatagagggcttacaaaatcatatcatcccagcaacaattggcctgtgcatttccttcctctcctcttccccatcaggcaatggcatttaatttagccccaaagctcttctagttctcacctggcttgatcactttgtgtcatcttgaaacatgcacttatcagtctaccacagctgaattgattttatggagctgtaactggccttgacatgggtaagagaattcatgcacacatctttccctggcagctgaagaaacactcttaaaagaatatgaaataaccccgaagactttatttcatgtccaacctttctgtggcctcaaatgttttaagcaaagcacataaaactatactaagcagtgagtcagttcatcatacaaaggcatagtattgcattagttatatttaatggttattttcatcaccagagattttgtgtgtgtgtgtgtgtgtgtgtgtgtgtgtgttaaaaatcagtcaccagtgctcatgtaaagtcaaaacaaaaaaatgcttcttcctcatcattgtaaaatacgtcaccccattcaaatcagctgatgcctatgaaaggaattggttgaggtggaatataaattttattgacaagggatgtgctaacattgatctgaaaggaatatgctgcattattatcagaaaaaaaatcattatcttctctttgcaatcatgaacatataagatataaaaattgtcatgagattctgaacactagtattgaggtccagcactacttccaagctcctatctgacttttctttgggaggaatgggaagtgtggttggcccactagtctgataagaagtcttggtgaagctaatactgaccttgctggggtcattcacttaatcataaagaagcttcttgacctctgcaaattctggccctgacatgtattctaaatacctttacagttctaagtgagaaattgttacataggcttagaagaagaaaagactccagtgggactgggatgagctgcgtggtagccctcataaagcagagaggttggtgggagacctaacttggcctatactagccttcccattgttttcacaatgggccttttatcccctctgaactgcttgcctgcacttttatcttagacttttttttttgatgagcataggtatttgctgtgtaagccttatctagtgatgcagaatatcaaggaggccacttacaattctaagctgcatccctgtatcaaaaatctcagaagcaccttgcatctgatagaggcttgtaagagcagattgacaggtgaatgtcacaggtccataagaaggacaaatagatctaagttgggcaaaagattctatttgttggttctcccttctaagatgataatatgcccctgcacttgagaccttacttgaaacttaaagaaatgtgattggttatggtgctgggagaaaggggtgcacctgggaggacactgagaaagataaacaaaggggaaggaagagaggacaacctgtaacttttagaaaaggctactacttttaactgttggagaaaatgctattgcttgcactcacaatgtcaatatacattatcagaacttaagtcctggagatcagagactgtttcacctgaaattgctagcacctagaatggcccccggttgcggtaggcaatcaataatactctttgaataataatgaggttttcaaagattctgcaagtcagactggcctctggctttgtgatattattctagagtcccagtaacccacaattgttgatgaggagtagcagtagaatatcaaggacaggtgatgagacaacaagtctatcccgcaaagggcagggaatagagggtacactggaaagaatttgaaaacaataataaagctgactacaagttggtctattttttattaccaccatgagccagcaattctaaataatatcagtgataaagtattcatcccccaaaatattttattgaactaggttctaaacaatttctgaggttactgttgagttttaaataatacatatatgtaagcttcaaagtagcacatttgtactgtttttcttcaataatcattttactccacatggaaactaattcagggaatatcctgctatatagttggctctcagtacatatggtgtcagctcatgtgtctccagcccctgtagtactatatattattgcatttaaatgatggatttgaaataaacaatgattataccatgattgtaaagacaagaaacagaacctgaaatacttcaatttttgattctatgtggcagtttagagttttttaaaacaatttttatgtataatttatatgcaataaatgccctcaaagttcaa

SEQ ID NO: 132537 - DNA, 3300 bp, Homo sapiens
  Payload ID: 5886
  Gene Symbol: FAM216B
  Gene Name: family with sequence similarity 216, member B
  Uniprot ID: Q8N7L0
  ENST ID: ENST00000537894
  CDS Start-End: 124-543
atcagcttatcaacagacttccaccaccaccaccagcatataaacagagtccgcgtaagaaaactacactgaataggaatggcagcttttaaaagtgggggaactacagtatagggataaacgatgggacaaaactggaaaagacaacaaaagctttggaatgttccacaacttccttttattcgagttcctccctccatctatgacacttccttactaaaggccctcaaccaagggcaacagcgctacttttacagcattatgaggatttacaactccaggccccagtgggaggccctgcagacccgctacattcacagccttcagcaccaacagctgcttggctatattactcaacgggaagccttgtcttatgctcttgtacttagagattcaaccaagagagcctcagccaaggtagctcctcaaagaaccattccccggaaaacttcagccatgacaagaagatgtccatcagtactacctgtatctgtggttctacctagggcccaaagtaaaaggcgccaagtgctcaggaactgagacttggcagcattttcagaaacaggaagtttgcccatgtatccctggtatctagtgggtgctttgtgcatatttgttgaatgacagtgaataatttctaatataaaccccagacctaaaaataatctctgattcatataaattttgccagcaagaccaagaggtttaagagcaatggagccgagagtaagcaagcctttccacataacatccgtagagtaaaaggacttttaaagctttcaaagtaaaagtttactttggattagaacctcctagagaagtccccaaaacagtgaaaggggacaagtgaccagaaagggccaggtcctctgtcactgggtgaccatttctagcaaactatcatgtatacattttgaaaatatacaaaacaacacaggattaacactgatcatagagggcttacaaaatcatatcatcccagcaacaattggcctgtgcatttccttcctctcctcttccccatcaggcaatggcatttaatttagccccaaagctcttctagttctcacctggcttgatcactttgtgtcatcttgaaacatgcacttatcagtctaccacagctgaattgattttatggagctgtaactggccttgacatgggtaagagaattcatgcacacatctttccctggcagctgaagaaacactcttaaaagaatatgaaataaccccgaagactttatttcatgtccaacctttctgtggcctcaaatgttttaagcaaagcacataaaactatactaagcagtgagtcagttcatcatacaaaggcatagtattgcattagttatatttaatggttattttcatcaccagagattttgtgtgtgtgtgtgtgtgtgtgtgtgtgtgtgttaaaaatcagtcaccagtgctcatgtaaagtcaaaacaaaaaaatgcttcttcctcatcattgtaaaatacgtcaccccattcaaatcagctgatgcctatgaaaggaattggttgaggtggaatataaattttattgacaagggatgtgctaacattgatctgaaaggaatatgctgcattattatcagaaaaaaaatcattatcttctctttgcaatcatgaacatataagatataaaaattgtcatgagattctgaacactagtattgaggtccagcactacttccaagctcctatctgacttttctttgggaggaatgggaagtgtggttggcccactagtctgataagaagtcttggtgaagctaatactgaccttgctggggtcattcacttaatcataaagaagcttcttgacctctgcaaattctggccctgacatgtattctaaatacctttacagttctaagtgagaaattgttacataggcttagaagaagaaaagactccagtgggactgggatgagctgcgtggtagccctcataaagcagagaggttggtgggagacctaacttggcctatactagccttcccattgttttcacaatgggccttttatcccctctgaactgcttgcctgcacttttatcttagacttttttttttgatgagcataggtatttgctgtgtaagccttatctagtgatgcagaatatcaaggaggccacttacaattctaagctgcatccctgtatcaaaaatctcagaagcaccttgcatctgatagaggcttgtaagagcagattgacaggtgaatgtcacaggtccataagaaggacaaatagatctaagttgggcaaaagattctatttgttggttctcccttctaagatgataatatgcccctgcacttgagaccttacttgaaacttaaagaaatgtgattggttatggtgctgggagaaaggggtgcacctgggaggacactgagaaagataaacaaaggggaaggaagagaggacaacctgtaacttttagaaaaggctactacttttaactgttggagaaaatgctattgcttgcactcacaatgtcaatatacattatcagaacttaagtcctggagatcagagactgtttcacctgaaattgctagcacctagaatggcccccggttgcggtaggcaatcaataatactctttgaataataatgaggttttcaaagattctgcaagtcagactggcctctggctttgtgatattattctagagtcccagtaacccacaattgttgatgaggagtagcagtagaatatcaaggacaggtgatgagacaacaagtctatcccgcaaagggcagggaatagagggtacactggaaagaatttgaaaacaataataaagctgactacaagttggtctattttttattaccaccatgagccagcaattctaaataatatcagtgataaagtattcatcccccaaaatattttattgaactaggttctaaacaatttctgaggttactgttgagttttaaataatacatatatgtaagcttcaaagtagcacatttgtactgtttttcttcaataatcattttactccacatggaaactaattcagggaatatcctgctatatagttggctctcagtacatatggtgtcagctcatgtgtctccagcccctgtagtactatatattattgcatttaaatgatggatttgaaataaacaatgattataccatgattgtaaagacaagaaacagaacctgaaatacttcaatttttgattctatgtggcagtttagagttttttaaaacaatttttatgtataatttatatgcaataaatgccctcaaagttc

SEQ ID NO: 132538 - DNA, 2265 bp, Homo sapiens
  Payload ID: 5887
  Gene Symbol: FAM217A
  Gene Name: family with sequence similarity 217, member A
  Uniprot ID: Q8IXS0
  ENST ID: ENST00000274673
  CDS Start-End: 405-1931
ggcccgcgaatacgcgtggaccttgtggaacgccgggcctccccgggcgcccccgctctctggtagttgccgggagacccggccggtggggaagcccgcggagccgcagccccggccccggaaggtctctctgggccccgggcccgactcccacccctgcgccggcccgcgggcttcgcaggccctgcactgccgaccgggctgcgctcaaggccgccagccgcccgccgccctctttgtccccccgctgcaggaaggccgcggcagagggggcgccctccaagccgtcagccacgcacgcggaggcgctcgggcctcggggcggcgcaccgggagagcacgccggggaggacacgtgggccttcgcgcggattttaaggaaacagagcaacagctacaacaaaatggggagaagaaatgagaactgtgctaacagcctacgtgtgtcaaacatctctcaggagaacttatctcactggaatttggattcagaagtacctgtttctgaaaataaaaacctcccagctggaagggatggagcagcaggtggcaaaattaacaagaactatttggaaattccagtggagcaactgatgctagaacctaatttgtcggtgcatagtcaaaaaagtacacagaatagtaaacaagggatctttcaattatggaattgtcctcttaatgaaggaagtaccatagagaagagggaattcaaaaaatcttcagtggaaactggctttaatgtaatcaatcatcctataagggtcttcactctgaaccacccattaacaattgcttcagttgataagcaagttggtccttaccctggactgccaatgccattaggtctctgctggccctatgctgatggagacttttttaagaacagaaatgagattcatgttagttcatgttcaactatagaaaacaatgatggtgaaacattacctgctccaaattggaatttgaaacatggaaacagcagtgtggaagaaaatttcacagatgaaagtgatttatcagaaaatgagaagacaaatgatactttactcagctattttaaaaaggtggacctgaacttgaagccagaaacaataaaaaatgttgaggaacctttcaccgaggagccaaatgaagtatttccatatcctgattttctccctcctcctttcagtgctctagacttgcacaatttagccctctccaaatctgacaattggaaagtgacagtggaccctgcagaaacctctgttgaacacttgataactcgtttactggaactagaacgattacaacatatgactattcaaaaagagaggccaagactacaaacgactttctgtactccagcagttactgaacgaccctcttcctccaaagctacaccaaaagtgagacagccaaaactttgcgactctttgagtcttcagataccttgtgtagataaaagtcaagaaaaaagtaaaaacaactctggttcttgtaagcttgaacaaaatgctttaaaacggaattggagcaatgctggcaaatatagatggaattctagaccactgtctctaaaaagttcttccaccccaaaacaattgattgaaacttatgataagaatcccaaaagttctattttaagtccatgccaagaactctcattcaaacctactattggccatacaaatcaatcaatggttaaaatggtctccacaagatgtctgccatggaggtctccaatgccagtttcacctatacctctgacttttcccgaaaatcagaaggaagaaattaaggcaccgaagagaaactttgggaccaaaaagaaactttaccgacaaaatatagtgttgaatagaccattctctattcagaagctaaactgtttgtcgccttcccttattgctaaggataagtgctgctcacccattgaacaaaaataactcttttctttcatacatctcaatgtgaacacatctactctaagaagcccaactaagatatggttaattattccaagacacaggtactattaacagtcccccaaaatcaccaaacagttgcttgatgtgatatggagtagaacttgtgaaaagcactgctgagatgtctatatataaacccacaggcttctatactgacatatttcacaatcttttgcatgttgtgtttcaagtaaatggttcacttggtagactattctattcaaaaggctactcttttttcagtgattgttttccagtataattccatcaataaatggtataattgacttat

SEQ ID NO: 132539 - DNA, 474 bp, Homo sapiens
  Payload ID: 5887
  Gene Symbol: FAM217A
  Gene Name: family with sequence similarity 217, member A
  ENST ID: ENST00000492651
  CDS Start-End: 379-474
aaggtctctctgggccccgggcccgactcccacccctgcgccggcccgcgggcttcgcaggccctgcactgccgaccgggctgcgctcaaggccgccagccgcccgccgccctctttgtccccccgctgcaggaaggccgcggcagagggggcgccctccaagccgtcagccacgcacgcggaggcgctcgggcctcggggcggcgcaccgggagagcacgccggggaggacacgtgggccttcgcgcgaacttatctcactggaatttggattcagaagtacctgtttctgaaaataaaaacctcccagctggaagggatggagcagcaggtggcaaaattaacaagaactatttggaaattccagtggagcaactgatgctagaacctaatttgtcggtgcatagtcaaaaaagtacacagaatagtaaacaagggatctttcaattatggaattgtcctcttaatgaagga

SEQ ID NO: 132540 - DNA, 470 bp, Homo sapiens
  Payload ID: 5887
  Gene Symbol: FAM217A
  Gene Name: family with sequence similarity 217, member A
  ENST ID: ENST00000498677
  CDS Start-End: 328-470
ggggaagcccgcggagccgcagccccggccccggaaggtctctctgggccccgggcccgactcccacccctgcgccggcccgcgggcttcgcaggccctgcactgccgaccgggctgcgctcaaggccgccagccgcccgccgccctctttgtccccccgctgcaggaaggccgcggcagagggggcgccctccaagccgtcagccacgcacgcggaggcgctcgggcctcggggcggcgcaccgggagagcacgccggggaggacacgtgggccttcgcgcggcaaaattaacaagaactatttggaaattccagtggagcaactgatgctagaacctaatttgtcggtgcatagtcaaaaaagtacacagaatagtaaacaagggatctttcaattatggaattgtcctcttaatgaaggaagtaccatagagaagagggaattcaaaaaatcttcagtggaaactgg

SEQ ID NO: 132541 - DNA, 5152 bp, Homo sapiens
  Payload ID: 5888
  Gene Symbol: FAM217B
  Gene Name: family with sequence similarity 217, member B
  Uniprot ID: Q9NTX9
  ENST ID: ENST00000358293
  CDS Start-End: 416-1567
atcccccccacccccgccaacgctcgccggggtcgcccgaggcctgagccaagggggacgctgtgggcgcggctcaggccaggccctcagtgctctggctattgctgaaaacaccttctagttccaccttgtaactggactcccaaaagatgaatgctgacatcttctgatgcttaacaagaaataaaaatagtcaccttaatcatcaaaaagttccggtggtgaggagacctttccaaatataagaggaataaagaagtcacctccccagctgtcatcatcttccagcagattgagcaagaatattttgagcactacaggaaagacagtccatcaaacccgagatgatgatcagccacgtgattttttcaagaagaggaatagggtgaatgaatctcatcagaaaagcagcaatatgaatgctggcccatcttggaataaagtgcaacattcaaagaattcttcaggaaaaaggcagagtaaatcccaagtaccccacgcttcttcccagccgagaagcagcctcacagctgtcacccagcctactgaagaaaaacttaaagaaagcatttccccggaagcaagacgcaaaaggaatccactcggttccaggtgtcagggggcctcagggaataaactgtttcttgattttcagtcaatgaaaattattaaagagaatgctgatgaggacagtgcaagtgatctctctgattcggaaagaattcccattcctccttctcccctcacacctccagatctcaatcttcgagctgaagaaattgatccagtttactttgatcttcaccctggtcagggccatacaaaacctgaatactattatcctaatttccttccatcccctttcagctcctgggacctacgagatatggccctgcttctgaacgcagagaacaaaacggaagccgtgccccgagtgggaggacttcttgggaagtatatcgatagacttattcagcttgagtggctgcaagtccagactgtacagtgtgaaaaagcaaaggggggcaaagcaaggccccccactgcccctgggacctcaggggcactgaaaagccctgggagaagtaagctaattgctagtgctctgtccaagccactacctcaccaggaaggggcttcaaagtcaggcccttcccgaaagaaagcttttcaccatgaagaaatccacccatcacattatgcatttgagacttcccctagacccattgatgtgcttggtggtaccaggttttgttctcagaggcaaacccttgaaatgaggacagaagaaaagaaaaagaaatcaagtaagagtacgaagctgcagcgctgggatctgtccggcagtggaagcagctctaaggtggaaaccagcggtcacattcgagttcccaaacaggcagctgtgattctggactcagcagattcctgtaaggcctccaaaacacaagcacatgcacatcctaggaaaaagggaaaggcagagagctgtggtcatgccactgtatcgagtgagaaaaaactgaaaacaaacggagtaaagcaaaacacatataaactaaaataaatatctaaaatgctgaattgccaagacctgcaggtacctcaatgttagagcgcttccaaaagtcaaaatactgtgaattttaaggaattttacaaatactgacatttaagtagttgactggcatttttgtccacctttatttctaccctgagtggggttattttcaaagggaagtgtctttcaataagcctttctttgtattgtcagtcttaggcaaatgagagccctttagataaaaattatgtaaaatatgtgccatataaaggaataaaatggcacctctccagggaaagtgtcagtgaaacctcagctacagtagccggtctgtgtagagcagctagtggtgttacctccccattttcacatgcacgtaagtatatgaaatagtgcagactgtttcaaatggtgtggaatcctaaatgtttaaaataaggtccttcttgcccactccctcgcttacttttttataaactcctcaagcaaaatttctgttcattttacccttaggagaagctttagttcttcctcaagtcagggagtagtgagtttgtattttgagtagtcatttctcactaagctggttgctttctagagagacagtggaatctagtactttaatacattttctctgacatggttttttttttcttttttgaggggcattttaaacttagaggtggtggtaaaacctacttttgagttctccgaactgaggttaaaataacttgcagaattttccaaagtcaatgggcttagcatgattactgctgtttggtggggctgagaatgaaatatttgacattctggaattgctggcatgtaaagcttctccagagaggcaccccagggaaatcactctttacaatttgtaaaggaagggcctgtaaaaggatcaaaacacatggacctacattcagtgtaatagttacaaagttactgatttgggttccacaccctgtggtccttagtcaaaaataatgatctgtttcagtttgcaagagcaggattttattattttgcttggggtgaggggcgggagagtggaatatgagtaaggttgctgaatgaattctaaactcgcttatctggtcttcaggcttcccaactctctccaagccttcttatttcactgcagttaaataacatcttcttgttcctatagttgtgctgtgagttttctgttcatatttgcgcagtgtattttaatacggcccatgtcattatagttgattttatccctttaaacaattactgtatttgtttttgacgtagaggtttcaattttttcaccttgggggcaaatgaaaaacttggcatttttcatttgggaacatataatagcttgtaaacttttcagacagcagtaaatgtctgaaaaaatatcaaaaacagcataaagacaagattatgtagctctaattatacgtatataattataaaaaacaatgtgcaagggttatattttaaggtcttttaaaatctgattttgatcataccaaatgacataatattttttatggtagccttttactttcaagacttaattttcagacttgtacaagttccttcttacattctttccctctcacaccatcctactggagaaagcatacttttatgctaagatcttactttaagctttttatgtgaacaaaagatgtacatatagtaagtattacttccgtagtcctcaaatttactataacttttgtacttagtatatgttttatatttggaaaacagcactacgcttagttttcctgtagttcctgagtgatgtctgtgtgttccttgcctgcccttttttgtgagcacagattagtctgttatccatggctggcacttcacttatgatcctttctctgctagatttttatgcagctctctatgaagtttcatggcccatagatattcaaaagcaagatattctatacatatgtgtatatgtatatatactccttatgttaatactaaagtgtttatgctgagttgctgcctttccccgtcatgtatccatgtgcatgctcttagagaccttgaatggttgagggtaaagtgatttattagtaattctacttgccttgtgtatgtctgagctgaaaacaatcgtgattaagaaatttagaggtggctgggcgtggtggctcacgcctgtaatcccagcactttgggaggccgaggcaggcggatcacctgaggtcgggagttcaagaccagcctgaccaacatggagaaaccctgtctccactaaaaatacaaaattagccgggtgtggtggtgcatgcctgtaatcccagctactcggaagtttgagacgagaatctcttgaacccgggaggcggaggttgtggtgagccaagatcgtgccattgcactccagcctgggcaacaagagggaaactccgtttcaaaaaaaaaagaaaaagaaagaaattgagaagtaacgcctcataatatttgttcccagctttttaaattgaagctggttgcataatctggggaatagtcataatttcatgtgttatacagtttaaaaagcctgcaaaagtgactttgcttgtttactttctgcctcagattgactattttaaccaatattgtcacgactagatcatagctcctagtgaataacatgaggtgttttaaagttaggtctattacagaattaacataagcacaattttaattttatgatatctgatatgcctatctaatacatcttaatgcattaaatgctgcagataagaatcttgctatttttcaagtagacaacattagaaagttgaatcatgaactcattcaattcatcaagtcaaaagcactgagtgttttgctagtctagtgacatgggttattgtatttccgagaagtgcctctcatttctggggagttgtttacatataccctgcatttaaaccaattaaaacaatccaagtttctttaaaaaaaaaaagaaaaagaaaaagaaaaagaaaaatattttaggcttagaattatctaatggaaaaaatgtaaaaaagtacaaaaatgaactaaaagtatatcagtatttgcagtatttgctgtgattacttaggtttagactttctcaacttcttagatgactaaatgggctgaagacttgtaactaacttgaataggatagacttcataccctgtgacaaaaaggatggggaagagaatatcattggtcttgccatatacctcctagctaaaaggaaaatggtttgtagttgttcttgggcctactgtgttgcttttcagaaggacataagactttctactttatctgatatggatatcgtctacttcctcattcctttatgctcacttatggagtagttacatagaaatataactcttggtggtactgtattttaaggtaattcagaagcagtatgtattatttatgtacatgtacaggacaccattcaaaatggcttgaaaatattcagcatgtttgttatttgctgttatattgtatgtttagttttgtatgtgataaacagaattgatgtaagtttttgtggacttgaatttctccttccttgagatcaattaaacagcagaaaaatattgtctgga

SEQ ID NO: 132542 - DNA, 5036 bp, Homo sapiens
  Payload ID: 5888
  Gene Symbol: FAM217B
  Gene Name: family with sequence similarity 217, member B
  Uniprot ID: Q9NTX9
  ENST ID: ENST00000360816
  CDS Start-End: 300-1451
ctgccgcagcgcgccgcagccgggcgtccccgcgcgggcgccggagaggaaggaaggctggcagcctcgtcacgtgtccgctgcagtcgcgaaacagttccggtggtgaggagacctttccaaatataagaggaataaagaagtcacctccccagctgtcatcatcttccagcagattgagcaagaatattttgagcactacaggaaagacagtccatcaaacccgagatgatgatcagccacgtgattttttcaagaagaggaatagggtgaatgaatctcatcagaaaagcagcaatatgaatgctggcccatcttggaataaagtgcaacattcaaagaattcttcaggaaaaaggcagagtaaatcccaagtaccccacgcttcttcccagccgagaagcagcctcacagctgtcacccagcctactgaagaaaaacttaaagaaagcatttccccggaagcaagacgcaaaaggaatccactcggttccaggtgtcagggggcctcagggaataaactgtttcttgattttcagtcaatgaaaattattaaagagaatgctgatgaggacagtgcaagtgatctctctgattcggaaagaattcccattcctccttctcccctcacacctccagatctcaatcttcgagctgaagaaattgatccagtttactttgatcttcaccctggtcagggccatacaaaacctgaatactattatcctaatttccttccatcccctttcagctcctgggacctacgagatatggccctgcttctgaacgcagagaacaaaacggaagccgtgccccgagtgggaggacttcttgggaagtatatcgatagacttattcagcttgagtggctgcaagtccagactgtacagtgtgaaaaagcaaaggggggcaaagcaaggccccccactgcccctgggacctcaggggcactgaaaagccctgggagaagtaagctaattgctagtgctctgtccaagccactacctcaccaggaaggggcttcaaagtcaggcccttcccgaaagaaagcttttcaccatgaagaaatccacccatcacattatgcatttgagacttcccctagacccattgatgtgcttggtggtaccaggttttgttctcagaggcaaacccttgaaatgaggacagaagaaaagaaaaagaaatcaagtaagagtacgaagctgcagcgctgggatctgtccggcagtggaagcagctctaaggtggaaaccagcggtcacattcgagttcccaaacaggcagctgtgattctggactcagcagattcctgtaaggcctccaaaacacaagcacatgcacatcctaggaaaaagggaaaggcagagagctgtggtcatgccactgtatcgagtgagaaaaaactgaaaacaaacggagtaaagcaaaacacatataaactaaaataaatatctaaaatgctgaattgccaagacctgcaggtacctcaatgttagagcgcttccaaaagtcaaaatactgtgaattttaaggaattttacaaatactgacatttaagtagttgactggcatttttgtccacctttatttctaccctgagtggggttattttcaaagggaagtgtctttcaataagcctttctttgtattgtcagtcttaggcaaatgagagccctttagataaaaattatgtaaaatatgtgccatataaaggaataaaatggcacctctccagggaaagtgtcagtgaaacctcagctacagtagccggtctgtgtagagcagctagtggtgttacctccccattttcacatgcacgtaagtatatgaaatagtgcagactgtttcaaatggtgtggaatcctaaatgtttaaaataaggtccttcttgcccactccctcgcttacttttttataaactcctcaagcaaaatttctgttcattttacccttaggagaagctttagttcttcctcaagtcagggagtagtgagtttgtattttgagtagtcatttctcactaagctggttgctttctagagagacagtggaatctagtactttaatacattttctctgacatggttttttttttcttttttgaggggcattttaaacttagaggtggtggtaaaacctacttttgagttctccgaactgaggttaaaataacttgcagaattttccaaagtcaatgggcttagcatgattactgctgtttggtggggctgagaatgaaatatttgacattctggaattgctggcatgtaaagcttctccagagaggcaccccagggaaatcactctttacaatttgtaaaggaagggcctgtaaaaggatcaaaacacatggacctacattcagtgtaatagttacaaagttactgatttgggttccacaccctgtggtccttagtcaaaaataatgatctgtttcagtttgcaagagcaggattttattattttgcttggggtgaggggcgggagagtggaatatgagtaaggttgctgaatgaattctaaactcgcttatctggtcttcaggcttcccaactctctccaagccttcttatttcactgcagttaaataacatcttcttgttcctatagttgtgctgtgagttttctgttcatatttgcgcagtgtattttaatacggcccatgtcattatagttgattttatccctttaaacaattactgtatttgtttttgacgtagaggtttcaattttttcaccttgggggcaaatgaaaaacttggcatttttcatttgggaacatataatagcttgtaaacttttcagacagcagtaaatgtctgaaaaaatatcaaaaacagcataaagacaagattatgtagctctaattatacgtatataattataaaaaacaatgtgcaagggttatattttaaggtcttttaaaatctgattttgatcataccaaatgacataatattttttatggtagccttttactttcaagacttaattttcagacttgtacaagttccttcttacattctttccctctcacaccatcctactggagaaagcatacttttatgctaagatcttactttaagctttttatgtgaacaaaagatgtacatatagtaagtattacttccgtagtcctcaaatttactataacttttgtacttagtatatgttttatatttggaaaacagcactacgcttagttttcctgtagttcctgagtgatgtctgtgtgttccttgcctgcccttttttgtgagcacagattagtctgttatccatggctggcacttcacttatgatcctttctctgctagatttttatgcagctctctatgaagtttcatggcccatagatattcaaaagcaagatattctatacatatgtgtatatgtatatatactccttatgttaatactaaagtgtttatgctgagttgctgcctttccccgtcatgtatccatgtgcatgctcttagagaccttgaatggttgagggtaaagtgatttattagtaattctacttgccttgtgtatgtctgagctgaaaacaatcgtgattaagaaatttagaggtggctgggcgtggtggctcacgcctgtaatcccagcactttgggaggccgaggcaggcggatcacctgaggtcgggagttcaagaccagcctgaccaacatggagaaaccctgtctccactaaaaatacaaaattagccgggtgtggtggtgcatgcctgtaatcccagctactcggaagtttgagacgagaatctcttgaacccgggaggcggaggttgtggtgagccaagatcgtgccattgcactccagcctgggcaacaagagggaaactccgtttcaaaaaaaaaagaaaaagaaagaaattgagaagtaacgcctcataatatttgttcccagctttttaaattgaagctggttgcataatctggggaatagtcataatttcatgtgttatacagtttaaaaagcctgcaaaagtgactttgcttgtttactttctgcctcagattgactattttaaccaatattgtcacgactagatcatagctcctagtgaataacatgaggtgttttaaagttaggtctattacagaattaacataagcacaattttaattttatgatatctgatatgcctatctaatacatcttaatgcattaaatgctgcagataagaatcttgctatttttcaagtagacaacattagaaagttgaatcatgaactcattcaattcatcaagtcaaaagcactgagtgttttgctagtctagtgacatgggttattgtatttccgagaagtgcctctcatttctggggagttgtttacatataccctgcatttaaaccaattaaaacaatccaagtttctttaaaaaaaaaaagaaaaagaaaaagaaaaagaaaaatattttaggcttagaattatctaatggaaaaaatgtaaaaaagtacaaaaatgaactaaaagtatatcagtatttgcagtatttgctgtgattacttaggtttagactttctcaacttcttagatgactaaatgggctgaagacttgtaactaacttgaataggatagacttcataccctgtgacaaaaaggatggggaagagaatatcattggtcttgccatatacctcctagctaaaaggaaaatggtttgtagttgttcttgggcctactgtgttgcttttcagaaggacataagactttctactttatctgatatggatatcgtctacttcctcattcctttatgctcacttatggagtagttacatagaaatataactcttggtggtactgtattttaaggtaattcagaagcagtatgtattatttatgtacatgtacaggacaccattcaaaatggcttgaaaatattcagcatgtttgttatttgctgttatattgtatgtttagttttgtatgtgataaacagaattgatgtaagtttttgtggacttgaatttctccttccttgagatcaattaaacagcagaaaaatattgtctgga

SEQ ID NO: 132543 - DNA, 419 bp, Homo sapiens
  Payload ID: 5888
  Gene Symbol: FAM217B
  Gene Name: family with sequence similarity 217, member B
  ENST ID: ENST00000421092
  CDS Start-End: 277-419
tgaaaaaccaacccgatactggtggtaggaccatttgcaatcaatagttactgacagtattctgttgcttctagttccggtggtgaggagacctttccaaatataagaggaataaagaagtcacctccccagctgtcatcatcttccagcagattgagcaagaatattttgagcactacaggaaagacagtccatcaaacccgagatgatgatcagccacgtgattttttcaagaagaggaatagggtgaatgaatctcatcagaaaagcagcaatatgaatgctggcccatcttggaataaagtgcaacattcaaagaattcttcaggaaaaaggcagagtaaatcccaagtaccccacgcttcttcccagccgagaagcagcctcacagctgtcacccagcctactgaagaaaaact

SEQ ID NO: 132544 - DNA, 2175 bp, Homo sapiens
  Payload ID: 5889
  Gene Symbol: FAM218A
  Gene Name: family with sequence similarity 218, member A
  Uniprot ID: Q96MZ4
  ENST ID: ENST00000513876
  CDS Start-End: 76-549
gcttcgacttccgggtgagaccgtgaaggtgtggcgcgacgttggagaccggggcagcgccatgtaccacagtggatggaaggatgcgcggtgcggcggggcagctgtcctcttctccccggacccagcgcctggagagccagccctgcagggtgggctgggcgagccaaactgcgttcctggtgcagggcttcgggtctccctaacagaccttatacgctgaccggcggccgccatggcagtgtctctttgctcagacatccagggacgaccacattcgtccaacagcggtcgctccaccaatcctgggagaagcgaatcgttttctccgcgtgccctgtcagccgctcatggtgcccagagaggaattttagtggcagcattccggctgtcacgccaccgaaattgccaggccactccaagtcagaaggaccaccaggaaaagtcaggaagagaaccaccatcaggtcccagcctctttttgtgacaaggactagagggtttgggtctgcagtgggctggctcccgctgggctcacctgtcctatagagcaggctgcctcaaggaagaagctcacaggggacatctgacatctgaaacagcaagtgtaaaatgctttaaataagccaaaactaaaccaatcgttatgttaactaaaaatacatgaatgctaccgaagatagtcgaatattagaggaagagattaaactctgattttgagcactttgtgctttattcggaaaatgaataagatgcagttctgaaaacctgaaaatataaagaataggatatgatacgcacactagatgaaaacaaaactttcagaccatattttcttatttaaagctctaataagtgagatagcagagtaaactattcactcaaataattagtaactgatataagggtatgtatcaataacaggtattaagacaaaaactttatgagcttttccattttaacaagggatgatgattctagacttctgccacaacattatggtcgacaaaacattcttaattcattttacatagatctgactctagattctgaaacagcaagtcataatcttgtatctctaaagatagaatacagtgcgatttggaaagacaccacaaaaactcatgatccaaaaaagattaaggctgttattaccaggaggaagagaaagaggacaaaatcaaactggatagatataatagagttgtttgttagaattgtcttcccaggagatggaaaaagacgccatcacaataggattcatgctttagttttcagctatagaaatgtaataactttgccaaagtaattacactacatagagtggcaatcgttctattaaaagtaagacccagtaatgttaggatttgttctggacaatgaaggggatgaggtttaatcttatgacttgaatgccaggtctgaaatcttttcttcaagtgatatttttatgaaactacttaggctgtgtttcacactgggtatgatttctaacctcttataacctgtacagtaatagattatgaaggatgaattatttgaaagctattttgtattatttaggagaggagctcttcaattctgaattgtctgccacttacaagcagaagaaagtttttttctttcattattttagcaactatcaataaaacagtattagaaatgcctactcttcagagatgtaatgggaataaattgtaaagtacttttgatattctaagatgaaagatggtattacacagtcaataattcaatgcttcccacattatgaattttatcaaaattatgtagagagctattagttcattccagcaacaaaacaggcttatataaaaacaaaaacctcctgggtcatgccatcctacaccaaattcctgttaaacagaggcatgatttattccagtgaccttgctatttcttcataactgtaatatgtctaatgttagacattttaaattaacattctattagataaactgagaatttaggtctctcgcaccacccaggcacatactctatctttccccacaaatatccaaatatggtaatataattggattaatacgttcatatgactatataattgttcacagctgagccacttaggtgctataattataatttctttgatacacaaattttgttttattgtgattaaaattgcctgatttctta

SEQ ID NO: 132545 - DNA, 3588 bp, Homo sapiens
  Payload ID: 5890
  Gene Symbol: FAM219A
  Gene Name: family with sequence similarity 219, member A
  Uniprot ID: Q8IW50
  ENST ID: ENST00000297620
  CDS Start-End: 308-814
gagtcaccgcagtggctgagctgctgacaggaggcggcagcggagtaggaggcgaggcaagacctgcggctcggcccggccacagccgcggtagtgctaggcaagcccacggagtcacgccggcctcagccagtctgcgaacctctcgcccccgcccacccctgcatccgcccggcccctgcccgcccgagtggtccggggaggcctagtctgcaccacccgccgggctcctggggccgccgccccgcgcggtcctgtcggcgtccgcggccgcgcccggcccctggcccgctcgcccgccggcaccatgatggaggagatcgaccggttccaggtgcccaccgcgcactcggagatgcagccgctggacccagccgccgcctccatctctgacggagactgtgacgcccgggaggagaagcagcgggagctggcccggaagggctccctgaagaatggcagcatgggtagccctgtcaaccagcaacccaagaagaacaatgtcatggcccgaacaaggctggtcgtccccaataaaggctactcctcacttgaccagagccctgatgagaagccactggtagcccttgacacggacagcgatgatgactttgacatgtctagatactcctcctccggctactcctctgctgagcagatcaaccaagatttgaacatccagctgctgaaggacggctaccggttagatgagatccccgacgacgaggacctagacctcatcccccccaagtccgtgaaccccacgtgcatgtgctgccaggccacgtcctccaccgcctgccacattcagtagcgggcggggccactgcggtcgccggggcggggccgccaagggccgggtaggacgggcagaggccgaccccttcccagctcgtctgcctgcccccggccccgcgcccctacagccgccaacctcgtataacagtcattgcttcctcctatggtaggacgtgtacctctgtgtgttcatggagctggagaaaccaaaactgggtctctctccacccgggagctgaggaggggtgggggccgtttgttcagttacctgggggaacctcacccagcaccctgccccgcttcccagggctggccaagagagaagactggacggcagggaggtcaacattaacgagtggggggatcacaaagccaggggcttggccccaccccagcgaagccatgaactcccaagccccggcctcagcctaaccaggaaaggggctcggagggagaaaggcccagggcagtggggacgggtcccagcacctcggagcccccttcacacgccccctaccggcccatgtttctatttgcatttccccctcctcagatgggaagcctggcaaagctgcccaaccgggtagtgcccctcacccatcggatcactgccttcttcctcctcttgccccattcacccgcttccttgcactctgggagtggggcagggtaaggtgggccttacagacaggctgaggtttgggtggtgtgatctgtcctaattggcccctcaccaatgcatctatctgtctgccaccagcccaccccaccctgcccccaccctcacccacgcttctgctcattggtctcaatcccagcctggaagcagggagtaaggctggactccaatggcccattcccctcaccccagcccaagacgtgggaggctgcttcccagtaagaatccaggagcaagctttggtgaatccagtgggctgagtggctctatggatgtggttgtttggatgtggtagggagtgcttagcagaatgtgtgtgtatctctgaggctgtcagggggtgggtgggtgtgtgtctctgttggacctgtctctcctcagtctattcctgtcatagatgtgggtgtccctggtagggaagtgcctgtgtggtctgtttacagtgcagaaggcggctcagcagtgcaatgggctgacagccttggaccgggagtcagaagcctgggttctggttgtagctctggcccctccctgtgatcttcaacaagccacttgctttctctcgtcttcagtttcctcaactagaaaatgaacagcagctgaaattatgttgaagatccttttatacctgaaagagtttcttcatagaaatttctgtggtggggagggggcaatctctgtgtgtctcagtatacctaaaggttggggtggggcggagttgtgtgtctctgtagaaaggcgaaggggcagttcctatcaggactgtgtatgtctgagcacatgtggctctgtttgggattacgtgtttgtctgtgaatgtgtgtgtgtgttggagggttgtctattgtgtgtggctgtatagggtgtctgtagatcaagatgtgtatacagctgcttctgctattgctggtttgggggaggggactggaaagctgagactgaaaatcaagagggaagaggtgaggaaggcccacccctggggctgggcagtgtagacctgccaccgtgtgaagaaaaatgaaagcacagatagcctaagactgcacaggcctgtgcccacataccttatagcacaggcccaggtggatcatctcatgctaacaccccacatgtgctggtggatccactcccatggatccactcacatgctgcaggcatgcagtagactcacccacagcccactctctggacaccaatcctgggaggtgggagctggaatggggagcaatgagaggagggagtgagactgttggcttaggaagggtggtacctctccctgcatcatacccaggaactgccagctccaaaatattggggtacagctcaccaccccccactccgccaacccattcctacctcctctagtgcagggacccaagttagatgatgagaaaatgccaaacaaagggaggcaaggacagagaaggtacctgcaggacccacaaggcccatactggcccccatctgaacccacctctcccacccagatcaacatccccccaacccctgtgcccccatcatctggaccccagagccagccctcccactaccaccaccaccaccccggggctccttggctcacctttctagaacatgggtacctcctctttttgggggctcatttagactgctgcctttgctgctgacttgcagtgtgactcgggcccattgttcaatctctgtggccctgagacaccagggaaaatctccccccccacaggacatactagttccctggcaggcaagggcttccaactgaggcagtgcatgtgtggcagagagaggcaggaagctggcagtggcagcttctgtgtctagggaggggtgtggctccctccttccctgtctgggaggttggagggaagaatctaggccttagcttgccctcctgccacccttccccttgtagatactgccttaacactccctcctctctcagctgtggctgccacccagccaggtttctccgtgctcactaatttatttccaggaaggtgtgtggaagacatgagccgtgtataatattttttttaacattttcattgcagtattgaccatcatccttggttgtgtatcgtgtaacacaaataatgatattaaaagcatcaaac

SEQ ID NO: 132546 - DNA, 770 bp, Homo sapiens
  Payload ID: 5890
  Gene Symbol: FAM219A
  Gene Name: family with sequence similarity 219, member A
  ENST ID: ENST00000379078
  CDS Start-End: 293-763
agctgctgacaggaggcggcagcggagtaggaggcgaggcaagacctgcggctcggcccggccacagccgcggtagtgctaggcaagcccacggagtcacgccggcctcagccagtctgcgaacctctcgcccccgcccacccctgcatccgcccggcccctgcccgcccgagtggtccggggaggcctagtctgcaccacccgccgggctcctggggccgccgccccgcgcggtcctgtcggcgtccgcggccgcgcccggcccctggcccgctcgcccgccggcaccatgatggaggagatcgaccggttccaggtgcccaccgcgcactcggagatgcagccgctggacccagccgccgcctccatctctgacggagactgtgacgcccgggagggtgagtcagtagccatgaattacaaaccatccccgctccaagtgaagctggagaagcagcgggagctggcccggaagggctccctgaagaatggcagcatgggtagccctgtcaaccagcaacccaagaagaacaatgtcatggcccgaacaaggctggtcgtccccaataaaggctactcctcacttgaccagagccctgatgagaagccactggtagcccttgacacggacaggtgtgtatgggggcttgggggtagctgggcagcccaaaggaacctgtatagcacaagtgggctgtacaggccacacctgctatattgtcagaattgggatattcttcagccagaatctctccaagggtgaattctcc

SEQ ID NO: 132547 - DNA, 3591 bp, Homo sapiens
  Payload ID: 5890
  Gene Symbol: FAM219A
  Gene Name: family with sequence similarity 219, member A
  ENST ID: ENST00000379080
  CDS Start-End: 293-811
agctgctgacaggaggcggcagcggagtaggaggcgaggcaagacctgcggctcggcccggccacagccgcggtagtgctaggcaagcccacggagtcacgccggcctcagccagtctgcgaacctctcgcccccgcccacccctgcatccgcccggcccctgcccgcccgagtggtccggggaggcctagtctgcaccacccgccgggctcctggggccgccgccccgcgcggtcctgtcggcgtccgcggccgcgcccggcccctggcccgctcgcccgccggcaccatgatggaggagatcgaccggttccaggacccagccgccgcctccatctctgacggagactgtgacgcccgggagggtgagtcagtagccatgaattacaaaccatccccgctccaagtgaagctggagaagcagcgggagctggcccggaagggctccctgaagaatggcagcatgggtagccctgtcaaccagcaacccaagaagaacaatgtcatggcccgaacaaggctggtcgtccccaataaaggctactcctcacttgaccagagccctgatgagaagccactggtagcccttgacacggacagcgatgatgactttgacatgtctagatactcctcctccggctactcctctgctgagatcaaccaagatttgaacatccagctgctgaaggacggctaccggttagatgagatccccgacgacgaggacctagacctcatcccccccaagtccgtgaaccccacgtgcatgtgctgccaggccacgtcctccaccgcctgccacattcagtagcgggcggggccactgcggtcgccggggcggggccgccaagggccgggtaggacgggcagaggccgaccccttcccagctcgtctgcctgcccccggccccgcgcccctacagccgccaacctcgtataacagtcattgcttcctcctatggtaggacgtgtacctctgtgtgttcatggagctggagaaaccaaaactgggtctctctccacccgggagctgaggaggggtgggggccgtttgttcagttacctgggggaacctcacccagcaccctgccccgcttcccagggctggccaagagagaagactggacggcagggaggtcaacattaacgagtggggggatcacaaagccaggggcttggccccaccccagcgaagccatgaactcccaagccccggcctcagcctaaccaggaaaggggctcggagggagaaaggcccagggcagtggggacgggtcccagcacctcggagcccccttcacacgccccctaccggcccatgtttctatttgcatttccccctcctcagatgggaagcctggcaaagctgcccaaccgggtagtgcccctcacccatcggatcactgccttcttcctcctcttgccccattcacccgcttccttgcactctgggagtggggcagggtaaggtgggccttacagacaggctgaggtttgggtggtgtgatctgtcctaattggcccctcaccaatgcatctatctgtctgccaccagcccaccccaccctgcccccaccctcacccacgcttctgctcattggtctcaatcccagcctggaagcagggagtaaggctggactccaatggcccattcccctcaccccagcccaagacgtgggaggctgcttcccagtaagaatccaggagcaagctttggtgaatccagtgggctgagtggctctatggatgtggttgtttggatgtggtagggagtgcttagcagaatgtgtgtgtatctctgaggctgtcagggggtgggtgggtgtgtgtctctgttggacctgtctctcctcagtctattcctgtcatagatgtgggtgtccctggtagggaagtgcctgtgtggtctgtttacagtgcagaaggcggctcagcagtgcaatgggctgacagccttggaccgggagtcagaagcctgggttctggttgtagctctggcccctccctgtgatcttcaacaagccacttgctttctctcgtcttcagtttcctcaactagaaaatgaacagcagctgaaattatgttgaagatccttttatacctgaaagagtttcttcatagaaatttctgtggtggggagggggcaatctctgtgtgtctcagtatacctaaaggttggggtggggcggagttgtgtgtctctgtagaaaggcgaaggggcagttcctatcaggactgtgtatgtctgagcacatgtggctctgtttgggattacgtgtttgtctgtgaatgtgtgtgtgtgttggagggttgtctattgtgtgtggctgtatagggtgtctgtagatcaagatgtgtatacagctgcttctgctattgctggtttgggggaggggactggaaagctgagactgaaaatcaagagggaagaggtgaggaaggcccacccctggggctgggcagtgtagacctgccaccgtgtgaagaaaaatgaaagcacagatagcctaagactgcacaggcctgtgcccacataccttatagcacaggcccaggtggatcatctcatgctaacaccccacatgtgctggtggatccactcccatggatccactcacatgctgcaggcatgcagtagactcacccacagcccactctctggacaccaatcctgggaggtgggagctggaatggggagcaatgagaggagggagtgagactgttggcttaggaagggtggtacctctccctgcatcatacccaggaactgccagctccaaaatattggggtacagctcaccaccccccactccgccaacccattcctacctcctctagtgcagggacccaagttagatgatgagaaaatgccaaacaaagggaggcaaggacagagaaggtacctgcaggacccacaaggcccatactggcccccatctgaacccacctctcccacccagatcaacatccccccaacccctgtgcccccatcatctggaccccagagccagccctcccactaccaccaccaccaccccggggctccttggctcacctttctagaacatgggtacctcctctttttgggggctcatttagactgctgcctttgctgctgacttgcagtgtgactcgggcccattgttcaatctctgtggccctgagacaccagggaaaatctccccccccacaggacatactagttccctggcaggcaagggcttccaactgaggcagtgcatgtgtggcagagagaggcaggaagctggcagtggcagcttctgtgtctagggaggggtgtggctccctccttccctgtctgggaggttggagggaagaatctaggccttagcttgccctcctgccacccttccccttgtagatactgccttaacactccctcctctctcagctgtggctgccacccagccaggtttctccgtgctcactaatttatttccaggaaggtgtgtggaagacatgagccgtgtataatattttttttaacattttcattgcagtattgaccatcatccttggttgtgtatcgtgtaacacaaataatgatattaaaagcatcaaacaagcca

SEQ ID NO: 132548 - DNA, 3543 bp, Homo sapiens
  Payload ID: 5890
  Gene Symbol: FAM219A
  Gene Name: family with sequence similarity 219, member A
  ENST ID: ENST00000379081
  CDS Start-End: 293-763
agctgctgacaggaggcggcagcggagtaggaggcgaggcaagacctgcggctcggcccggccacagccgcggtagtgctaggcaagcccacggagtcacgccggcctcagccagtctgcgaacctctcgcccccgcccacccctgcatccgcccggcccctgcccgcccgagtggtccggggaggcctagtctgcaccacccgccgggctcctggggccgccgccccgcgcggtcctgtcggcgtccgcggccgcgcccggcccctggcccgctcgcccgccggcaccatgatggaggagatcgaccggttccaggacccagccgccgcctccatctctgacggagactgtgacgcccgggaggagaagcagcgggagctggcccggaagggctccctgaagaatggcagcatgggtagccctgtcaaccagcaacccaagaagaacaatgtcatggcccgaacaaggctggtcgtccccaataaaggctactcctcacttgaccagagccctgatgagaagccactggtagcccttgacacggacagcgatgatgactttgacatgtctagatactcctcctccggctactcctctgctgagcagatcaaccaagatttgaacatccagctgctgaaggacggctaccggttagatgagatccccgacgacgaggacctagacctcatcccccccaagtccgtgaaccccacgtgcatgtgctgccaggccacgtcctccaccgcctgccacattcagtagcgggcggggccactgcggtcgccggggcggggccgccaagggccgggtaggacgggcagaggccgaccccttcccagctcgtctgcctgcccccggccccgcgcccctacagccgccaacctcgtataacagtcattgcttcctcctatggtaggacgtgtacctctgtgtgttcatggagctggagaaaccaaaactgggtctctctccacccgggagctgaggaggggtgggggccgtttgttcagttacctgggggaacctcacccagcaccctgccccgcttcccagggctggccaagagagaagactggacggcagggaggtcaacattaacgagtggggggatcacaaagccaggggcttggccccaccccagcgaagccatgaactcccaagccccggcctcagcctaaccaggaaaggggctcggagggagaaaggcccagggcagtggggacgggtcccagcacctcggagcccccttcacacgccccctaccggcccatgtttctatttgcatttccccctcctcagatgggaagcctggcaaagctgcccaaccgggtagtgcccctcacccatcggatcactgccttcttcctcctcttgccccattcacccgcttccttgcactctgggagtggggcagggtaaggtgggccttacagacaggctgaggtttgggtggtgtgatctgtcctaattggcccctcaccaatgcatctatctgtctgccaccagcccaccccaccctgcccccaccctcacccacgcttctgctcattggtctcaatcccagcctggaagcagggagtaaggctggactccaatggcccattcccctcaccccagcccaagacgtgggaggctgcttcccagtaagaatccaggagcaagctttggtgaatccagtgggctgagtggctctatggatgtggttgtttggatgtggtagggagtgcttagcagaatgtgtgtgtatctctgaggctgtcagggggtgggtgggtgtgtgtctctgttggacctgtctctcctcagtctattcctgtcatagatgtgggtgtccctggtagggaagtgcctgtgtggtctgtttacagtgcagaaggcggctcagcagtgcaatgggctgacagccttggaccgggagtcagaagcctgggttctggttgtagctctggcccctccctgtgatcttcaacaagccacttgctttctctcgtcttcagtttcctcaactagaaaatgaacagcagctgaaattatgttgaagatccttttatacctgaaagagtttcttcatagaaatttctgtggtggggagggggcaatctctgtgtgtctcagtatacctaaaggttggggtggggcggagttgtgtgtctctgtagaaaggcgaaggggcagttcctatcaggactgtgtatgtctgagcacatgtggctctgtttgggattacgtgtttgtctgtgaatgtgtgtgtgtgttggagggttgtctattgtgtgtggctgtatagggtgtctgtagatcaagatgtgtatacagctgcttctgctattgctggtttgggggaggggactggaaagctgagactgaaaatcaagagggaagaggtgaggaaggcccacccctggggctgggcagtgtagacctgccaccgtgtgaagaaaaatgaaagcacagatagcctaagactgcacaggcctgtgcccacataccttatagcacaggcccaggtggatcatctcatgctaacaccccacatgtgctggtggatccactcccatggatccactcacatgctgcaggcatgcagtagactcacccacagcccactctctggacaccaatcctgggaggtgggagctggaatggggagcaatgagaggagggagtgagactgttggcttaggaagggtggtacctctccctgcatcatacccaggaactgccagctccaaaatattggggtacagctcaccaccccccactccgccaacccattcctacctcctctagtgcagggacccaagttagatgatgagaaaatgccaaacaaagggaggcaaggacagagaaggtacctgcaggacccacaaggcccatactggcccccatctgaacccacctctcccacccagatcaacatccccccaacccctgtgcccccatcatctggaccccagagccagccctcccactaccaccaccaccaccccggggctccttggctcacctttctagaacatgggtacctcctctttttgggggctcatttagactgctgcctttgctgctgacttgcagtgtgactcgggcccattgttcaatctctgtggccctgagacaccagggaaaatctccccccccacaggacatactagttccctggcaggcaagggcttccaactgaggcagtgcatgtgtggcagagagaggcaggaagctggcagtggcagcttctgtgtctagggaggggtgtggctccctccttccctgtctgggaggttggagggaagaatctaggccttagcttgccctcctgccacccttccccttgtagatactgccttaacactccctcctctctcagctgtggctgccacccagccaggtttctccgtgctcactaatttatttccaggaaggtgtgtggaagacatgagccgtgtataatattttttttaacattttcattgcagtattgaccatcatccttggttgtgtatcgtgtaacacaaataatgatattaaaagcatcaaacaagcca

SEQ ID NO: 132549 - DNA, 893 bp, Homo sapiens
  Payload ID: 5890
  Gene Symbol: FAM219A
  Gene Name: family with sequence similarity 219, member A
  ENST ID: ENST00000379084
  CDS Start-End: 293-787
agctgctgacaggaggcggcagcggagtaggaggcgaggcaagacctgcggctcggcccggccacagccgcggtagtgctaggcaagcccacggagtcacgccggcctcagccagtctgcgaacctctcgcccccgcccacccctgcatccgcccggcccctgcccgcccgagtggtccggggaggcctagtctgcaccacccgccgggctcctggggccgccgccccgcgcggtcctgtcggcgtccgcggccgcgcccggcccctggcccgctcgcccgccggcaccatgatggaggagatcgaccggttccaggtgcccaccgcgcactcggagatgcagccgctggacccagccgccgcctccatctctgacggagactgtgacgcccgggaggagaagcagcgggagctggcccggaagggctccctgaagaatggcagcatgggtagccctgtcaaccagcaacccaagaagaacaatgtcatggcccgaacaaggctggtcgtccccaataaaggctactcctcacttgaccagagccctgatgagaagccactggtagcccttgacacggacagcgatgatgactttgacatgtctagatactcctcctccggctactcctctgctgagcagatcaaccaagatttgaacatccagctgctgaaggacggctaccggttagatgagatccccgacgacgaggacctagacctcatcccccccaaccaggtttctccgtgctcactaatttatttccaggaaggtgtgtggaagacatgagccgtgtataatattttttttaacattttcattgcagtattgaccatcatccttggttgtgtatcgtgtaacacaaataatgatattaaaagcatcaaacaagcca

SEQ ID NO: 132550 - DNA, 3573 bp, Homo sapiens
  Payload ID: 5890
  Gene Symbol: FAM219A
  Gene Name: family with sequence similarity 219, member A
  ENST ID: ENST00000379087
  CDS Start-End: 293-793
agctgctgacaggaggcggcagcggagtaggaggcgaggcaagacctgcggctcggcccggccacagccgcggtagtgctaggcaagcccacggagtcacgccggcctcagccagtctgcgaacctctcgcccccgcccacccctgcatccgcccggcccctgcccgcccgagtggtccggggaggcctagtctgcaccacccgccgggctcctggggccgccgccccgcgcggtcctgtcggcgtccgcggccgcgcccggcccctggcccgctcgcccgccggcaccatgatggaggagatcgaccggttccaggtgcccaccgcgcactcggagatgcagccgctggacccagccgccgcctccatctctgacggagactgtgacgcccgggaggagaagcagcgggagctggcccggaagggctccctgaagaatggcagcatgggtagccctgtcaaccagcaacccaagaagaacaatgtcatggcccgaacaaggctggtcgtccccaataaaggctactcctcacttgaccagagccctgatgagaagccactggtagcccttgacacggacagcgatgatgactttgacatgtctagatactcctcctccggctactcctctgctgagatcaaccaagatttgaacatccagctgctgaaggacggctaccggttagatgagatccccgacgacgaggacctagacctcatcccccccaagtccgtgaaccccacgtgcatgtgctgccaggccacgtcctccaccgcctgccacattcagtagcgggcggggccactgcggtcgccggggcggggccgccaagggccgggtaggacgggcagaggccgaccccttcccagctcgtctgcctgcccccggccccgcgcccctacagccgccaacctcgtataacagtcattgcttcctcctatggtaggacgtgtacctctgtgtgttcatggagctggagaaaccaaaactgggtctctctccacccgggagctgaggaggggtgggggccgtttgttcagttacctgggggaacctcacccagcaccctgccccgcttcccagggctggccaagagagaagactggacggcagggaggtcaacattaacgagtggggggatcacaaagccaggggcttggccccaccccagcgaagccatgaactcccaagccccggcctcagcctaaccaggaaaggggctcggagggagaaaggcccagggcagtggggacgggtcccagcacctcggagcccccttcacacgccccctaccggcccatgtttctatttgcatttccccctcctcagatgggaagcctggcaaagctgcccaaccgggtagtgcccctcacccatcggatcactgccttcttcctcctcttgccccattcacccgcttccttgcactctgggagtggggcagggtaaggtgggccttacagacaggctgaggtttgggtggtgtgatctgtcctaattggcccctcaccaatgcatctatctgtctgccaccagcccaccccaccctgcccccaccctcacccacgcttctgctcattggtctcaatcccagcctggaagcagggagtaaggctggactccaatggcccattcccctcaccccagcccaagacgtgggaggctgcttcccagtaagaatccaggagcaagctttggtgaatccagtgggctgagtggctctatggatgtggttgtttggatgtggtagggagtgcttagcagaatgtgtgtgtatctctgaggctgtcagggggtgggtgggtgtgtgtctctgttggacctgtctctcctcagtctattcctgtcatagatgtgggtgtccctggtagggaagtgcctgtgtggtctgtttacagtgcagaaggcggctcagcagtgcaatgggctgacagccttggaccgggagtcagaagcctgggttctggttgtagctctggcccctccctgtgatcttcaacaagccacttgctttctctcgtcttcagtttcctcaactagaaaatgaacagcagctgaaattatgttgaagatccttttatacctgaaagagtttcttcatagaaatttctgtggtggggagggggcaatctctgtgtgtctcagtatacctaaaggttggggtggggcggagttgtgtgtctctgtagaaaggcgaaggggcagttcctatcaggactgtgtatgtctgagcacatgtggctctgtttgggattacgtgtttgtctgtgaatgtgtgtgtgtgttggagggttgtctattgtgtgtggctgtatagggtgtctgtagatcaagatgtgtatacagctgcttctgctattgctggtttgggggaggggactggaaagctgagactgaaaatcaagagggaagaggtgaggaaggcccacccctggggctgggcagtgtagacctgccaccgtgtgaagaaaaatgaaagcacagatagcctaagactgcacaggcctgtgcccacataccttatagcacaggcccaggtggatcatctcatgctaacaccccacatgtgctggtggatccactcccatggatccactcacatgctgcaggcatgcagtagactcacccacagcccactctctggacaccaatcctgggaggtgggagctggaatggggagcaatgagaggagggagtgagactgttggcttaggaagggtggtacctctccctgcatcatacccaggaactgccagctccaaaatattggggtacagctcaccaccccccactccgccaacccattcctacctcctctagtgcagggacccaagttagatgatgagaaaatgccaaacaaagggaggcaaggacagagaaggtacctgcaggacccacaaggcccatactggcccccatctgaacccacctctcccacccagatcaacatccccccaacccctgtgcccccatcatctggaccccagagccagccctcccactaccaccaccaccaccccggggctccttggctcacctttctagaacatgggtacctcctctttttgggggctcatttagactgctgcctttgctgctgacttgcagtgtgactcgggcccattgttcaatctctgtggccctgagacaccagggaaaatctccccccccacaggacatactagttccctggcaggcaagggcttccaactgaggcagtgcatgtgtggcagagagaggcaggaagctggcagtggcagcttctgtgtctagggaggggtgtggctccctccttccctgtctgggaggttggagggaagaatctaggccttagcttgccctcctgccacccttccccttgtagatactgccttaacactccctcctctctcagctgtggctgccacccagccaggtttctccgtgctcactaatttatttccaggaaggtgtgtggaagacatgagccgtgtataatattttttttaacattttcattgcagtattgaccatcatccttggttgtgtatcgtgtaacacaaataatgatattaaaagcatcaaacaagcca

SEQ ID NO: 132551 - DNA, 3624 bp, Homo sapiens
  Payload ID: 5890
  Gene Symbol: FAM219A
  Gene Name: family with sequence similarity 219, member A
  ENST ID: ENST00000379089
  CDS Start-End: 293-844
agctgctgacaggaggcggcagcggagtaggaggcgaggcaagacctgcggctcggcccggccacagccgcggtagtgctaggcaagcccacggagtcacgccggcctcagccagtctgcgaacctctcgcccccgcccacccctgcatccgcccggcccctgcccgcccgagtggtccggggaggcctagtctgcaccacccgccgggctcctggggccgccgccccgcgcggtcctgtcggcgtccgcggccgcgcccggcccctggcccgctcgcccgccggcaccatgatggaggagatcgaccggttccaggtgcccaccgcgcactcggagatgcagccgctggacccagccgccgcctccatctctgacggagactgtgacgcccgggagggtgagtcagtagccatgaattacaaaccatccccgctccaagtgaagctggagaagcagcgggagctggcccggaagggctccctgaagaatggcagcatgggtagccctgtcaaccagcaacccaagaagaacaatgtcatggcccgaacaaggctggtcgtccccaataaaggctactcctcacttgaccagagccctgatgagaagccactggtagcccttgacacggacagcgatgatgactttgacatgtctagatactcctcctccggctactcctctgctgagatcaaccaagatttgaacatccagctgctgaaggacggctaccggttagatgagatccccgacgacgaggacctagacctcatcccccccaagtccgtgaaccccacgtgcatgtgctgccaggccacgtcctccaccgcctgccacattcagtagcgggcggggccactgcggtcgccggggcggggccgccaagggccgggtaggacgggcagaggccgaccccttcccagctcgtctgcctgcccccggccccgcgcccctacagccgccaacctcgtataacagtcattgcttcctcctatggtaggacgtgtacctctgtgtgttcatggagctggagaaaccaaaactgggtctctctccacccgggagctgaggaggggtgggggccgtttgttcagttacctgggggaacctcacccagcaccctgccccgcttcccagggctggccaagagagaagactggacggcagggaggtcaacattaacgagtggggggatcacaaagccaggggcttggccccaccccagcgaagccatgaactcccaagccccggcctcagcctaaccaggaaaggggctcggagggagaaaggcccagggcagtggggacgggtcccagcacctcggagcccccttcacacgccccctaccggcccatgtttctatttgcatttccccctcctcagatgggaagcctggcaaagctgcccaaccgggtagtgcccctcacccatcggatcactgccttcttcctcctcttgccccattcacccgcttccttgcactctgggagtggggcagggtaaggtgggccttacagacaggctgaggtttgggtggtgtgatctgtcctaattggcccctcaccaatgcatctatctgtctgccaccagcccaccccaccctgcccccaccctcacccacgcttctgctcattggtctcaatcccagcctggaagcagggagtaaggctggactccaatggcccattcccctcaccccagcccaagacgtgggaggctgcttcccagtaagaatccaggagcaagctttggtgaatccagtgggctgagtggctctatggatgtggttgtttggatgtggtagggagtgcttagcagaatgtgtgtgtatctctgaggctgtcagggggtgggtgggtgtgtgtctctgttggacctgtctctcctcagtctattcctgtcatagatgtgggtgtccctggtagggaagtgcctgtgtggtctgtttacagtgcagaaggcggctcagcagtgcaatgggctgacagccttggaccgggagtcagaagcctgggttctggttgtagctctggcccctccctgtgatcttcaacaagccacttgctttctctcgtcttcagtttcctcaactagaaaatgaacagcagctgaaattatgttgaagatccttttatacctgaaagagtttcttcatagaaatttctgtggtggggagggggcaatctctgtgtgtctcagtatacctaaaggttggggtggggcggagttgtgtgtctctgtagaaaggcgaaggggcagttcctatcaggactgtgtatgtctgagcacatgtggctctgtttgggattacgtgtttgtctgtgaatgtgtgtgtgtgttggagggttgtctattgtgtgtggctgtatagggtgtctgtagatcaagatgtgtatacagctgcttctgctattgctggtttgggggaggggactggaaagctgagactgaaaatcaagagggaagaggtgaggaaggcccacccctggggctgggcagtgtagacctgccaccgtgtgaagaaaaatgaaagcacagatagcctaagactgcacaggcctgtgcccacataccttatagcacaggcccaggtggatcatctcatgctaacaccccacatgtgctggtggatccactcccatggatccactcacatgctgcaggcatgcagtagactcacccacagcccactctctggacaccaatcctgggaggtgggagctggaatggggagcaatgagaggagggagtgagactgttggcttaggaagggtggtacctctccctgcatcatacccaggaactgccagctccaaaatattggggtacagctcaccaccccccactccgccaacccattcctacctcctctagtgcagggacccaagttagatgatgagaaaatgccaaacaaagggaggcaaggacagagaaggtacctgcaggacccacaaggcccatactggcccccatctgaacccacctctcccacccagatcaacatccccccaacccctgtgcccccatcatctggaccccagagccagccctcccactaccaccaccaccaccccggggctccttggctcacctttctagaacatgggtacctcctctttttgggggctcatttagactgctgcctttgctgctgacttgcagtgtgactcgggcccattgttcaatctctgtggccctgagacaccagggaaaatctccccccccacaggacatactagttccctggcaggcaagggcttccaactgaggcagtgcatgtgtggcagagagaggcaggaagctggcagtggcagcttctgtgtctagggaggggtgtggctccctccttccctgtctgggaggttggagggaagaatctaggccttagcttgccctcctgccacccttccccttgtagatactgccttaacactccctcctctctcagctgtggctgccacccagccaggtttctccgtgctcactaatttatttccaggaaggtgtgtggaagacatgagccgtgtataatattttttttaacattttcattgcagtattgaccatcatccttggttgtgtatcgtgtaacacaaataatgatattaaaagcatcaaacaagcca

SEQ ID NO: 132552 - DNA, 3644 bp, Homo sapiens
  Payload ID: 5890
  Gene Symbol: FAM219A
  Gene Name: family with sequence similarity 219, member A
  Uniprot ID: Q8IW50
  ENST ID: ENST00000445726
  CDS Start-End: 308-865
gagtcaccgcagtggctgagctgctgacaggaggcggcagcggagtaggaggcgaggcaagacctgcggctcggcccggccacagccgcggtagtgctaggcaagcccacggagtcacgccggcctcagccagtctgcgaacctctcgcccccgcccacccctgcatccgcccggcccctgcccgcccgagtggtccggggaggcctagtctgcaccacccgccgggctcctggggccgccgccccgcgcggtcctgtcggcgtccgcggccgcgcccggcccctggcccgctcgcccgccggcaccatgatggaggagatcgaccggttccaggtgcccaccgcgcactcggagatgcagccgctggacccagccgccgcctccatctctgacggagactgtgacgcccgggagggtgagtcagtagccatgaattacaaaccatccccgctccaagtgaagctggagaagcagcgggagctggcccggaagggctccctgaagaatggcagcatgggtagccctgtcaaccagcaacccaagaagaacaatgtcatggcccgaacaaggctggtcgtccccaataaaggctactcctcacttgaccagagccctgatgagaagccactggtagcccttgacacggacagcgatgatgactttgacatgtctagatactcctcctccggctactcctctgctgagcagatcaaccaagatttgaacatccagctgctgaaggacggctaccggttagatgagatccccgacgacgaggacctagacctcatcccccccaagtccgtgaaccccacgtgcatgtgctgccaggccacgtcctccaccgcctgccacattcagtagcgggcggggccactgcggtcgccggggcggggccgccaagggccgggtaggacgggcagaggccgaccccttcccagctcgtctgcctgcccccggccccgcgcccctacagccgccaacctcgtataacagtcattgcttcctcctatggtaggacgtgtacctctgtgtgttcatggagctggagaaaccaaaactgggtctctctccacccgggagctgaggaggggtgggggccgtttgttcagttacctgggggaacctcacccagcaccctgccccgcttcccagggctggccaagagagaagactggacggcagggaggtcaacattaacgagtggggggatcacaaagccaggggcttggccccaccccagcgaagccatgaactcccaagccccggcctcagcctaaccaggaaaggggctcggagggagaaaggcccagggcagtggggacgggtcccagcacctcggagcccccttcacacgccccctaccggcccatgtttctatttgcatttccccctcctcagatgggaagcctggcaaagctgcccaaccgggtagtgcccctcacccatcggatcactgccttcttcctcctcttgccccattcacccgcttccttgcactctgggagtggggcagggtaaggtgggccttacagacaggctgaggtttgggtggtgtgatctgtcctaattggcccctcaccaatgcatctatctgtctgccaccagcccaccccaccctgcccccaccctcacccacgcttctgctcattggtctcaatcccagcctggaagcagggagtaaggctggactccaatggcccattcccctcaccccagcccaagacgtgggaggctgcttcccagtaagaatccaggagcaagctttggtgaatccagtgggctgagtggctctatggatgtggttgtttggatgtggtagggagtgcttagcagaatgtgtgtgtatctctgaggctgtcagggggtgggtgggtgtgtgtctctgttggacctgtctctcctcagtctattcctgtcatagatgtgggtgtccctggtagggaagtgcctgtgtggtctgtttacagtgcagaaggcggctcagcagtgcaatgggctgacagccttggaccgggagtcagaagcctgggttctggttgtagctctggcccctccctgtgatcttcaacaagccacttgctttctctcgtcttcagtttcctcaactagaaaatgaacagcagctgaaattatgttgaagatccttttatacctgaaagagtttcttcatagaaatttctgtggtggggagggggcaatctctgtgtgtctcagtatacctaaaggttggggtggggcggagttgtgtgtctctgtagaaaggcgaaggggcagttcctatcaggactgtgtatgtctgagcacatgtggctctgtttgggattacgtgtttgtctgtgaatgtgtgtgtgtgttggagggttgtctattgtgtgtggctgtatagggtgtctgtagatcaagatgtgtatacagctgcttctgctattgctggtttgggggaggggactggaaagctgagactgaaaatcaagagggaagaggtgaggaaggcccacccctggggctgggcagtgtagacctgccaccgtgtgaagaaaaatgaaagcacagatagcctaagactgcacaggcctgtgcccacataccttatagcacaggcccaggtggatcatctcatgctaacaccccacatgtgctggtggatccactcccatggatccactcacatgctgcaggcatgcagtagactcacccacagcccactctctggacaccaatcctgggaggtgggagctggaatggggagcaatgagaggagggagtgagactgttggcttaggaagggtggtacctctccctgcatcatacccaggaactgccagctccaaaatattggggtacagctcaccaccccccactccgccaacccattcctacctcctctagtgcagggacccaagttagatgatgagaaaatgccaaacaaagggaggcaaggacagagaaggtacctgcaggacccacaaggcccatactggcccccatctgaacccacctctcccacccagatcaacatccccccaacccctgtgcccccatcatctggaccccagagccagccctcccactaccaccaccaccaccccggggctccttggctcacctttctagaacatgggtacctcctctttttgggggctcatttagactgctgcctttgctgctgacttgcagtgtgactcgggcccattgttcaatctctgtggccctgagacaccagggaaaatctccccccccacaggacatactagttccctggcaggcaagggcttccaactgaggcagtgcatgtgtggcagagagaggcaggaagctggcagtggcagcttctgtgtctagggaggggtgtggctccctccttccctgtctgggaggttggagggaagaatctaggccttagcttgccctcctgccacccttccccttgtagatactgccttaacactccctcctctctcagctgtggctgccacccagccaggtttctccgtgctcactaatttatttccaggaaggtgtgtggaagacatgagccgtgtataatattttttttaacattttcattgcagtattgaccatcatccttggttgtgtatcgtgtaacacaaataatgatattaaaagcatcaaacaagcc

SEQ ID NO: 132553 - DNA, 798 bp, Homo sapiens
  Payload ID: 5890
  Gene Symbol: FAM219A
  Gene Name: family with sequence similarity 219, member A
  ENST ID: ENST00000422409
  CDS Start-End: 293-798
agctgctgacaggaggcggcagcggagtaggaggcgaggcaagacctgcggctcggcccggccacagccgcggtagtgctaggcaagcccacggagtcacgccggcctcagccagtctgcgaacctctcgcccccgcccacccctgcatccgcccggcccctgcccgcccgagtggtccggggaggcctagtctgcaccacccgccgggctcctggggccgccgccccgcgcggtcctgtcggcgtccgcggccgcgcccggcccctggcccgctcgcccgccggcaccatgatggaggagatcgaccggttccaggtgcccaccgcgcactcggagatgcagccgctggacccagccgccgcctccatctctgacggagactgtgacgcccgggagggtgagtcagtagccatgaattacaaaccatccccgctccaagtgaagctggagaagcagcgggagctggcccggaagggctccctgaagaatggcagcatgggtagccctgtcaaccagcaacccaagaagaacaatgtcatggcccgaacaaggctggtcgtccccaataaaggctactcctcacttgaccagagccctgatgagaagccactggtagcccttgacacggacagcgatgatgactttgacatgtctagatactcctcctccggctactcctctgctgagcagatcaaccaagatttgaacatccagctgctgaaggacggctaccggttagatgagatccccgacgacgaggacctagacctcatcccccccaagtccgtgaaccccac

SEQ ID NO: 132554 - DNA, 3550 bp, Homo sapiens
  Payload ID: 5891
  Gene Symbol: FAM219B
  Gene Name: family with sequence similarity 219, member B
  Uniprot ID: Q5XKK7
  ENST ID: ENST00000357635
  CDS Start-End: 322-918
aaaccgtgggcacccgaccgacgcacacgcgcagccccacgacagtatcagtatttaatttccactagagacagaactaagcctaaccatcaccaggctcaagccgcctaccccaaaaccgagaacggaactgcccggtccccccgaaaagaagggcggaacatttcggccaagtcctcagactaccgaaccggagagctccgaaaggggactacctgcgcctgcgcaccgccatcttgttaaaagagcccgcctctccctcggccggtcactctttcgccacgggcggggttgcaccatccggcagggcggggcccggccatggcgaccgcggagcccagcgggcgcgcgttgcggttgtctaccccgggaccccggcccagcggggctcgggaccgcgcgccgggagctgcggggccaccctccgggcagatcggtaatagagccctccgtctgggggagcgcacccccgcggccgtggaaaagcgggggccatacatggtgacgcgcgcaccctccattcaagccaagctgcagaagcaccgggacctggccaaggccgttctgcggagaaaaggcatgctgggggcctcgccgaaccgcccagactcttcagggaaaaggtcagtgaagtttaacaagggctatactgctcttagccagagtccagatgaaaacctggtgtccctcgactctgacagtgatggggagctgggatccagatactcctccgggtattcatctgcagagcaggtgaaccaggatgtgagccggcagctgcttcaggatgggtatcacctggatgagattccagatgacgaggacttggacctcatcccccctaagcccatggcctcttcaacatgctcctgctgctggtgctgtcttggggactcttcttcctgtaccctccagtagacattaccctccaaggtgggccctgctcaccatgaggcctacagagccctgttggccactcatagctcacacagtgcagtgagcactgaagtcactgacccctagaaagtgacctgcaggtagcccttacctgttgcttctcaggccagaggcccccatctgggctgtgggctgataggtagaattctgtagttttcctctgctgttggagcagagtttggagaagtcactttaataagggcaagacagaaaattctggttcttatggtgggtgacaaaggtggctaaggaaaacacttgcagacagcttgattggtatttgtcatagtgcttcagggaggcaaaaagggagctcttgtgcccaggctgtgctagatagtgttgaatggaggcagaaaatagcactttatggtttattatagctggcaatccaaaaaagaaactgtttgagaccagttcgagaaattccgtttgctctattcttcctagctctaagatggtttgcaggcttgaccttcaagacagcataaagtgagtccttttgtccctcttcaggttgcacctgtctaactatgacagggatcatagcaggttgcttaatgatacagcaggatcctggcttccagaatccctggacctggggcatccccaactggtccaaccgtccgggtgagtttagtgattctggtttgcccttccctagttagagaaaaactgctctgacatgttcatatttatttatttgtatttccttggtctgggtgagtttcttcacccagtctttgagctaaagattaggtcgaaggtactggggctggccccagaagcctgcagtttttattattaccagcagagggagctacagggagcagtccggtgccttcctattgtttactttttaaacttttgagaagtagcaatggactcgtgagagtgggtatacagctgtgtgggctttgtcctagactgaggcttacagacaggaagggtaagagagacctaagccagctcctagacccttgcctgaggaaatcagtccaccagtgtagagggcctcccttcactccagcatggaccattctattgccagattcttctggtcacagcatgggccttactggatactcaggattgggctttaagcagacctctgggtgtgacacagcctctttcagcccccagcccaaacagcagaaataggcataatttctgctgtgacaccccctacccacaaattggagagtatatcttgctatactctataccaagcctctttctagaatttttccaacaggttttgttttgttttttggcttaactcagaaccatggtgagcgttctgctttgttttgttggagacagggtctctgtcacccaggctggagtgcagtggtgtaatcacagctcactgcagcctcaacctcccaggcccaagcagtcctcccacatggtgagctttgaatgggcatagacagggttcccagcccaatagtcgggattggggtataggttctacatgggaaagtatccagtctcttgctttactcagtgtcctgtgaccaccagaggcatgagagggacaacacactcttttcgctctaccacaaggggtgactagaagatgagcaagtctaataaaaagatacggccttatttgttatttgtctgacaaccatccttacgatggtaatcctgtgagtgcctgatggacatctatctttgtgtttttctcaaaccatggaaggttgagaggaatatacagtatctgggggctgacttactctactagctaggagcatcacagcagagagataggacagagaccagagtcatgccagcttggggtcttgggaagagaggcagatggttactctgttctggaatgggactctgcagctctatgcagtggccaacattctgagcactttgtgcaaatgcttgtagagctcaagaacatctccatccagaaccccttccccatctgcagagaccatgtccaggcctttcttgtgtctgcagaggtgaagtgcacatgtggaaagggatcaaatgtagcacagtgtaaagaaagacagcaacacaggtagagggacccagtgtgtgctgggaggtggctgtggaaggtaagtatagacctacatctctgttggggaggtggtcagggcagaatggcctgggtgtttagcagcttctaggggtgagggtggcaggaccccaaaaccaaggccctctgcatcgttgttgtaataatcagctctggcatattcagctgcaactgtccctgaagaagaggtttctgagctggctgaccccatgtaggagggtgttaccttgtagaaaaagctggagggacctggtgggacagtgcagtgaggcagggtagaaatggtcagttgtttagggccagtggccacataccaaaataccaccaatgtgcccagggccaaactgccttaattctgagtgctgtgtgttctgcaggtgacagtttcctgaggagaggggtgtatccaggcttacctcccagcaggagtggtaccatatggtgtttatgtactactctatagaactcttggcttgcacttctacagctctgtacatttataagaataaatgcaatcacactagttga

SEQ ID NO: 132555 - DNA, 587 bp, Homo sapiens
  Payload ID: 5891
  Gene Symbol: FAM219B
  Gene Name: family with sequence similarity 219, member B
  ENST ID: ENST00000562698
  CDS Start-End: 84-587
gttaaaagagcccgcctctccctcggccggtcactctttcgccacgggcggggttgcaccatccggcagggcggggcccggccatggcgaccgcggagcccagcgggcgcgcgttgcggttgtctaccccgggaccccggcccagcggggctcgggaccgcgcgccgggagctgcggggccaccctccgggcagatcggtaatagagccctccgtctgggggagcgcacccccgcggccgtggaaaagcgggggccatacatggtgacgcgcgcaccctccattcaagccaagctgcagaagcaccgggacctggccaaggccgttctgcggagaaaaggcatgctgggggcctcgccgaaccgcccagactcttcagggaaaaggtcagtgaagtttaacaagggctatactgctcttagccagagtccagatgaaaacctggtgtccctcgactctgacagtgatggggagctgggatccagatactcctccgggtattcatctgcagaggtgaaccaggatgtgagccggcagctgcttcaggatgggtatcacctggatgagattccagatgacgaggacttg

SEQ ID NO: 132556 - DNA, 699 bp, Homo sapiens
  Payload ID: 5891
  Gene Symbol: FAM219B
  Gene Name: family with sequence similarity 219, member B
  ENST ID: ENST00000566194
  CDS Start-End: 49-312
ctttcgccacgggcggggttgcaccatccggcagggcggggcccggccatggcgaccgcggagcccagcgggcgcgcgttgcggttgtctaccccgggaccccggcccagcggggctcgggaccgcgcgccgggagctgcggggccaccctccgggcagatcggtaatagagccctccgtctgggggagcgcacccccgcggccgtggaaaagcgggggccatacatggtgacgcgcgcaccctccattcaagccaagctgcagaagcaccgggacctggccaaggccgttctgcggagaaaaggtcagtgaagtttaacaagggctatactgctcttagccagagtccagatgaaaacctggtgtccctcgactctgacagtgatggggagctgggatccagatactcctccgggtattcatctgcagaggtgaaccaggatgtgagccggcagctgcttcaggatgggtatcacctggatgagattccagatgacgaggacttggacctcatcccccctaagcccatggcctcttcaacatgctcctgctgctggtgctgtcttggggactcttcttcctgtaccctccagtagacattaccctccaaggtgggccctgctcaccatgaggcctacagagccctgttggccactcatagctcacacagtgcagtgagcactgaagtcactgacccct

SEQ ID NO: 132557 - DNA, 449 bp, Homo sapiens
  Payload ID: 5891
  Gene Symbol: FAM219B
  Gene Name: family with sequence similarity 219, member B
  ENST ID: ENST00000567388
  CDS Start-End: 1-209
ccgttctgcggagaaaaggcatgctgggggcctcgccgaaccgcccagactcttcagggaaaaggtcagtgaagtttaacaagggctatactgctcttagccagagtccagatgaaaacctggtgtccctcgactctgacaggcccttcatgtacattccagggccgttctcttctgaacaatatcccttcccaggatggcttggttagaagactcatagtgatggggagctgggatccagatactcctccgggtattcatctgcagaggtgaaccaggatgtgagccggcagctgcttcaggatgggtatcacctggatgagattccagatgacgaggacttggacctcatcccccctaagcccatggcctcttcaacatgctcctgctgctggtgctgtcttggggactcttcttcctgtaccctccagtagacattaccctccaag

SEQ ID NO: 132558 - DNA, 2721 bp, Homo sapiens
  Payload ID: 5891
  Gene Symbol: FAM219B
  Gene Name: family with sequence similarity 219, member B
  Uniprot ID: Q5XKK7
  ENST ID: ENST00000563119
  CDS Start-End: 38-634
ggcggggttgcaccatccggcagggcggggcccggccatggcgaccgcggagcccagcgggcgcgcgttgcggttgtctaccccgggaccccggcccagcggggctcgggaccgcgcgccgggagctgcggggccaccctccgggcagatcggtaatagagccctccgtctgggggagcgcacccccgcggccgtggaaaagcgggggccatacatggtgacgcgcgcaccctccattcaagccaagctgcagaagcaccgggacctggccaaggccgttctgcggagaaaaggcatgctgggggcctcgccgaaccgcccagactcttcagggaaaaggtcagtgaagtttaacaagggctatactgctcttagccagagtccagatgaaaacctggtgtccctcgactctgacagtgatggggagctgggatccagatactcctccgggtattcatctgcagagcaggtgaaccaggatgtgagccggcagctgcttcaggatgggtatcacctggatgagattccagatgacgaggacttggacctcatcccccctaagcccatggcctcttcaacatgctcctgctgctggtgctgtcttggggactcttcttcctgtaccctccagtagacattaccctccaaggttgcacctgtctaactatgacagggatcatagcaggttgcttaatgatacagcaggatcctggcttccagaatccctggacctggggcatccccaactggtccaaccgtccgggtgagtttagtgattctggtttgcccttccctagttagagaaaaactgctctgacatgttcatatttatttatttgtatttccttggtctgggtgagtttcttcacccagtctttgagctaaagattaggtcgaaggtactggggctggccccagaagcctgcagtttttattattaccagcagagggagctacagggagcagtccggtgccttcctattgtttactttttaaacttttgagaagtagcaatggactcgtgagagtgggtatacagctgtgtgggctttgtcctagactgaggcttacagacaggaagggtaagagagacctaagccagctcctagacccttgcctgaggaaatcagtccaccagtgtagagggcctcccttcactccagcatggaccattctattgccagattcttctggtcacagcatgggccttactggatactcaggattgggctttaagcagacctctgggtgtgacacagcctctttcagcccccagcccaaacagcagaaataggcataatttctgctgtgacaccccctacccacaaattggagagtatatcttgctatactctataccaagcctctttctagaatttttccaacaggttttgttttgttttttggcttaactcagaaccatggtgagcgttctgctttgttttgttggagacagggtctctgtcacccaggctggagtgcagtggtgtaatcacagctcactgcagcctcaacctcccaggcccaagcagtcctcccacatggtgagctttgaatgggcatagacagggttcccagcccaatagtcgggattggggtataggttctacatgggaaagtatccagtctcttgctttactcagtgtcctgtgaccaccagaggcatgagagggacaacacactcttttcgctctaccacaaggggtgactagaagatgagcaagtctaataaaaagatacggccttatttgttatttgtctgacaaccatccttacgatggtaatcctgtgagtgcctgatggacatctatctttgtgtttttctcaaaccatggaaggttgagaggaatatacagtatctgggggctgacttactctactagctaggagcatcacagcagagagataggacagagaccagagtcatgccagcttggggtcttgggaagagaggcagatggttactctgttctggaatgggactctgcagctctatgcagtggccaacattctgagcactttgtgcaaatgcttgtagagctcaagaacatctccatccagaaccccttccccatctgcagagaccatgtccaggcctttcttgtgtctgcagaggtgaagtgcacatgtggaaagggatcaaatgtagcacagtgtaaagaaagacagcaacacaggtagagggacccagtgtgtgctgggaggtggctgtggaaggtaagtatagacctacatctctgttggggaggtggtcagggcagaatggcctgggtgtttagcagcttctaggggtgagggtggcaggaccccaaaaccaaggccctctgcatcgttgttgtaataatcagctctggcatattcagctgcaactgtccctgaagaagaggtttctgagctggctgaccccatgtaggagggtgttaccttgtagaaaaagctggagggacctggtgggacagtgcagtgaggcagggtagaaatggtcagttgtttagggccagtggccacataccaaaataccaccaatgtgcccagggccaaactgccttaattctgagtgctgtgtgttctgcaggtgacagtttcctgaggagaggggtgtatccaggcttacctcccagcaggagtggtaccatatggtgtttatgtactactctatagaactcttggcttgcacttctacagctctgtacatttataagaataaatgcaatcacacta

SEQ ID NO: 132559 - DNA, 533 bp, Homo sapiens
  Payload ID: 5891
  Gene Symbol: FAM219B
  Gene Name: family with sequence similarity 219, member B
  ENST ID: ENST00000569761
  CDS Start-End: 81-302
aaaagagcccgcctctccctcggccggtcactctttcgccacgggcggggttgcaccatccggcagggcggggcccggccatggcgaccgcggagcccagcgggcgcgcgttgcggttgtctaccccgggaccccggcccagcggggctcgggaccgcgcgccgggagctgcggggccaccctccgggcagatcggtaatagagccctccgtctgggggagcgcacccccgcggccgtggaaaagcgggggccatacatggtgacgcgcgcaccctccattcaagccaagctgcgtcagtgaagtttaacaagggctatactgctcttagccagagtccagatgaaaacctggtgtccctcgactctgacagcaggtgaaccaggatgtgagccggcagctgcttcaggatgggtatcacctggatgagattccagatgacgaggacttggacctcatcccccctaagcccatggcctcttcaacatgctcctgctgctggtgctgtcttggggactcttcttcctgtaccct

SEQ ID NO: 132560 - DNA, 1249 bp, Homo sapiens
  Payload ID: 5891
  Gene Symbol: FAM219B
  Gene Name: family with sequence similarity 219, member B
  ENST ID: ENST00000565772
  CDS Start-End: 293-631
gcgcaccctccattcaagccaagctgcgtgagtgtggcccgatggtcgggggaggtttctccctgggcgggcggccgcgtccccagggcgggttccggagctccgctgggcctcggccccggagggaaggggttagctgcagcctgctctcgcccctcaaaatccgttcggaaagagcggcctcccagccttcgggagacgcggcggagtggggaagacccggctgacccgggtcctttaacttccagagaagcaccgggacctggccaaggccgttctgcggagaaaaggcatgctgggggcctcgccgaaccgcccagactcttcagggaaaaggtcagtgaagtttaacaagggctatactgctcttagccagagtccagatgaaaacctggtgtccctcgactctgacagtgatggggagctgggatccagatactcctccgggtattcatctgcagagcaggtgaaccaggatgtgagccggcagctgcttcaggatgggtatcacctggatgagattccagatgacgaggacttggacctcatcccccctaagcccatggcctcttcaacatgctcctgctgctggtgctgtcttggggactcttcttcctgtaccctccagtagacattaccctccaaggtgggccctgctcaccatgaggcctacagagccctgttggccactcatagctcacacagtgcagtgagcactgaagtcactgacccctagaaagtgacctgcaggtagcccttacctgttgcttctcaggccagaggcccccatctgggctgtgggctgataggtagaattctgtagttttcctctgctgttggagcagagtttggagaagtcactttaataagggcaagacagaaaattctggttcttatggtgggtgacaaaggtggctaaggaaaacacttgcagacagcttgattggtatttgtcatagtgcttcagggaggcaaaaagggagctcttgtgcccaggctgtgctagatagtgttgaatggaggcagaaaatagcactttatggtttattatagctggcaatccaaaaaagaaactgtttgagaccagttcgagaaattccgtttgctctattcttcctagctctaagatggtttgcaggcttgaccttcaagacagcataaagtgagtccttttgtccctcttcaggttgcacctgtctaactatgacagggatcatagcaggttgcttaatgatacagcaggatcctg

SEQ ID NO: 132561 - DNA, 865 bp, Homo sapiens
  Payload ID: 5891
  Gene Symbol: FAM219B
  Gene Name: family with sequence similarity 219, member B
  ENST ID: ENST00000563671
  CDS Start-End: 1-590
ccgcggagcccagcgggcgcgcgttgcggttgtctaccccgggaccccggcccagcggggctcgggaccgcgcgccgggagctgcggggccaccctccgggcagatcggtaatagagccctccgtctgggggagcgcacccccgcggccgtggaaaagcgggggccatacatggtgacgcgcgcaccctccattcaagccaagctgcagaagcaccgggacctggccaaggccgttctgcggagaaaaggcatgctgggggcctcgccgaaccgcccagactcttcagggaaaaggtcagtgaagtttaacaagggctatactgctcttagccagagtccagatgaaaacctggtgtccctcgactctgacagtgatggggagctgggatccagatactcctccgggtattcatctgcagagcaggtgaaccaggatgtgagccggcagctgcttcaggatgggtatcacctggatgagattccagatgacgaggacttggacctcatcccccctaagcccatggcctcttcaacatgctcctgctgctggtgctgtcttggggactcttcttcctgtaccctccagtagacattaccctccaaggttgcacctgtctaactatgacagggatcatagcaggttgcttaatgatacagcaggatcctggcttccagaatccctggacctggggcatccccaactggtccaaccgtccgggtgacagtttcctgaggagaggggtgtatccaggcttacctcccagcaggagtggtaccatatggtgtttatgtactactctatagaactcttggcttgcacttctacagctctgtacatttataagaataaatgcaatcacacta

SEQ ID NO: 132562 - DNA, 742 bp, Homo sapiens
  Payload ID: 5891
  Gene Symbol: FAM219B
  Gene Name: family with sequence similarity 219, member B
  ENST ID: ENST00000563877
  CDS Start-End: 84-305
gttaaaagagcccgcctctccctcggccggtcactctttcgccacgggcggggttgcaccatccggcagggcggggcccggccatggcgaccgcggagcccagcgggcgcgcgttgcggttgtctaccccgggaccccggcccagcggggctcgggaccgcgcgccgggagctgcggggccaccctccgggcagatcggtaatagagccctccgtctgggggagcgcacccccgcggccgtggaaaagcgggggccatacatggtgacgcgcgcaccctccattcaagccaagctgcgtcagtgaagtttaacaagggctatactgctcttagccagagtccagatgaaaacctggtgtccctcgactctgacagtgatggggagctgggatccagatactcctccgggtattcatctgcagagcaggtgaaccaggatgtgagccggcagctgcttcaggatgggtatcacctggatgagattccagatgacgaggacttggacctcatcccccctaagcccatggcctcttcaacatgctcctgctgctggtgctgtcttggggactcttcttcctgtaccctccagtagacattaccctccaaggtgggccctgctcaccatgaggcctacagagccctgttggccactcatagctcacacagtgcagtgagcactgaagtcactgacccctagaaagtgacctgcaggtagcccttacctgttgcttctcaggccaga

SEQ ID NO: 132563 - DNA, 568 bp, Homo sapiens
  Payload ID: 5891
  Gene Symbol: FAM219B
  Gene Name: family with sequence similarity 219, member B
  ENST ID: ENST00000564019
  CDS Start-End: 8-403
cccggccatggcgaccgcggagcccagcgggcgcgcgttgcggttgtctaccccgggaccccggcccagcggggctcgggaccgcgcgccgggagctgcggggccaccctccgggcagatcggtaatagagccctccgtctgggggagcgcacccccgcggccgtggaaaagcgggggccatacatggtgacgcgcgcaccctccattcaagccaagctgcagaagcaccgggacctggccaaggccgttctgcggagaaaaggcatgctgggggcctcgccgaaccgcccagactcttcagggaaaaggtcagtgaagtttaacaagggctatactgctcttagccagagtccagatgaaaacctggtgtccctcgactctgacagggccgttctcttctgaacaatatcccttcccaggatggcttggttagaagactcatagtgatggggagctgggatccagatactcctccgggtattcatctgcagaggtgaaccaggatgtgagccggcagctgcttcaggatgggtatcacctggatgagattccagatgacgaggactt

SEQ ID NO: 132564 - DNA, 673 bp, Homo sapiens
  Payload ID: 5891
  Gene Symbol: FAM219B
  Gene Name: family with sequence similarity 219, member B
  ENST ID: ENST00000563413
  CDS Start-End: 6-227
cggccatggcgaccgcggagcccagcgggcgcgcgttgcggttgtctaccccgggaccccggcccagcggggctcgggaccgcgcgccgggagctgcggggccaccctccgggcagatcggtaatagagccctccgtctgggggagcgcacccccgcggccgtggaaaagcgggggccatacatggtgacgcgcgcaccctccattcaagccaagctgcgtcagtgaagtttaacaagggctatactgctcttagccagagtccagatgaaaacctggtgtccctcgactctgacagtgatggggagctgggatccagatactcctccgggtattcatctgcagagcaggtgaaccaggatgtgagccggcagctgcttcaggatgggtatcacctggatgagattccagatgacgaggacttggacctcatcccccctaagcccatggcctcttcaacatgctcctgctgctggtgctgtcttggggactcttcttcctgtaccctccagtagacattaccctccaaggttgcacctgtctaactatgacagggatcatagcaggttgcttaatgatacagcaggatcctggcttccagaatccctggacctggggcatccccaactggtccaaccgtccgggtgagtttagtgattctggtttgcccttcc

SEQ ID NO: 132565 - DNA, 1552 bp, Homo sapiens
  Payload ID: 5891
  Gene Symbol: FAM219B
  Gene Name: family with sequence similarity 219, member B
  Uniprot ID: Q5XKK7
  ENST ID: ENST00000563069
  CDS Start-End: 81-527
aaaagagcccgcctctccctcggccggtcactctttcgccacgggcggggttgcaccatccggcagggcggggcccggccatggcgaccgcggagcccagcgggcgcgcgttgcggttgtctaccccgggaccccggcccagcggggctcgggaccgcgcgccgggagctgcggggccaccctccgggcagatcggtaatagagccctccgtctgggggagcgcacccccgcggccgtggaaaagcgggggccatacatggtgacgcgcgcaccctccattcaagccaagctgcagaagcaccgggacctggccaaggccgttctgcggagaaaaggcatgctgggggcctcgccgaaccgcccagactcttcagggaaaaggtcagtgaagtttaacaagggctatactgctcttagccagagtccagatgaaaacctggtgtccctcgactctgacaggcccttcatgtacattccagggccgttctcttctgaacaatatcccttcccaggatggcttggttagaagactcatagtgatggggagctgggatccagatactcctccgggtattcatctgcagagcaggtgaaccaggatgtgagccggcagctgcttcaggatgggtatcacctggatgagattccagatgacgaggacttggacctcatcccccctaagcccatggcctcttcaacatgctcctgctgctggtgctgtcttggggactcttcttcctgtaccctccagtagacattaccctccaaggtgggccctgctcaccatgaggcctacagagccctgttggccactcatagctcacacagtgcagtgagcactgaagtcactgacccctagaaagtgacctgcaggtagcccttacctgttgcttctcaggccagaggcccccatctgggctgtgggctgataggtagaattctgtagttttcctctgctgttggagcagagtttggagaagtcactttaataagggcaagacagaaaattctggttcttatggtgggtgacaaaggtggctaaggaaaacacttgcagacagcttgattggtatttgtcatagtgcttcagggaggcaaaaagggagctcttgtgcccaggctgtgctagatagtgttgaatggaggcagaaaatagcactttatggtttattatagctggcaatccaaaaaagaaactgtttgagaccagttcgagaaattccgtttgctctattcttcctagctctaagatggtttgcaggcttgaccttcaagacagcataaagtgagtccttttgtccctcttcaggttgcacctgtctaactatgacagggatcatagcaggttgcttaatgatacagcaggatcctggcttccagaatccctggacctggggcatccccaactggtccaaccgtccgggtgagtttagtgattctggtttgcccttccctagttagagaaaaactgctctgacatgttcatatttatttatttgtatttccttggtctgggtgagtttcttcacccagtctttgagctaaagatta

SEQ ID NO: 132566 - DNA, 624 bp, Homo sapiens
  Payload ID: 5891
  Gene Symbol: FAM219B
  Gene Name: family with sequence similarity 219, member B
  ENST ID: ENST00000566132
  CDS Start-End: 1-33
gaacaatatcccttcccaggatggcttggttagaagactcatagtgatggggagctgggatccagatactcctccgggtattcatctgcagagcaggtgaaccaggatgtgagccggcagctgcttcaggatgggtatcacctggatgagattccagatgacgaggacttggacctcatcccccctaagcccatggcctcttcaacatgctcctgctgctggtgctgtcttggggactcttcttcctgtaccctccagtagacattaccctccaaggttgcacctgtctaactatgacagggatcatagcaggttgcttaatgatacagcaggatcctggcttccagaatccctggacctggggcatccccaactggtccaaccgtccggggtctctgtcacccaggctggagtgcagtggtgtaatcacagctcactgcagcctcaacctcccaggcccaagcagtcctcccacatggtgacagtttcctgaggagaggggtgtatccaggcttacctcccagcaggagtggtaccatatggtgtttatgtactactctatagaactcttggcttgcacttctacagctctgtacatttataagaataaatgcaatcacacta

SEQ ID NO: 132567 - DNA, 3219 bp, Homo sapiens
  Payload ID: 5891
  Gene Symbol: FAM219B
  Gene Name: family with sequence similarity 219, member B
  ENST ID: ENST00000569524
  CDS Start-End: 84-305
gttaaaagagcccgcctctccctcggccggtcactctttcgccacgggcggggttgcaccatccggcagggcggggcccggccatggcgaccgcggagcccagcgggcgcgcgttgcggttgtctaccccgggaccccggcccagcggggctcgggaccgcgcgccgggagctgcggggccaccctccgggcagatcggtaatagagccctccgtctgggggagcgcacccccgcggccgtggaaaagcgggggccatacatggtgacgcgcgcaccctccattcaagccaagctgcgtcagtgaagtttaacaagggctatactgctcttagccagagtccagatgaaaacctggtgtccctcgactctgacagtgatggggagctgggatccagatactcctccgggtattcatctgcagagcaggtgaaccaggatgtgagccggcagctgcttcaggatgggtatcacctggatgagattccagatgacgaggacttggacctcatcccccctaagcccatggcctcttcaacatgctcctgctgctggtgctgtcttggggactcttcttcctgtaccctccagtagacattaccctccaaggtgggccctgctcaccatgaggcctacagagccctgttggccactcatagctcacacagtgcagtgagcactgaagtcactgacccctagaaagtgacctgcaggtagcccttacctgttgcttctcaggccagaggcccccatctgggctgtgggctgataggtagaattctgtagttttcctctgctgttggagcagagtttggagaagtcactttaataagggcaagacagaaaattctggttcttatggtgggtgacaaaggtggctaaggaaaacacttgcagacagcttgattggtatttgtcatagtgcttcagggaggcaaaaagggagctcttgtgcccaggctgtgctagatagtgttgaatggaggcagaaaatagcactttatggtttattatagctggcaatccaaaaaagaaactgtttgagaccagttcgagaaattccgtttgctctattcttcctagctctaagatggtttgcaggcttgaccttcaagacagcataaagtgagtccttttgtccctcttcaggttgcacctgtctaactatgacagggatcatagcaggttgcttaatgatacagcaggatcctggcttccagaatccctggacctggggcatccccaactggtccaaccgtccgggtgagtttagtgattctggtttgcccttccctagttagagaaaaactgctctgacatgttcatatttatttatttgtatttccttggtctgggtgagtttcttcacccagtctttgagctaaagattaggtcgaaggtactggggctggccccagaagcctgcagtttttattattaccagcagagggagctacagggagcagtccggtgccttcctattgtttactttttaaacttttgagaagtagcaatggactcgtgagagtgggtatacagctgtgtgggctttgtcctagactgaggcttacagacaggaagggtaagagagacctaagccagctcctagacccttgcctgaggaaatcagtccaccagtgtagagggcctcccttcactccagcatggaccattctattgccagattcttctggtcacagcatgggccttactggatactcaggattgggctttaagcagacctctgggtgtgacacagcctctttcagcccccagcccaaacagcagaaataggcataatttctgctgtgacaccccctacccacaaattggagagtatatcttgctatactctataccaagcctctttctagaatttttccaacaggttttgttttgttttttggcttaactcagaaccatggtgagcgttctgctttgttttgttggagacagggtctctgtcacccaggctggagtgcagtggtgtaatcacagctcactgcagcctcaacctcccaggcccaagcagtcctcccacatggtgagctttgaatgggcatagacagggttcccagcccaatagtcgggattggggtataggttctacatgggaaagtatccagtctcttgctttactcagtgtcctgtgaccaccagaggcatgagagggacaacacactcttttcgctctaccacaaggggtgactagaagatgagcaagtctaataaaaagatacggccttatttgttatttgtctgacaaccatccttacgatggtaatcctgtgagtgcctgatggacatctatctttgtgtttttctcaaaccatggaaggttgagaggaatatacagtatctgggggctgacttactctactagctaggagcatcacagcagagagataggacagagaccagagtcatgccagcttggggtcttgggaagagaggcagatggttactctgttctggaatgggactctgcagctctatgcagtggccaacattctgagcactttgtgcaaatgcttgtagagctcaagaacatctccatccagaaccccttccccatctgcagagaccatgtccaggcctttcttgtgtctgcagaggtgaagtgcacatgtggaaagggatcaaatgtagcacagtgtaaagaaagacagcaacacaggtagagggacccagtgtgtgctgggaggtggctgtggaaggtaagtatagacctacatctctgttggggaggtggtcagggcagaatggcctgggtgtttagcagcttctaggggtgagggtggcaggaccccaaaaccaaggccctctgcatcgttgttgtaataatcagctctggcatattcagctgcaactgtccctgaagaagaggtttctgagctggctgaccccatgtaggagggtgttaccttgtagaaaaagctggagggacctggtgggacagtgcagtgaggcagggtagaaatggtcagttgtttagggccagtggccacataccaaaataccaccaatgtgcccagggccaaactgccttaattctgagtgctgtgtgttctgcaggtgacagtttcctgaggagaggggtgtatccaggcttacctcccagcaggagtggtaccatatggtgtttatgtactactctatagaactcttggcttgcacttctacagctctgtacatttataagaataaatgcaatcacacta

SEQ ID NO: 132568 - DNA, 1145 bp, Homo sapiens
  Payload ID: 5891
  Gene Symbol: FAM219B
  Gene Name: family with sequence similarity 219, member B
  ENST ID: ENST00000570143
  CDS Start-End: 43-264
ccacgggcggggttgcaccatccggcagggcggggcccggccatggcgaccgcggagcccagcgggcgcgcgttgcggttgtctaccccgggaccccggcccagcggggctcgggaccgcgcgccgggagctgcggggccaccctccgggcagatcggtaatagagccctccgtctgggggagcgcacccccgcggccgtggaaaagcgggggccatacatggtgacgcgcgcaccctccattcaagccaagctgcgtcagtgaagtttaacaagggctatactgctcttagccagagtccagatgaaaacctggtgtccctcgactctgacaggcccttcatgtacattccagggccgttctcttctgaacaatatcccttcccaggatggcttggttagaagactcatagtgatggggagctgggatccagatactcctccgggtattcatctgcagaggtgaaccaggatgtgagccggcagctgcttcaggatgggtatcacctggatgagattccagatgacgaggacttggacctcatcccccctaagcccatggcctcttcaacatgctcctgctgctggtgctgtcttggggactcttcttcctgtaccctccagtagacattaccctccaaggtgggccctgctcaccatgaggcctacagagccctgttggccactcatagctcacacagtgcagtgagcactgaagtcactgacccctagaaagtgacctgcaggtagcccttacctgttgcttctcaggccagaggcccccatctgggctgtgggctgataggtagaattctgtagttttcctctgctgttggagcagagtttggagaagtcactttaataagggcaagacagaaaattctggttcttatggtgggtgacaaaggtggctaaggaaaacacttgcagacagcttgattggtatttgtcatagtgcttcagggaggcaaaaagggagctcttgtgcccaggctgtgctagatagtgttgaatggaggcagaaaatagcactttatggtttattatagctggcaatccaaaaaagaaactgtttgagaccagttcgagaaattccgtttgctctattcttcctagctctaagatggtttgcaggcttgaccttca

SEQ ID NO: 132569 - DNA, 2214 bp, Homo sapiens
  Payload ID: 5892
  Gene Symbol: FAM220A
  Gene Name: family with sequence similarity 220, member A
  Uniprot ID: Q7Z4H9
  ENST ID: ENST00000313324
  CDS Start-End: 469-1248
cggccaggctggtacaggcggctgctcgcggaggcacttctccgagcgtgacgtgcggactccgctccactgcggcccgcccgcccgccggtctagccgccgcctccttcgctccctgagcacgccaggcgagggtcagctgccggggcgacgcggcgcggagagggcgggcgggggggctgtgggagcgccggtctctatatggcggcggctctgtcgggcctggctgtccggctctcgcgctcggccgccgcccgctcctatggggtcttctgcaaggggctgactcgcacgctgctcatcttcttcgacctggcctggcggctgcgtatcaacttcccctacctctacatcgtggcttccatgatgctcaacgtccgcctgcaggttcatattgagatccattgaaggccctcccagactgacgaaggcgtgacctcaggcccaccgcatccaagaacacgaagcatgagggacagaagagggcccctcggcacctgcctggcacaagtgcagcaggccggaggaggtgactcggacaaactatcatgcagccttaagaaaagaatgccggagggcccttggcctgcagatgcaccctcctggatgaataagcctgtggttgatggaaattcacaaagtgaggcattatcactggaaatgagaaaggatccgagcggggctggcctctggcttcacagtggcggcccagtgcttccatatgtgagagaatcagtaagaagaaatccagcctcagcagccactccgagcacagccgtgggtttgttccctgctccaacagagtgttttgctcgggtgtcctgcagtggtgttgaagctctggggcggcgagactggctgggaggagggcccagggccactgacggccacagaggacagtgccccaaaggagagcctcgggtgtcacgactgccacgccatcaaaaagtgccggaaatgggaagttttcaggatgacccaccaagtgcttttcccaagggtctgggctctgagttggaacccgcttgcctgcactccatcctgtctgcaacgctgcacgtgtatcccgaagtgctcctgagtgaggagacaaaacgcattttccttgaccgtttaaagcccatgttttcaaagcaaacaatagaattcaagaaaatgcttaaaagcacctcagatggtctgcagataacactggggttactggctctgcaaccttttgaattagcaaatacattatgccatagttaaggtacaagcagaacaataccaatagattaattttaagagttgtcttagaatgatttctttcgcattaagtctggatgcaaactgtgcagcccttaggttcctgctgtagttttgtacgacctggcagacttaaagtaaattgagtttaaattcaaagccagttgatgcggaaggaacttttttggcatgtgttaaattgtgctttaaaagacatataaagaattgggaaacatttcaggagacgatcatagcctgtataaataccagattagaacatacggatttaccatgaagttctgtcttcaacatccattctaaagggctactgtcccaaatcctgtgtgtccttttgacttgtctgatcacccaatggaagtggatacttgtaaagtctacaccactgtacttggcgttaaatcttgctgaattcgtggtaagctgttaccatgtctacattttgtagaatgattttggtctgcagcaaaattcgatttcacttctcatacccctttccttccacttgaaatgcaatttagacagaggccctgtggtgaaagttgcaatattaagtttacctttagaagatcccttctcaaactcagaaccctagcagtgttaccttaaacaaaaatgagctcgagaaaaaagtagctcagttacagagaagcaaatcgagttatttcccacataaaaagtttcccagattctaagaattgcagtatcctgtaccctaaaatttttcaaggtgactcctgttgtcgtctgttgataactttaataaaggtcatttaaggacataagtttttaaagactcccaaagtgaaacttaaacattttcgggattatcgattgcatatatcagtttatgctgtgtgctgaattactatgccatgtgctattttagtgtttggggaaaatgaaaaataaaatttgttctttagcttaataaatatgtcttattttata

SEQ ID NO: 132570 - DNA, 502 bp, Homo sapiens
  Payload ID: 5892
  Gene Symbol: FAM220A
  Gene Name: family with sequence similarity 220, member A
  ENST ID: ENST00000524898
  CDS Start-End: 143-502
attgttgtccggcaggtcagctgggcagggatctgcgaggaaggtgaccgctcctgttgtggttcatattgagatccattgaaggccctcccagactgacgaaggcgtgacctcaggcccaccgcatccaagaacacgaagcatgagggacagaagagggcccctcggcacctgcctggcacaagtgcagcaggccggaggaggtgactcggacaaactatcatgcagccttaagaaaagaatgccggagggcccttggcctgcagatgcaccctcctggatgaataagcctgtggttgatggaaattcacaaagtgaggcattatcactggaaatgagaaaggatccgagcggggctggcctctggcttcacagtggcggcccagtgcttccatatgtgagagaatcagtaagaagaaatccagcctcagcagccactccgagcacagccgtgggtttgttccctgctccaacagagtgttttgctcgggtgtcctgcagt

SEQ ID NO: 132571 - DNA, 558 bp, Homo sapiens
  Payload ID: 5892
  Gene Symbol: FAM220A
  Gene Name: family with sequence similarity 220, member A
  ENST ID: ENST00000530143
  CDS Start-End: 232-558
gtgacgtcaggctgcgcggccaggctggtacaggcggctgctcgcggaggcacttctccgagcgtgacgtgcggactccgctccactgcggcccgcccgcccgccggtctagccgccgcctccttcgctccctgagcacgccaggcgagggttcatattgagatccattgaaggccctcccagactgacgaaggcgtgacctcaggcccaccgcatccaagaacacgaagcatgagggacagaagagggcccctcggcacctgcctggcacaagtgcagcaggccggaggaggtgactcggacaaactatcatgcagccttaagaaaagaatgccggagggcccttggcctgcagatgcaccctcctggatgaataagcctgtggttgatggaaattcacaaagtgaggcattatcactggaaatgagaaaggatccgagcggggctggcctctggcttcacagtggcggcccagtgcttccatatgtgagagaatcagtaagaagaaatccagcctcagcagccactccgagcacagccgtgggtttgttccctgct

SEQ ID NO: 132572 - DNA, 207 bp, Homo sapiens
  Payload ID: 5892
  Gene Symbol: FAM220A
  Gene Name: family with sequence similarity 220, member A
  ENST ID: ENST00000578372
  CDS Start-End: 1-207
atggcggcggctctgtcgggcctggctgtccggctctcgcgctcggccgccgcccgctcctatggggtcttctgcaaggggctgactcgcacgctgctcatcttcttcgacctggcctggcggctgcgtatcaacttcccctacctctacatcgtggcttccatgatgctcaacgtccgcctgcaggttcatattgagatccattga

SEQ ID NO: 132573 - DNA, 2211 bp, Homo sapiens
  Payload ID: 5892
  Gene Symbol: FAM220A
  Gene Name: family with sequence similarity 220, member A
  Uniprot ID: Q7Z4H9
  ENST ID: ENST00000616824
  CDS Start-End: 469-1248
cggccaggctggtacaggcggctgctcgcggaggcacttctccgagcgtgacgtgcggactccgctccactgcggcccgcccgcccgccggtctagccgccgcctccttcgctccctgagcacgccaggcgagggtcagctgccggggcgacgcggcgcggagagggcgggcgggggggctgtgggagcgccggtctctatatggcggcggctctgtcgggcctggctgtccggctctcgcgctcggccgccgcccgctcctatggggtcttctgcaaggggctgactcgcacgctgctcatcttcttcgacctggcctggcggctgcgtatcaacttcccctacctctacatcgtggcttccatgatgctcaacgtccgcctgcaggttcatattgagatccattgaaggccctcccagactgacgaaggcgtgacctcaggcccaccgcatccaagaacacgaagcatgagggacagaagagggcccctcggcacctgcctggcacaagtgcagcaggccggaggaggtgactcggacaaactatcatgcagccttaagaaaagaatgccggagggcccttggcctgcagatgcaccctcctggatgaataagcctgtggttgatggaaattcacaaagtgaggcattatcactggaaatgagaaaggatccgagcggggctggcctctggcttcacagtggcggcccagtgcttccatatgtgagagaatcagtaagaagaaatccagcctcagcagccactccgagcacagccgtgggtttgttccctgctccaacagagtgttttgctcgggtgtcctgcagtggtgttgaagctctggggcggcgagactggctgggaggagggcccagggccactgacggccacagaggacagtgccccaaaggagagcctcgggtgtcacgactgccacgccatcaaaaagtgccggaaatgggaagttttcaggatgacccaccaagtgcttttcccaagggtctgggctctgagttggaacccgcttgcctgcactccatcctgtctgcaacgctgcacgtgtatcccgaagtgctcctgagtgaggagacaaaacgcattttccttgaccgtttaaagcccatgttttcaaagcaaacaatagaattcaagaaaatgcttaaaagcacctcagatggtctgcagataacactggggttactggctctgcaaccttttgaattagcaaatacattatgccatagttaaggtacaagcagaacaataccaatagattaattttaagagttgtcttagaatgatttctttcgcattaagtctggatgcaaactgtgcagcccttaggttcctgctgtagttttgtacgacctggcagacttaaagtaaattgagtttaaattcaaagccagttgatgcggaaggaacttttttggcatgtgttaaattgtgctttaaaagacatataaagaattgggaaacatttcaggagacgatcatagcctgtataaataccagattagaacatacggatttaccatgaagttctgtcttcaacatccattctaaagggctactgtcccaaatcctgtgtgtccttttgacttgtctgatcacccaatggaagtggatacttgtaaagtctacaccactgtacttggcgttaaatcttgctgaattcgtggtaagctgttaccatgtctacattttgtagaatgattttggtctgcagcaaaattcgatttcacttctcatacccctttccttccacttgaaatgcaatttagacagaggccctgtggtgaaagttgcaatattaagtttacctttagaagatcccttctcaaactcagaaccctagcagtgttaccttaaacaaaaatgagctcgagaaaaaagtagctcagttacagagaagcaaatcgagttatttcccacataaaaagtttcccagattctaagaattgcagtatcctgtaccctaaaatttttcaaggtgactcctgttgtcgtctgttgataactttaataaaggtcatttaaggacataagtttttaaagactcccaaagtgaaacttaaacattttcgggattatcgattgcatatatcagtttatgctgtgtgctgaattactatgccatgtgctattttagtgtttggggaaaatgaaaaataaaatttgttctttagcttaataaatatgtcttatttt

SEQ ID NO: 132574 - DNA, 1472 bp, Homo sapiens
  Payload ID: 5893
  Gene Symbol: FAM221A
  Gene Name: family with sequence similarity 221, member A
  Uniprot ID: A4D161
  ENST ID: ENST00000344962
  CDS Start-End: 90-986
ggagggggcgcggtaccgggagggaacggggcgggtcgggcttcgaggtcagctggtccgcagggaagcctttggcttccccaccggcaatggagcggttgacgttgcctctcggcggcgcggcggcggtggacgagtacctggagtaccggagaattgttggtgaggatgatggagggaaactttttactcctgaagaatatgaagaatacaaaagaaaagttttacctctgcgcttacaaaacagattatttgtgagctggcggtcaccaacagggatggattgtaaacttgtgggcccagagacactgtgtttttgtacacataggtataaacaacataaaactgacttggaagcgattcctcagcagtgccccattgatctgccctgccaagtgactggctgccagtgcagggcttacctttatgtccccttgaatggtagccagcccattcgctgcaggtgcaaacactttgctgatcagcacagtgctgcgcctggctttacatgcaatacatgttccaagtgttcaggattccatagctgcttcacttgtgcttgtggtcagcctgcatatgcccatgacacagtagtggaaactaagcaagaaagattggctcaggaaaaaccagtgggacaggacattccttatgcagccatgggaggattaactggtttcagctcgctggcggaaggctacatgcggttagatgacagtgggattggtgtaccttcagttgaatttttagaatctcccattacggcagtagacagcccattcctaaaagcatttcaagcatcatctagttcttctccagaaacgttaacagatgtaggtacaagtagtcaagtttcttcattaaggagacctgaagaggatgatatggctttctttgaaagacgataccaggaaaggatgaaaatggaaaaggctgctaagtggaaaggaaaagctccattgccatcagctacaaaaccttcatgaagactattggagaaattaaaaccatcatccaagtatctttttcatgtttatttaaatgtaataatacagtttatttttcctgaaattatttactttttttttttactgtataaatgtcttttgggatgtttccttaatttatttaaataactaaaaatgcctattacttttgtcaaaactcataatttactactttgtatgtacctttctttctcctgacaaatgaggttattttatatgagtctgtctgagagtacagtaaatgtttttagtacataataatttaactgtttcaggtatttaaaaaattaaagatattatcaagggttttggacaaacatatgagccatttttttgtcattcaaaatagtaagttaaaaacaagagaacaaaagaaaaaaatagttaaaatcattaatttttttatttttcaaactttgtaatgttatgttttcaaataaaaactatctcaaaattttacaacca

SEQ ID NO: 132575 - DNA, 1136 bp, Homo sapiens
  Payload ID: 5893
  Gene Symbol: FAM221A
  Gene Name: family with sequence similarity 221, member A
  Uniprot ID: A4D161
  ENST ID: ENST00000409994
  CDS Start-End: 36-650
ggtccgcagggaagcctttggcttccccaccggcaatggagcggttgacgttgcctctcggcggcgcggcggcggtggacgagtacctggagtaccggaggtataaacaacataaaactgacttggaagcgattcctcagcagtgccccattgatctgccctgccaagtgactggctgccagtgcagggcttacctttatgtccccttgaatggtagccagcccattcgctgcaggtgcaaacactttgctgatcagcacagtgctgcgcctggctttacatgcaatacatgttccaagtgttcaggattccatagctgcttcacttgtgcttgtggtcagcctgcatatgcccatgacacagtagtggaaactaagcaagaaagattggctcaggaaaaaccagtgggacaggacattccttatgcagccatgggaggattaactggtttcagctcgctggcggaaggctacatgcggttagatgacagtgggattgtaggtacaagtagtcaagtttcttcattaaggagacctgaagaggatgatatggctttctttgaaagacgataccaggaaaggatgaaaatggaaaaggctgctaagtggaaaggaaaagctccattgccatcagctacaaaaccttcatgaagactattggagaaattaaaaccatcatccaagtatctttttcatgtttatttaaatgtaataatacagtttatttttcctgaaattatttactttttttttttactgtataaatgtcttttgggatgtttccttaatttatttaaataactaaaaatgcctattacttttgtcaaaactcataatttactactttgtatgtacctttctttctcctgacaaatgaggttattttatatgagtctgtctgagagtacagtaaatgtttttagtacataataatttaactgtttcaggtatttaaaaaattaaagatattatcaagggttttggacaaacatatgagccatttttttgtcattcaaaatagtaagttaaaaacaagagaacaaaagaaaaaaatagttaaaatcattaatttttttatttttcaaactttgtaatgttatgttttcaaataaaaactatctcaaaattttacaacca

SEQ ID NO: 132576 - DNA, 761 bp, Homo sapiens
  Payload ID: 5893
  Gene Symbol: FAM221A
  Gene Name: family with sequence similarity 221, member A
  ENST ID: ENST00000409653
  CDS Start-End: 36-758
ggtccgcagggaagcctttggcttccccaccggcaatggagcggttgacgttgcctctcggcggcgcggcggcggtggacgagtacctggagtaccggaggtataaacaacataaaactgacttggaagcgattcctcagcagtgccccattgatctgccctgccaagtgactggctgccagtgcagggcttacctttatgtccccttgaatggtagccagcccattcgctgcaggtgcaaacactttgctgatcagcacagtgctgcgcctggctttacatgcaatacatgttccaagtgttcaggattccatagctgcttcacttgtgcttgtggtcagcctgcatatgcccatgacacagtagtggaaactaagcaagaaagattggctcaggaaaaaccagtgggacaggacattccttatgcagccatgggaggattaactggtttcagctcgctggcggaaggctacatgcggttagatgacagtgggattggtgtaccttcagttgaatttttagaatctcccattacggcagtagacagcccattcctaaaagcatttcaagcatcatctagttcttctccagaaacgttaacagatgtaggtacaagtagtcaagtttcttcattaaggagacctgaagaggatgatatggctttctttgaaagacgataccaggaaaggatgaaaatggaaaaggctgctaagtggaaaggaaaagctccattgccatcagctacaaaaccttcatgaaga

SEQ ID NO: 132577 - DNA, 888 bp, Homo sapiens
  Payload ID: 5893
  Gene Symbol: FAM221A
  Gene Name: family with sequence similarity 221, member A
  Uniprot ID: A4D161
  ENST ID: ENST00000409192
  CDS Start-End: 90-878
ggagggggcgcggtaccgggagggaacggggcgggtcgggcttcgaggtcagctggtccgcagggaagcctttggcttccccaccggcaatggagcggttgacgttgcctctcggcggcgcggcggcggtggacgagtacctggagtaccggagaattgttggtgaggatgatggagggaaactttttactcctgaagaatatgaagaatacaaaagaaaagttttacctctgcgcttacaaaacagattatttgtgagctggcggtcaccaacagggatggattgtaaacttgtgggcccagagacactgtgtttttgtacacataggtataaacaacataaaactgacttggaagcgattcctcagcagtgccccattgatctgccctgccaagtgactggctgccagtgcagggcttacctttatgtccccttgaatggtagccagcccattcgctgcaggtgcaaacactttgctgatcagcacagtgctgcgcctggctttacatgcaatacatgttccaagtgttcaggattccatagctgcttcacttgtgcttgtggtcagcctgcatatgcccatgacacagtagtggaaactaagcaagaaagattggctcaggaaaaaccagtgggacaggacattccttatgcagccatgggaggattaactggtttcagctcgctggcggaaggctacatgcggttagatgacagtgggattgtaggtacaagtagtcaagtttcttcattaaggagacctgaagaggatgatatggctttctttgaaagacgataccaggaaaggatgaaaatggaaaaggctgctaagtggaaaggaaaagctccattgccatcagctacaaaaccttcatgaagactattgg

SEQ ID NO: 132578 - DNA, 571 bp, Homo sapiens
  Payload ID: 5893
  Gene Symbol: FAM221A
  Gene Name: family with sequence similarity 221, member A
  ENST ID: ENST00000446234
  CDS Start-End: 36-332
ggtccgcagggaagcctttggcttccccaccggcaatggagcggttgacgttgcctctcggcggcgcggcggcggtggacgagtacctggagtaccggagaattgttggtgaggatgatggagggaaactttttactcctgaagaatatgaagaatacaaaagaaaagttttacctctgcgcttacaaaacagattatttgtgagctggcggtcaccaacagggatggattgtaaacttgtgggcccagagacactgtgtttttgtacacatagtagagacggagggtttcaccgtgttagccaggatggtctggatctcctgaccttgtgatctgcccgcctcagcctcccaaagtgctgggattacaggtataaacaacataaaactgacttggaagcgattcctcagcagtgccccattgatctgccctgccaagtgactggctgccagtgcagggcttacctttatgtccccttgaatggtagccagcccattcgctgcaggtgcaaacactttgctgatcagcacagtgctgcgcctggctttacatgcaatacatgttccaagtg

SEQ ID NO: 132579 - DNA, 4090 bp, Homo sapiens
  Payload ID: 5893
  Gene Symbol: FAM221A
  Gene Name: family with sequence similarity 221, member A
  ENST ID: ENST00000429719
  CDS Start-End: 53-397
gggcttcgaggtcagctggtccgcagggaagcctttggcttccccaccggcaatggagcggttgacgttgcctctcggcggcgcggcggcggtggacgagtacctggagtaccggagaattgttggtgaggatgatggagggaaactttttactcctgaagaatatgaagaatacaaaagaaaagttttacctctgcgcttacaaaacagattatttgtgagctggcggtcaccaacagggatggattgtaaacttgtgggcccagagacactgtgtttttgtacacatagggtcttactctgtcactcaggttggagtgcagtggcacgatcttggctcattgcagcctcgacctcctgggctcaagcgatccttcgacctcagcctcccaagtagctgggaccacaggcgtctgccaccacatccagctaatttttgtatttttttgtagagaagtggtttggctttgttacccagactggtctggaactcctgggcttaagttatctgtctacctcgggctttccaaagtactcagattacacgtgtgcgccaccatgctcagctgacccaactcaactttgatggagaagttattatatttagtactgatccactcagtgagatttcttccaaactttttcaccccactattaaagtggtatatgattatcaaggaaaatgggggatatatagaaacatagaatatattctatatacaatatatagaagcagctcactacccaaagccagctgctagttttttttttttacaatatctgtatgactttttcttttttttttgagacggagtttcactcttgttgcccaggctggagtgcagtggcgcgacctcagctcactacaacctctgcctcgtgggttcaagcgattctcctgcctcagcctcctgagtagctgggattacaggcatgcaccaccatgccctgctaattttgtatttttagcagagacgggatttctccatgttggtcaggctgggctcgaactcccagcctcaggtgatccacctgccttggcctcccacagtgctgggattacaggcatgagccactgtgccatttaactgttgtgaagtatgtgtgtgcataaaatactgagccactttttaatgacagaatcatagaaatatgtttccacattgttatgtgctgatcaaaaacaagatttttaatacctgccagctagtccagctagtccagtggtgtttatctgtgttctccggagctgtgagggagccttgggggtgtgccaggtggaagggcaggttagaaggggaaactctattctgttcttcctttcgctttaaccaattctgcatttgttttatgtattctggttctataaaagattttatttgacaaaagggtttcactgctaaaatgtttgaaaactgttgtctagtaatttacttactggttctcttatgtcgtgtgggtgtgtgtataatgtagctgatgtaagtactattgctaatattattggtatgcataaagctttttctatatatggaattattttcttagggtatattttccaaaaatgaaatttctggttcaaagaatggaccttttcaagtttcttgaaacattattaaatagaatttgttcttttgtaacactcttttttttttttttttttttgagacagagcctcgcctgttgcccaggctggagtacagtggtgccatctcagctcactgcaacctctgcctcctgggttcaagggattctcctgcctcagcctcccgagtagctgggactacaggcatacaccaccatgctgggctaatttttgtatttttagtagagatggggttttcatcatgttgcccaggttggtcttgaactcctgagctcaagtgatccacctgccttggcctcccaaagtgctgggattacaggcatgtgccacaggctcctggccctttcgtaacactcttgatagcattgtgtattacatatagtttttaaaaactttgactctttttgctaagttaaaatggtatctcattttaatttgcatttcttttttttttcttttgagacggagtctttctctgttgcccaggctggagtgcagtggcgtgatctcggctcactgcaagctccgcctcccgggttcacaccattctcctgcttcagcctcccaagtagctgggactacaggtgcccaccaccacgctcggctaattttttgtatttttagtagagacggagggtttcaccgtgttagccaggatggtctggatctcctgaccttgtgatctgcccgcctcagcctcccaaagtgctgggattacaggtgtgagccaccgcaaccggcctttaatttgcatttctttgattaatattgagaataataaatttagtattattttactgaatatcacctatgagaagaaagtgagtgatctatttaagaaaattacaatactataagaaggagctttggctttcaaaaatattgataatttattttgaagtcaaaagtcatattaaaataaattacatcaacacatgtttattgaatatatttctattttaagtagcaaacatgcaaataaatttaagtaatgcactgtgacaaaaataacattggtaaagaactttttcttttcttttttttttttttgagatggagtttcgctcttgttgcccagggtggagtgcaatggtacgatctgggctcaccgcaacctctgcctcctgggttcaagcagttctcctgcctcagcctcctgagtagctggggttacaggcatgtgccacaacggccagctaattttttatttttagtagagacggggtttctctatattggtcaggctggtctcgaactcccgacctcaggtgatccgcccgcctcagcctcccaaagtgctgggattacaggcatgagccactgcgcccggcctgaactttttcatactcttaggctgtgcttctctattaaggaatctgtagaggtataaacaacataaaactgacttggaagcgattcctcagcagtgccccattgatctgccctgccaagtgactggctgccagtgcagggcttacctttatgtccccttgaatggtagccagcccattcgctgcaggtgcaaacactttgctgatcagcacagtgctgcgcctggctttacatgcaatacatgttccaagtgttcaggattccatagctgcttcacttgtgcttgtggtcagcctgcatatgcccatgacacagtagtggaaactaagcaagaaagattggctcaggaaaaaccagtgggacaggacattccttatgcagccatgggaggattaactggtttcagctcgctggcggaaggctacatgcggttagatgacagtgggattggtagatggatccttctgagagctgagcgggactggggagcagaatgtgttccctgtctacttgaaacacagtaggtacaagtagtcaagtttcttcattaaggagacctgaagaggatgatatggctttctttgaaagacgataccaggaaaggatgaaaatggaaaaggctgctaagtggaaaggaaaagctccattgccatcagctacaaaaccttcatgaagactattggagaaattaaaaccatcatccaagtatctttttcatgtttatttaaatgtaataatacagtttatttttcctgaaattatttactttttttttttactgtataaatgtcttttgggatgtttccttaatttatttaaataactaaaaatgcctattacttttgtcaaaactcataatttactactttgtatgtacctttctttctcctgacaaatgaggttattttatatgagtctgtctgagagtacagtaaatgtttttagtacataataatttaactgtttcaggtatttaaaaaattaaagatattatcaagggttttggacaaacatatgagccatttttttgtcattcaaaatagtaagttaaaaacaagagaacaaaagaaaaaaatagttaaaatcattaatttttttatttttcaaactttgtaatgttatgttttcaaataaaaactatctcaaaatttt

SEQ ID NO: 132580 - DNA, 1167 bp, Homo sapiens
  Payload ID: 5894
  Gene Symbol: FAM221B
  Gene Name: family with sequence similarity 221, member B
  ENST ID: ENST00000377984
  CDS Start-End: 264-1167
gctgaggcacatccacaaccaagagcctttcctccctgaggatcaacacctccccctgccatcctaagtcaaggtcttgacctaaggacttgtaacaaccaagccaaagcccagaggctacttgggaggctgaggcaggagaatcacttgaacccgggaggcggaggttgcagtgaaccgagattgcgccactgcactccagtctgggcaacagagcgagactccatcacaaaaagagaagagaagagaaggccagcaggcagatggaagcacatgagatcatagaagagcctcatatcaccatggatgcagagaagcaccccccttcaaaggacccctctgctgaggacttacaggagaaccatatctctgaaagcttcttgaagccttccacctctgagaccccgttagagccccatacctctgaatcccctttggtgccatccccttcccagatccccttagaggcccattcccctgaaacccatcaggagccttccatctctgagactccttcagagacccctacctatgaggcttcattggatagtcccatctcagtggtgccagagaaacaccttactcttcctccccaatcacgagactatgtctgtctgtcttcttctgatactctgaaggaagacctctcctctgagtcttcttccaatgaggtcccatggacaaggaggtctacccatctctctgaatctgagagccttccagaacactgtctttcaggcccttcatcccaggtccaagtggacacaaccgaaaagcaggaggaagaagcaggagaggttgaaaagggagtagatgccagtgacagcactgctcacacagcccaacctggacaccaactaggtaacacagcccgcccagtgttccctgctaggcagacagagctggtggaagtggctaaggcaatgcatagagaggagtttggtgctcaagtgaacaatcttttccagtgggagaaggatgcagccctgaatgccatccagacaggtctctacattggctggcgctgcccccattacctatgggactgtttccggattggggatgagtccagatgcttttgtggacacttgttgagagagcaccggatcatctcagacatatcggtgccctgcaaggtaagccagtgccgctgcttcatgttctgct

SEQ ID NO: 132581 - DNA, 3763 bp, Homo sapiens
  Payload ID: 5894
  Gene Symbol: FAM221B
  Gene Name: family with sequence similarity 221, member B
  Uniprot ID: A6H8Z2
  ENST ID: ENST00000388950
  CDS Start-End: 286-1308
ggttccggaggcttcagtcaagaccctccctcattggccctagaccccttgtccctacccacttccccaggtcatgccagagctcctttgcgaagttctgcagatatccaagtccccttcccagatagcagactttcaggcaaggcatttcaacactcagcacctgcagctgaggcacatccacaaccaagagcctttcctccctgaggatcaacacctccccctgccatcctaagtcaaggtcttgacctaaggacttgtaacaaccaagccaaagcccagaggatggaagcacatgagatcatagaagagcctcatatcaccatggatgcagagaagcaccccccttcaaaggacccctctgctgaggacttacaggagaaccatatctctgaaagcttcttgaagccttccacctctgagaccccgttagagccccatacctctgaatcccctttggtgccatccccttcccagatccccttagaggcccattcccctgaaacccatcaggagccttccatctctgagactccttcagagacccctacctatgaggcttcattggatagtcccatctcagtggtgccagagaaacaccttactcttcctccccaatcacgagactatgtctgtctgtcttcttctgatactctgaaggaagacctctcctctgagtcttcttccaatgaggtcccatggacaaggaggtctacccatctctctgaatctgagagccttccagaacactgtctttcaggcccttcatcccaggtccaagtggacacaaccgaaaagcaggaggaagaagcaggagaggttgaaaagggagtagatgccagtgacagcactgctcacacagcccaacctggacaccaactaggtaacacagcccgcccagtgttccctgctaggcagacagagctggtggaagtggctaaggcaatgcatagagaggagtttggtgctcaagtgaacaatcttttccagtgggagaaggatgcagccctgaatgccatccagacagacagaattcggaactcctctagtggaatcctggctcccgcccacctgcattgtgactgcctataccttgctctctcaacaaagcctccctggtgtaagggggcactggcactacaggcaatcagcatcaagacagaagaagcaaagccaaaagccacatctagacaggctttagatcctgacagactatgggtctctacattggctggcgctgcccccattacctatgggactgtttccggattggggatgagtccagatgcttttgtggacacttgttgagagagcaccggatcatctcagacatatcggtgccctgcaaggtaagccagtgccgctgcttcatgttctgctttatcccatcacgcccagaggaggtgggtgagttctggctcaagagacgggccacctttgaccccaaggcctggagggcccaatgtcgctgcaaacacagccacgaagaacatgcagccactgggccccatccctgcaggcatcatggctgttgctgcggctgttttgagtctaatttcctctgtgcggcctgtgaccggcgctgggaggaacacgagactttctttgacacccagaagacccggcaacgaggaggaaggcctcgcgggacagacactgtcagcaactggcacaggcctttgtgagtctggcccagatcagcaataaaagaggagtcattggaacctgacttggctctatatggggcaggtagatcccagcccagggagagactgcctaataacttagagttgacacctattagacacaggagaaagcctggatctggccatctgcctccatcacactcacattcaagctgcctgttgaaggaaagtggcttcaaggaagtcaagaagggaggaagtttcaagaaggatagagtgggaagtgatgttagatgcagttggggcaccaataagataaagactgaaaagtgtccattgggttttgcaattagaagatctttgggaacatcggagagtgcagtttcacactggtgcagtggaggcaggagtcaaacagcagtgagtttcaaggagtctcttaaagaagcttggatgaaaagtacaaaagtaaagtcagacaatatccagagggagttgtggagtcaaggaagtacttttgtaggaaggaaaaggggaagaggccagtagactaaaggaccttgaaggacccagaagagagagaagagatgcctggtgagacaagatcccagagatggaggaaagggatgaggtcaaagcagaggtgaagggattttctctggacaggagaaacaccacttcctatgaccaagacgaaggaagaggatggagccttcctagagtttcagggaacaagaacctgtggaagttcccctctgatggcttctatatgccctgtgaagtaggagataaggccaatggctggggtccaggggaagagggataagagtagggagcaggagacaagaagagaaaggggaaggtttgggaaggctaatgtagggaactggagaaaaacctcatcagtgggtagttcaggattcgggcacagttggaagtgagaacctagttagagaagcagagaatccaaatatttaatgggttgatgatgtgagggtgtcagggaggaagatcaggaaaactaagcaaaagaaggcatgaggatgtgaagggagcatacagcaccaatagggaaagaaagtgatgccaggaggcaaatgacagattgaaaaagggagcagtcaaaggaagagaagtctctaatgaggtacagtagcagacgtaggggcaggggttggagtacaagagacagtgttcagaggctgcagagcataacatctttcagatgagggcaagtgaaggtgataagtgcttgaagtagagaaaactgtgggccaaggatcaaaatcagtgaatgtgggaagtcacaagggagtccataggttcttatgggagtaggagattccagcactaatgggctctgtgaacccaggcaagtcactgtccctctttaggctgagtttctggacctgtaaaacaggaataacctctgtgttgcctactttctatgagaaccaaagaaataactaatttcaaagtgctttgtatccacctatcctccagactggcttccttcctcttcctagatcccagatccacttatctctcgcccttctccagggcaactctagggtctcccagtgtcccagaggcaccacagagaactgcagcctctggggcccagagaagaggccattctacatttcctcacaattaggggggccatctgttcctccaagggaaggaatgcaatctggactgctaggatccctggggaaaatcacagaatcaaatgtctgccctttagaggagaaaggattttctaacaataatatagctatacaaaagagattgttatatctctagaagcaaagttccccaacagtggttatatgccccatgataaccattcacctaaaactaattcaactaatagtcaacaatagagttaggattactatgataaactcattgaaggaaataataagcagccaatacaaactatatttacgtagactgtaaaaatatgaaaaattgattacacatgggttagtatcatatgcaatacatattacatattatgaaaaaaagacaggaaacaccaaatgttattcattcaacaattactgaccacctatatgtatcaggtcatgtgtttaaaaaaaaaaaaaagaaaa

SEQ ID NO: 132582 - DNA, 2931 bp, Homo sapiens
  Payload ID: 5894
  Gene Symbol: FAM221B
  Gene Name: family with sequence similarity 221, member B
  Uniprot ID: A6H8Z2
  ENST ID: ENST00000423537
  CDS Start-End: 271-1479
agtcaagaccctccctcattggccctagaccccttgtccctacccacttccccaggtcatgccagagctcctttgcgaagttctgcagatatccaagtccccttcccagatagcagactttcaggcaaggcatttcaacactcagcacctgcagctgaggcacatccacaaccaagagcctttcctccctgaggatcaacacctccccctgccatcctaagtcaaggtcttgacctaaggacttgtaacaaccaagccaaagcccagaggatggaagcacatgagatcatagaagagcctcatatcaccatggatgcagagaagcaccccccttcaaaggacccctctgctgaggacttacaggagaaccatatctctgaaagcttcttgaagccttccacctctgagaccccgttagagccccatacctctgaatcccctttggtgccatccccttcccagatccccttagaggcccattcccctgaaacccatcaggagccttccatctctgagactccttcagagacccctacctatgaggcttcattggatagtcccatctcagtggtgccagagaaacaccttactcttcctccccaatcacgagactatgtctgtctgtcttcttctgatactctgaaggaagacctctcctctgagtcttcttccaatgaggtcccatggacaaggaggtctacccatctctctgaatctgagagccttccagaacactgtctttcaggcccttcatcccaggtccaagtggacacaaccgaaaagcaggaggaagaagcaggagaggttgaaaagggagtagatgccagtgacagcactgctcacacagcccaacctggacaccaactaggtaacacagcccgcccagtgttccctgctaggcagacagagctggtggaagtggctaaggcaatgcatagagaggagtttggtgctcaagtgaacaatcttttccagtgggagaaggatgcagccctgaatgccatccagacaggtctctacattggctggcgctgcccccattacctatgggactgtttccggattggggatgagtccagatgcttttgtggacacttgttgagagagcaccggatcatctcagacatatcggtgccctgcaaggtaagccagtgccgctgcttcatgttctgctttatcccatcacgcccagaggaggtgggtgagttctggctcaagagacgggccacctttgaccccaaggcctggagggcccaatgtcgctgcaaacacagccacgaagaacatgcagccactgggccccatccctgcaggcatcatggctgttgctgcggctgttttgagtctaatttcctctgtgcggcctgtgaccggcgctgggaggaacacgagactttctttgacacccagaagacccggcaacgaggaggaaggcctcgcgggacagacactgtcagcaactggcacaggcctttgtgagtctggcccagatcagcaataaaagaggagtcattggaacctgacttggctctatatggggcaggtagatcccagcccagggagagactgcctaataacttagagttgacacctattagacacaggagaaagcctggatctggccatctgcctccatcacactcacattcaagctgcctgttgaaggaaagtggcttcaaggaagtcaagaagggaggaagtttcaagaaggatagagtgggaagtgatgttagatgcagttggggcaccaataagataaagactgaaaagtgtccattgggttttgcaattagaagatctttgggaacatcggagagtgcagtttcacactggtgcagtggaggcaggagtcaaacagcagtgagtttcaaggagtctcttaaagaagcttggatgaaaagtacaaaagtaaagtcagacaatatccagagggagttgtggagtcaaggaagtacttttgtaggaaggaaaaggggaagaggccagtagactaaaggaccttgaaggacccagaagagagagaagagatgcctggtgagacaagatcccagagatggaggaaagggatgaggtcaaagcagaggtgaagggattttctctggacaggagaaacaccacttcctatgaccaagacgaaggaagaggatggagccttcctagagtttcagggaacaagaacctgtggaagttcccctctgatggcttctatatgccctgtgaagtaggagataaggccaatggctggggtccaggggaagagggataagagtagggagcaggagacaagaagagaaaggggaaggtttgggaaggctaatgtagggaactggagaaaaacctcatcagtgggtagttcaggattcgggcacagttggaagtgagaacctagttagagaagcagagaatccaaatatttaatgggttgatgatgtgagggtgtcagggaggaagatcaggaaaactaagcaaaagaaggcatgaggatgtgaagggagcatacagcaccaatagggaaagaaagtgatgccaggaggcaaatgacagattgaaaaagggagcagtcaaaggaagagaagtctctaatgaggtacagtagcagacgtaggggcaggggttggagtacaagagacagtgttcagaggctgcagagcataacatctttcagatgagggcaagtgaaggtgataagtgcttgaagtagagaaaactgtgggccaaggatcaaaatcagtgaatgtgggaagtcacaagggagtccataggttcttatgggagtaggagattccagcactaatgggctctgtgaacccaggcaagtcactgtccctctttaggctgagtttctggacctgtaaaacaggaataacctctgtgttgcctactttctatgagaaccaaagaaataactaatttcaaagtgctttgtatcca

SEQ ID NO: 132583 - DNA, 719 bp, Homo sapiens
  Payload ID: 5894
  Gene Symbol: FAM221B
  Gene Name: family with sequence similarity 221, member B
  ENST ID: ENST00000472182
  CDS Start-End: 449-719
agtcaagaccctccctcattggccctagaccccttgtccctacccacttccccaggtcatgccagagctcctttgcgaagttctgcagatatccaagtccccttcccagatagcagactttcaggcaaggcatttcaacactcagcacctgcagctgaggcacatccacaaccaagagcctttcctccctgaggatcaacacctccccctgccatcctaagtcaaggtcttgacctaaggacttgtaacaaccaagccaaagcccagaggccgggcatggtggcacacgcctgtaattccagctacttgggaggctgaggcaggagaatcacttgaacccgggaggcggaggttgcagtgaaccgagattgcgccactgcactccagtctgggcaacagagcgagactccatcacaaaaagagaagagaagagaaggccagcaggcagatggaagcacatgagatcatagaagagcctcatatcaccatggatgcagagaagcaccccccttcaaaggacccctctgctgaggacttacaggagaaccatatctctgaaagcttcttgaagccttccacctctgagaccccgttagagccccatacctctgaatcccctttggtgccatccccttcccagatccccttagaggcccattcccctgaaacccatcaggagccttccatctctgagactccttcagagacccctacctatg

SEQ ID NO: 132584 - DNA, 2731 bp, Homo sapiens
  Payload ID: 5895
  Gene Symbol: FAM222A
  Gene Name: family with sequence similarity 222, member A
  Uniprot ID: Q5U5X8
  ENST ID: ENST00000358906
  CDS Start-End: 167-1525
actttctaaatcacagtgcctgtggccggatgacatggagggagctccctgaccataggaggggttagagacacgacgcccctctaccctcactcacagcagaggtggaaagctggagactgacccacacatggagcgcaccccactggggacccccagctcagccatgctggcctgtctgcagaggacccagaacgccccgggccaacacctggcctgcccgagcaagagcctggagctgcgcaagtgcgaggcggtggccagcgccatgcattcctcccgctacccgagcccagcagaactggacgcctatgccgagaaggtggccaacagcccgctgtccatcaagatcttccccaccaacatccgtgtgccccagcacaagcacctcagccgcacagtcaatggctatgacaccagtggccagcgctacagcccctacccacagcacaccgctggctaccagggccttctggccattgtcaaggccgcggtttcctcctccagcacggccgcaccagctgggcccgccaaaagtgtgctcaagagcgccgagggcaagcggaccaagctgtcaccggccgccgtgcaggtgggcattgcgccctacccagtgcccagcactctgggtcccttggcctaccccaagccacctgaggcgcctgctccaccacccggcctgcccgcagccgccactgccgcctccgtcatccccctgccgggccggggcctgcccctgccaccttccaacctgccctccatccacagcctcctgtaccagctcaaccagcagtgccaggccccgggcgccgcaccccctgcctgccagggcatggctattccccatcccagccctgccaagcacggcccagtgcccagcttccccagcatggcctactcggctgcagccggtctgcccgactgccggaaaggcactgagctgggccagggagccacccaagccttgacgttggctggggccgccaagcctgcagggtacgcagacagcggcctggattacctgctgtggccgcagaaaccgcccccaccgccgccccagccactgcgtgcctacagtgggagcacggtggccagcaagtcccctgaggcttgcgggggccgggcatacgagcgggccagcgggtcacccctcaactgtggcgtggggctgcccaccagcttcaccgtaggccagtactttgcggccccgtggaacagtgtgctggtgacacccaccagcgactgctacaacccagcggcggcggtggtggtcacggagctggggccgggggcagcccgggagctggctgggccccctgcagatgccctctcgggcctgcccagcaagagtgtgtgcaacacatcggtgctgagcagcagcctgcagtcactggagtatctcatcaacgacatccggccgccctgcatcaaggagcagatgctgggcaagggctatgagacggtggccgtgccccggctactcgaccaccagcatgcccacatccgcctacccgtctacagataaggcctgccctgcggacatacggacatgcggacagggcgcagagccgggaggcaggccgcagaacagggtgggcggctcgcaggggcgctcagccccaccctgtgcctgctgatgcccacaggggagccaggctggctgccgcctcgctgtggccggatggagggtggcagggcaacctcacataccaaggcccctccccaccatcggttgccccaggacacagtgagggcctgggggcagccactgacgcccatgccttcctttatctaagctggcagaggcagggagagagaaaccactcaaaaacaggaatggttctttctgggcctcctgggacaggggcccaggccaaggtggggtgcaggaggaaacaggcgcaccagagtcagggtgggggcagggcagcccccccaggggtcaggcagctgtgtctccccacactggctccccagtattctggaaaaggggtacaggaggccgataggaagtcactgggcccaaagtgtctccccaccagccaggtgaagaccactctgacagaggctccagggactataccagtccccctgttcctccttcccctacccccaccattccttcctaacacagagttgcacccccatccccattctccaaaccctggactaccatattcccccttccctccaatacatcttatagggctgctgggtacagttgttcaggctgtgcactgcacaagggcaccttgtccaaggagacaccactttcacccaaacttgtatatttattacaattttctgcatcttgaggaaggggcgtcattttcctgttcgcacaaaggcaccacaggggctaacagtgggcctgcaatcttagatcccatccttgccttcttcgagggatctcttgggaccctcctggttttaactgggaggcccagaccaactcctttcctgcaaaccaccctccaaggcctgtcccacacgatcaaggcagggaaagataggcaggagtcccctcacgaagtcctcaagtcctggcccctctggcgctctggaagcggtactgtatctctctccaaggcctggtcaagcactaagtgcatttacaaatctctgagaatgttttttttatactaaaattgaccattatattctactgtgagaagtgcagtctgcactatattgttttaaaaacgaagagaaagaagaaaaaggaaaacac

SEQ ID NO: 132585 - DNA, 3294 bp, Homo sapiens
  Payload ID: 5895
  Gene Symbol: FAM222A
  Gene Name: family with sequence similarity 222, member A
  Uniprot ID: Q5U5X8
  ENST ID: ENST00000538780
  CDS Start-End: 717-2075
cgctgttcgccggcttcccctccccccacacccggggctcagagcaggaggaggaggggccggtgcattctcgccgctgttctttgcaacctgcaggggccggtgtatgtccggcgaggagccggggccgctgcgggtgcgtgcaacccccgaaggagacaatccctccacctcggggcgaacccgggggctgcaagccgcgggcgggcgggcgagcgagaggaagcaacaaagacaggctgcagctggggctggcgaaaggggccgcggccgccgggctcccagcgcgggcggagagggcgccctgggagcggcgcgggccgagctgcagccttgagcggggccccgaggggaggcgcagcgccgcccgccggacgtggcgatcacgggccccggcgaagatgcgtcgcctgagcgcccgcgcggcccccgtccggggcgggcgtgacccctgctgaacggagacctcccctcccccccgacttcggacggcgcaggccggcgccaggatagccctcaccgacagcgccccttcccacccggagagaggcatcgacccccaaggagggcttcgtcaggcagcctctgccactcctgcatggctgcgacccgtcgagcggagcgtcgtggtagctgagacctggtgcccttcgacggcctggctgatccgggacccagtcgcagagcgcaccccactggggacccccagctcagccatgctggcctgtctgcagaggacccagaacgccccgggccaacacctggcctgcccgagcaagagcctggagctgcgcaagtgcgaggcggtggccagcgccatgcattcctcccgctacccgagcccagcagaactggacgcctatgccgagaaggtggccaacagcccgctgtccatcaagatcttccccaccaacatccgtgtgccccagcacaagcacctcagccgcacagtcaatggctatgacaccagtggccagcgctacagcccctacccacagcacaccgctggctaccagggccttctggccattgtcaaggccgcggtttcctcctccagcacggccgcaccagctgggcccgccaaaagtgtgctcaagagcgccgagggcaagcggaccaagctgtcaccggccgccgtgcaggtgggcattgcgccctacccagtgcccagcactctgggtcccttggcctaccccaagccacctgaggcgcctgctccaccacccggcctgcccgcagccgccactgccgcctccgtcatccccctgccgggccggggcctgcccctgccaccttccaacctgccctccatccacagcctcctgtaccagctcaaccagcagtgccaggccccgggcgccgcaccccctgcctgccagggcatggctattccccatcccagccctgccaagcacggcccagtgcccagcttccccagcatggcctactcggctgcagccggtctgcccgactgccggaaaggcactgagctgggccagggagccacccaagccttgacgttggctggggccgccaagcctgcagggtacgcagacagcggcctggattacctgctgtggccgcagaaaccgcccccaccgccgccccagccactgcgtgcctacagtgggagcacggtggccagcaagtcccctgaggcttgcgggggccgggcatacgagcgggccagcgggtcacccctcaactgtggcgtggggctgcccaccagcttcaccgtaggccagtactttgcggccccgtggaacagtgtgctggtgacacccaccagcgactgctacaacccagcggcggcggtggtggtcacggagctggggccgggggcagcccgggagctggctgggccccctgcagatgccctctcgggcctgcccagcaagagtgtgtgcaacacatcggtgctgagcagcagcctgcagtcactggagtatctcatcaacgacatccggccgccctgcatcaaggagcagatgctgggcaagggctatgagacggtggccgtgccccggctactcgaccaccagcatgcccacatccgcctacccgtctacagataaggcctgccctgcggacatacggacatgcggacagggcgcagagccgggaggcaggccgcagaacagggtgggcggctcgcaggggcgctcagccccaccctgtgcctgctgatgcccacaggggagccaggctggctgccgcctcgctgtggccggatggagggtggcagggcaacctcacataccaaggcccctccccaccatcggttgccccaggacacagtgagggcctgggggcagccactgacgcccatgccttcctttatctaagctggcagaggcagggagagagaaaccactcaaaaacaggaatggttctttctgggcctcctgggacaggggcccaggccaaggtggggtgcaggaggaaacaggcgcaccagagtcagggtgggggcagggcagcccccccaggggtcaggcagctgtgtctccccacactggctccccagtattctggaaaaggggtacaggaggccgataggaagtcactgggcccaaagtgtctccccaccagccaggtgaagaccactctgacagaggctccagggactataccagtccccctgttcctccttcccctacccccaccattccttcctaacacagagttgcacccccatccccattctccaaaccctggactaccatattcccccttccctccaatacatcttatagggctgctgggtacagttgttcaggctgtgcactgcacaagggcaccttgtccaaggagacaccactttcacccaaacttgtatatttattacaattttctgcatcttgaggaaggggcgtcattttcctgttcgcacaaaggcaccacaggggctaacagtgggcctgcaatcttagatcccatccttgccttcttcgagggatctcttgggaccctcctggttttaactgggaggcccagaccaactcctttcctgcaaaccaccctccaaggcctgtcccacacgatcaaggcagggaaagataggcaggagtcccctcacgaagtcctcaagtcctggcccctctggcgctctggaagcggtactgtatctctctccaaggcctggtcaagcactaagtgcatttacaaatctctgagaatgttttttttatactaaaattgaccattatattctactgtgagaagtgcagtctgcactatattgttttaaaaacgaagagaaagaagaaaaaggaaaacacagatggtgtctca

SEQ ID NO: 132586 - DNA, 4033 bp, Homo sapiens
  Payload ID: 5896
  Gene Symbol: FAM222B
  Gene Name: family with sequence similarity 222, member B
  ENST ID: ENST00000341217
  CDS Start-End: 437-1741
tcttccttgctgtttcctctagcctagagttgtgaggtcacaattgcaagtgactttacggtcccctattgagttaaagatggagaagaaaaaggcctttgagcaatggctaaacattattcagtgtgagccactgccccatgttgtgttgatgccaatctgccatgctagcctgtctaccagggccaggtgacctgtcctttcagcttctttctcacacgcagatgaacactggacttcagaaattgtgaaggttccccagcggaaacacgttcgtcgtactgtgaacggcctcgacacatcagcccagcgctacagcccctacccgacacaggctgccaccaaggcaggcctgcttgccattgtcaaagtgccagccaaaagcatactcaaggactttgacggcacccgagcccggttgctccctgaggccatcatgaaccccccagtggcaccctatgctactgtggcacccagcactttagcccacccccaggcccaggctctggcccgccagcaggccctgcagcatgcacagaccctggcccatgcccctccccagacgctgcagcaccctcagggtatcccgccaccccaggcactgtcccaccctcagagcctccagcagcctcagggcctgggccaccctcagcccatggcccaaacccagggcttggtccaccctcaggccctggctcaccagggtctccagcacccccacaatcccttgctgcatggaggccggaagatgccagactcagatgcccccccgaatgtgaccgtgtctacctcaactatccccctttcaatggcggccactctgcagcacagccagcctccggacctgagtagcatcgtgcaccagatcaaccagttttgccagacgagggcaggcatcagcactacctcagtgtgtgagggccagatcgccaaccccagccccattagtcgcagtctgctcatcaatgcaagcacccgggtgtcgacccacagcgtccccacaccaatgccttcatgtgtggtcaatcccatggagcacacccacgcggccaccgccgcgttgcctgctgcaggtcctgtcaacctgcccacaggcatctctcgcgtccccactggctaccctagcgacctcaagccagtcacctggaaccagcaccagctggcccacctacagcagatgtgcagcgaggctagtgggacgccagcccctggcctgacaggcaagcatgcggcaggacgcgagttggcagggcctggctttgtgggcaaggcccctgcctacccgcaggaactctgcctggcgcagtccttccatctgaagccacccctggaaaagccgaccccatccccaccagtcaacggcatggcagccccattggcctaccccaatggtcactacttccaacccctgtggaacaacattctgcccactcccaatagcgacagctcggggtctcaggaccttgccatgccgttccacggtgggcagcccacaggtgcacccctcgactgtgcggcagctcccggggcccactaccgagcagggaccgggggcggtccagtggcaagccagaacagcttgatgcaaacagtggattacctaagtggggatttccaacaggcctgcttccgagaacagagcctggccatgctgagcaaggcccaccgagcccctggcaaccgagcccccgatcccacagagagtcgaagtcttcatattcagcacccagggtatagataggtagccctgctgccctccacgtgcaacacatcatacatcaccctcctaggtttagtcttttaagtaactggatagtttcaaagtttcactgctccagtgtgatcattcttagatgtctaagaaagggaatttggtgggatctaagtggggacagaaggggtcctctcgtcctcccctccagcaacttttggttttatgttagaacctaaccctaagcccaggcttttctctccactgactgcctgtcagctagtctctccaccttggccatttccagccagctcccacccatcttttcttgaatctcttcctgtttcccttaggacgactgaggtgtgggctgacggaatgccctagttgaggtagtataggtgctcaggcccctaatccagacctctacctgttgctaccccccttcccctccctccaggactaagaagcaagatttcccaggtgctctgaaagctaattacttactcatcgaaggatctcaaatcaaagctgacccagtcttcatatccttcaagttcctttccattcctcaaggctttgttttgtgtctatattgatcccacagccactgcacttgcccttgccacacttgatctcaagggcatcttggaagtatttgaccatttcttgagatatggggggaaaaagtctttgtattggcatcttggttccagactcccctttccaaacctagaaaaatacagtgacctttgagcatacccaagatccctttctcactgttgcctgtcccctaactcacctccccacagcccctatcctttccccctcaacaaaaacaaaatctaccttacttgaggaattaggtaggtaaggaatgatcacattggagtttgggattaaaaacaccaaaaaaaaaaaaatgcatttggttctctctacactggctaagaatattgctctacactgtaagttttaaacgttacgtttctgtatgaatgtagtgtgggtttgagtagcattgtgtgtgagtggccccacaggtacattcaccctctagtgcagcccctcagtttaatgaaggaaaaaaaaacaaacacaaagccttaagctctttgagtacttcctttaccaaatgagcatggttctaacacctggagctgggcctacattggaaacaagcccctcctgccctctgtccattcttagagcataccttcatccactccatgctcagcacgtctcatcccaagcgacaattagttggctagaaacacttttctgtaattttaaacttagactgttttgttacaaatttttgcaccattctgttaaagatgcagaattgggcttttttattttttacagatgaaataagcccttacctttcctcttgtctctggggaatgtcagctgatggttcttatttaaggttttgcattttgttcactatccactactgttcgttagccagaaattctctagtgatctgaagcaatgtgactgaagaccagttttaagttatgtgttggcaagttgccttatatttaaaaggaaaaagaaaaaaaaaaaagcctgattgtgttatgccaaatgatagcaacatgaagtcctaatttattgttcccaattgttttcctgccgtctgtgaacactggtacctccctgtcctgatcccccaggagcacctgtagcttctgactcaatgccttctccgaaggtgttggccgccatctcacccagggccctcttccagttcctgcttttctgagtcagatttaaagagcaccactgtcttccccctaccccttgcttgatctccaaagcagatattcttgctgtatttttttttcctccccaatacctctccctgaaaggtgagctgctattttaggaaactggaccagacaccaacttgggggctttaagtcaaacaacctcaaacccatctcttcctgtgtaggggtgcaagcctctgaagctctcactcccacccttagtctgcatggaaaatgtactgtgatccccctgcccccaactgccctcgcctttggtgtgagatgttccttctttcggagttcagcctgagtccctctcccctctgccagccaacccccagccagcaataagggtccaagccagggcctcctctccacactccctgtctccatcctacactaccctagggaatacctggattccccattctatccacatactgtagcattcattctccatctctctcacctcacctgtggtggtttatgggtgtgatggggtttttaagattattataaaccagtaaaaataagaaaacctcgc

SEQ ID NO: 132587 - DNA, 2836 bp, Homo sapiens
  Payload ID: 5896
  Gene Symbol: FAM222B
  Gene Name: family with sequence similarity 222, member B
  Uniprot ID: Q8WU58
  ENST ID: ENST00000452648
  CDS Start-End: 268-1956
agccggctgggggagggggtgtcggcgcaccgcggagtcctgcgctccgtgagcctggcacccggagcagccgcctccccctccccctgcctagaccgctagaagccccctctcttccatcctcccggggcgggggtgagctgggctcagctgcccaaggcgggcggggcggagccaggagccccacggagcgctgcggagcgaacctcacctttccagggcgcaagtgtgagccactgccccatgttgtgttgatgccaatctgccatgctagcctgtctaccagggccaggtgacctgtcctttcagcttctttctcacacgcagatgaacactggacttcagaaatgggacactacacagaaaatgagaactgctcactatcctaccccagccgaattggatgcgtatgctaagaaggtcgcaaacaacccactgactataaaaatcttccccaacagtgtgaaggttccccagcggaaacacgttcgtcgtactgtgaacggcctcgacacatcagcccagcgctacagcccctacccgacacaggctgccaccaaggcaggcctgcttgccattgtcaaagtgccagccaaaagcatactcaaggactttgacggcacccgagcccggttgctccctgaggccatcatgaaccccccagtggcaccctatgctactgtggcacccagcactttagcccacccccaggcccaggctctggcccgccagcaggccctgcagcatgcacagaccctggcccatgcccctccccagacgctgcagcaccctcagggtatcccgccaccccaggcactgtcccaccctcagagcctccagcagcctcagggcctgggccaccctcagcccatggcccaaacccagggcttggtccaccctcaggccctggctcaccagggtctccagcacccccacaatcccttgctgcatggaggccggaagatgccagactcagatgcccccccgaatgtgaccgtgtctacctcaactatccccctttcaatggcggccactctgcagcacagccagcctccggacctgagtagcatcgtgcaccagatcaaccagttttgccagacgagggcaggcatcagcactacctcagtgtgtgagggccagatcgccaaccccagccccattagtcgcagtctgctcatcaatgcaagcacccgggtgtcgacccacagcgtccccacaccaatgccttcatgtgtggtcaatcccatggagcacacccacgcggccaccgccgcgttgcctgctgcaggtcctgtcaacctgcccacaggcatctctcgcgtccccactggctaccctagcgacctcaagccagtcacctggaaccagcaccagctggcccacctacagcagatgtgcagcgaggctagtgggacgccagcccctggcctgacaggcaagcatgcggcaggacgcgagttggcagggcctggctttgtgggcaaggcccctgcctacccgcaggaactctgcctggcgcagtccttccatctgaagccacccctggaaaagccgaccccatccccaccagtcaacggcatggcagccccattggcctaccccaatggtcactacttccaacccctgtggaacaacattctgcccactcccaatagcgacagctcggggtctcaggaccttgccatgccgttccacggtgggcagcccacaggtgcacccctcgactgtgcggcagctcccggggcccactaccgagcagggaccgggggcggtccagtggcaagccagaacagcttgatgcaaacagtggattacctaagtggggatttccaacaggcctgcttccgagaacagagcctggccatgctgagcaaggcccaccgagcccctggcaaccgagcccccgatcccacagagagtcgaagtcttcatattcagcacccagggtatagataggtagccctgctgccctccacgtgcaacacatcatacatcaccctcctaggtttagtcttttaagtaactggatagtttcaaagtttcactgctccagtgtgatcattcttagatgtctaagaaagggaatttggtgggatctaagtggggacagaaggggtcctctcgtcctcccctccagcaacttttggttttatgttagaacctaaccctaagcccaggcttttctctccactgactgcctgtcagctagtctctccaccttggccatttccagccagctcccacccatcttttcttgaatctcttcctgtttcccttaggacgactgaggtgtgggctgacggaatgccctagttgaggtagtataggtgctcaggcccctaatccagacctctacctgttgctaccccccttcccctccctccaggactaagaagcaagatttcccaggtgctctgaaagctaattacttactcatcgaaggatctcaaatcaaagctgacccagtcttcatatccttcaagttcctttccattcctcaaggctttgttttgtgtctatattgatcccacagccactgcacttgcccttgccacacttgatctcaagggcatcttggaagtatttgaccatttcttgagatatggggggaaaaagtctttgtattggcatcttggttccagactcccctttccaaacctagaaaaatacagtgacctttgagcatacccaagatccctttctcactgttgcctgtcccctaactcacctccccacagcccctatcctttccccctcaacaaaaacaaaatctaccttacttgaggaattaggtaggtaaggaatgatcacattggagtttgggattaaaaacacc

SEQ ID NO: 132588 - DNA, 561 bp, Homo sapiens
  Payload ID: 5896
  Gene Symbol: FAM222B
  Gene Name: family with sequence similarity 222, member B
  ENST ID: ENST00000582059
  CDS Start-End: 108-194
ctttccagggcgcaaggtgtgtgtgtgctttttctaacgcgaccccgacttcagccgacttaacctttgtgagccactgccccatgttgtgttgatgccaatctgccatgctagcctgtctaccagggccaggtgacctgtcctttcagcttctttctcacacgcagatgaacactggacttcagaaattgtgaaggttccccagcggaaacacgttcgtcgtactgtgaacggcctcgacacatcagcccagcgctacagcccctacccgacacaggctgccaccaaggcaggcctgcttgccattgtcaaagtgccagccaaaagcatactcaaggactttgacggcacccgagcccggttgctccctgaggccatcatgaaccccccagtggcaccctatgctactgtggcacccagcactttagcccacccccaggcccaggctctggcccgccagcaggccctgcagcatgcacagaccctggcccatgcccctccccagacgctgcagcaccctcagggtatcccgccaccccaggcactgtcccaccctcagag

SEQ ID NO: 132589 - DNA, 4161 bp, Homo sapiens
  Payload ID: 5896
  Gene Symbol: FAM222B
  Gene Name: family with sequence similarity 222, member B
  Uniprot ID: Q8WU58
  ENST ID: ENST00000581407
  CDS Start-End: 183-1871
acacgctgcgcaggcgcaggagcggctccgggtagtccccacagctgcgccggtgactgaggggccgggcagtggagaagtggtggcggcgggcggcgggcggcaaaggagcagccatgagggccgggcccagtcaccgacctgtgagccactgccccatgttgtgttgatgccaatctgccatgctagcctgtctaccagggccaggtgacctgtcctttcagcttctttctcacacgcagatgaacactggacttcagaaatgggacactacacagaaaatgagaactgctcactatcctaccccagccgaattggatgcgtatgctaagaaggtcgcaaacaacccactgactataaaaatcttccccaacagtgtgaaggttccccagcggaaacacgttcgtcgtactgtgaacggcctcgacacatcagcccagcgctacagcccctacccgacacaggctgccaccaaggcaggcctgcttgccattgtcaaagtgccagccaaaagcatactcaaggactttgacggcacccgagcccggttgctccctgaggccatcatgaaccccccagtggcaccctatgctactgtggcacccagcactttagcccacccccaggcccaggctctggcccgccagcaggccctgcagcatgcacagaccctggcccatgcccctccccagacgctgcagcaccctcagggtatcccgccaccccaggcactgtcccaccctcagagcctccagcagcctcagggcctgggccaccctcagcccatggcccaaacccagggcttggtccaccctcaggccctggctcaccagggtctccagcacccccacaatcccttgctgcatggaggccggaagatgccagactcagatgcccccccgaatgtgaccgtgtctacctcaactatccccctttcaatggcggccactctgcagcacagccagcctccggacctgagtagcatcgtgcaccagatcaaccagttttgccagacgagggcaggcatcagcactacctcagtgtgtgagggccagatcgccaaccccagccccattagtcgcagtctgctcatcaatgcaagcacccgggtgtcgacccacagcgtccccacaccaatgccttcatgtgtggtcaatcccatggagcacacccacgcggccaccgccgcgttgcctgctgcaggtcctgtcaacctgcccacaggcatctctcgcgtccccactggctaccctagcgacctcaagccagtcacctggaaccagcaccagctggcccacctacagcagatgtgcagcgaggctagtgggacgccagcccctggcctgacaggcaagcatgcggcaggacgcgagttggcagggcctggctttgtgggcaaggcccctgcctacccgcaggaactctgcctggcgcagtccttccatctgaagccacccctggaaaagccgaccccatccccaccagtcaacggcatggcagccccattggcctaccccaatggtcactacttccaacccctgtggaacaacattctgcccactcccaatagcgacagctcggggtctcaggaccttgccatgccgttccacggtgggcagcccacaggtgcacccctcgactgtgcggcagctcccggggcccactaccgagcagggaccgggggcggtccagtggcaagccagaacagcttgatgcaaacagtggattacctaagtggggatttccaacaggcctgcttccgagaacagagcctggccatgctgagcaaggcccaccgagcccctggcaaccgagcccccgatcccacagagagtcgaagtcttcatattcagcacccagggtatagataggtagccctgctgccctccacgtgcaacacatcatacatcaccctcctaggtttagtcttttaagtaactggatagtttcaaagtttcactgctccagtgtgatcattcttagatgtctaagaaagggaatttggtgggatctaagtggggacagaaggggtcctctcgtcctcccctccagcaacttttggttttatgttagaacctaaccctaagcccaggcttttctctccactgactgcctgtcagctagtctctccaccttggccatttccagccagctcccacccatcttttcttgaatctcttcctgtttcccttaggacgactgaggtgtgggctgacggaatgccctagttgaggtagtataggtgctcaggcccctaatccagacctctacctgttgctaccccccttcccctccctccaggactaagaagcaagatttcccaggtgctctgaaagctaattacttactcatcgaaggatctcaaatcaaagctgacccagtcttcatatccttcaagttcctttccattcctcaaggctttgttttgtgtctatattgatcccacagccactgcacttgcccttgccacacttgatctcaagggcatcttggaagtatttgaccatttcttgagatatggggggaaaaagtctttgtattggcatcttggttccagactcccctttccaaacctagaaaaatacagtgacctttgagcatacccaagatccctttctcactgttgcctgtcccctaactcacctccccacagcccctatcctttccccctcaacaaaaacaaaatctaccttacttgaggaattaggtaggtaaggaatgatcacattggagtttgggattaaaaacaccaaaaaaaaaaaaatgcatttggttctctctacactggctaagaatattgctctacactgtaagttttaaacgttacgtttctgtatgaatgtagtgtgggtttgagtagcattgtgtgtgagtggccccacaggtacattcaccctctagtgcagcccctcagtttaatgaaggaaaaaaaaacaaacacaaagccttaagctctttgagtacttcctttaccaaatgagcatggttctaacacctggagctgggcctacattggaaacaagcccctcctgccctctgtccattcttagagcataccttcatccactccatgctcagcacgtctcatcccaagcgacaattagttggctagaaacacttttctgtaattttaaacttagactgttttgttacaaatttttgcaccattctgttaaagatgcagaattgggcttttttattttttacagatgaaataagcccttacctttcctcttgtctctggggaatgtcagctgatggttcttatttaaggttttgcattttgttcactatccactactgttcgttagccagaaattctctagtgatctgaagcaatgtgactgaagaccagttttaagttatgtgttggcaagttgccttatatttaaaaggaaaaagaaaaaaaaaaaagcctgattgtgttatgccaaatgatagcaacatgaagtcctaatttattgttcccaattgttttcctgccgtctgtgaacactggtacctccctgtcctgatcccccaggagcacctgtagcttctgactcaatgccttctccgaaggtgttggccgccatctcacccagggccctcttccagttcctgcttttctgagtcagatttaaagagcaccactgtcttccccctaccccttgcttgatctccaaagcagatattcttgctgtatttttttttcctccccaatacctctccctgaaaggtgagctgctattttaggaaactggaccagacaccaacttgggggctttaagtcaaacaacctcaaacccatctcttcctgtgtaggggtgcaagcctctgaagctctcactcccacccttagtctgcatggaaaatgtactgtgatccccctgcccccaactgccctcgcctttggtgtgagatgttccttctttcggagttcagcctgagtccctctcccctctgccagccaacccccagccagcaataagggtccaagccagggcctcctctccacactccctgtctccatcctacactaccctagggaatacctggattccccattctatccacatactgtagcattcattctccatctctctcacctcacctgtggtggtttatgggtgtgatggggtttttaagattattataaaccagtaaaaataagaaaacctc

SEQ ID NO: 132590 - DNA, 2613 bp, Homo sapiens
  Payload ID: 5896
  Gene Symbol: FAM222B
  Gene Name: family with sequence similarity 222, member B
  ENST ID: ENST00000582266
  CDS Start-End: 144-230
cacagctgcgccggtgactgaggggccgggcagtggagaagtggtggcggcgggcggcgggcggcaaaggagcagccatgagggccgggcccagtcaccgacctgtgagccactgccccatgttgtgttgatgccaatctgccatgctagcctgtctaccagggccaggtgacctgtcctttcagcttctttctcacacgcagatgaacactggacttcagaaattgtgaaggttccccagcggaaacacgttcgtcgtactgtgaacggcctcgacacatcagcccagcgctacagcccctacccgacacaggctgccaccaaggcaggcctgcttgccattgtcaaagtgccagccaaaagcatactcaaggactttgacggcacccgagcccggttgctccctgaggccatcatgaaccccccagtggcaccctatgctactgtggcacccagcactttagcccacccccaggcccaggctctggcccgccagcaggccctgcagcatgcacagaccctggcccatgcccctccccagacgctgcagcaccctcagggtatcccgccaccccaggcactgtcccaccctcagagcctccagcagcctcagggcctgggccaccctcagcccatggcccaaacccagggcttggtccaccctcaggccctggctcaccagggtctccagcacccccacaatcccttgctgcatggaggccggaagatgccagactcagatgcccccccgaatgtgaccgtgtctacctcaactatccccctttcaatggcggccactctgcagcacagccagcctccggacctgagtagcatcgtgcaccagatcaaccagttttgccagacgagggcaggcatcagcactacctcagtgtgtgagggccagatcgccaaccccagccccattagtcgcagtctgctcatcaatgcaagcacccgggtgtcgacccacagcgtccccacaccaatgccttcatgtgtggtcaatcccatggagcacacccacgcggccaccgccgcgttgcctgctgcaggtcctgtcaacctgcccacaggcatctctcgcgtccccactggctaccctagcgacctcaagccagtcacctggaaccagcaccagctggcccacctacagcagatgtgcagcgaggctagtgggacgccagcccctggcctgacaggcaagcatgcggcaggacgcgagttggcagggcctggctttgtgggcaaggcccctgcctacccgcaggaactctgcctggcgcagtccttccatctgaagccacccctggaaaagccgaccccatccccaccagtcaacggcatggcagccccattggcctaccccaatggtcactacttccaacccctgtggaacaacattctgcccactcccaatagcgacagctcggggtctcaggaccttgccatgccgttccacggtgggcagcccacaggtgcacccctcgactgtgcggcagctcccggggcccactaccgagcagggaccgggggcggtccagtggcaagccagaacagcttgatgcaaacagtggattacctaagtggggatttccaacaggcctgcttccgagaacagagcctggccatgctgagcaaggcccaccgagcccctggcaaccgagcccccgatcccacagagagtcgaagtcttcatattcagcacccagggtatagataggtagccctgctgccctccacgtgcaacacatcatacatcaccctcctaggtttagtcttttaagtaactggatagtttcaaagtttcactgctccagtgtgatcattcttagatgtctaagaaagggaatttggtgggatctaagtggggacagaaggggtcctctcgtcctcccctccagcaacttttggttttatgttagaacctaaccctaagcccaggcttttctctccactgactgcctgtcagctagtctctccaccttggccatttccagccagctcccacccatcttttcttgaatctcttcctgtttcccttaggacgactgaggtgtgggctgacggaatgccctagttgaggtagtataggtgctcaggcccctaatccagacctctacctgttgctaccccccttcccctccctccaggactaagaagcaagatttcccaggtgctctgaaagctaattacttactcatcgaaggatctcaaatcaaagctgacccagtcttcatatccttcaagttcctttccattcctcaaggctttgttttgtgtctatattgatcccacagccactgcacttgcccttgccacacttgatctcaagggcatcttggaagtatttgaccatttcttgagatatggggggaaaaagtctttgtattggcatcttggttccagactcccctttccaaacctagaaaaatacagtgacctttgagcatacccaagatccctttctcactgttgcctgtcccctaactcacctccccacagcccctatcctttccccctcaacaaaaacaaaatctaccttacttgaggaattaggtaggtaaggaatgatcacattggagtttgggattaaaaacaccaaaaaaaaaaaaa

SEQ ID NO: 132591 - DNA, 556 bp, Homo sapiens
  Payload ID: 5896
  Gene Symbol: FAM222B
  Gene Name: family with sequence similarity 222, member B
  ENST ID: ENST00000583522
  CDS Start-End: 281-367
aaagggcccaggcgctacacgctgcgcaggcgcaggagcggctccgggtagtccccacagctgcgccggtgactgaggggccgggcagtggagaagtggtggcggcgggcggcgggcggcaaaggagcagccatgagggccgggcccagtcaccgaccgtgctgaggagtcatggaagagtttttaaaccaggaatatcacaggagtgatgctgtgttcttcactgcatgatttcaaaagtgtgagccactgccccatgttgtgttgatgccaatctgccatgctagcctgtctaccagggccaggtgacctgtcctttcagcttctttctcacacgcagatgaacactggacttcagaaattgtgaaggttccccagcggaaacacgttcgtcgtactgtgaacggcctcgacacatcagcccagcgctacagcccctacccgacacaggctgccaccaaggcaggcctgcttgccattgtcaaagtgccagccaaaagcatactcaaggactttgacggcacccgagcccggttgctccctgaggccatcatga

SEQ ID NO: 132592 - DNA, 556 bp, Homo sapiens
  Payload ID: 5896
  Gene Symbol: FAM222B
  Gene Name: family with sequence similarity 222, member B
  ENST ID: ENST00000581381
  CDS Start-End: 302-388
gtagtccccacagctgcgccggtgactgaggggccgggcagtggagaagtggtggcggcgggcggcgggcggcaaaggagcagccatgagggccgggcccagtcaccgaccgaatatcacaggagtgatgctgtgttcttcactgcatgatttcaaaagcctagagttgtgaggtcacaattgcaagtgactttacggtcccctattgagttaaagatggagaagaaaaaggcctttgagcaatggctaaacattattcagtgtgagccactgccccatgttgtgttgatgccaatctgccatgctagcctgtctaccagggccaggtgacctgtcctttcagcttctttctcacacgcagatgaacactggacttcagaaattgtgaaggttccccagcggaaacacgttcgtcgtactgtgaacggcctcgacacatcagcccagcgctacagcccctacccgacacaggctgccaccaaggcaggcctgcttgccattgtcaaagtgccagccaaaagcatactcaaggactttgacggcacccgagcccggt

SEQ ID NO: 132593 - DNA, 549 bp, Homo sapiens
  Payload ID: 5896
  Gene Symbol: FAM222B
  Gene Name: family with sequence similarity 222, member B
  ENST ID: ENST00000577682
  CDS Start-End: 184-270
agtccccacagctgcgccggtgactgaggggccgggcagtggagaagtggtggcggcgggcggcgggcggcaaaggagcagccatgagggccgggcccagtcaccgaccgtgctgaggagtcatggaagagtttttaaaccagtgtgagccactgccccatgttgtgttgatgccaatctgccatgctagcctgtctaccagggccaggtgacctgtcctttcagcttctttctcacacgcagatgaacactggacttcagaaattgtgaaggttccccagcggaaacacgttcgtcgtactgtgaacggcctcgacacatcagcccagcgctacagcccctacccgacacaggctgccaccaaggcaggcctgcttgccattgtcaaagtgccagccaaaagcatactcaaggactttgacggcacccgagcccggttgctccctgaggccatcatgaaccccccagtggcaccctatgctactgtggcacccagcactttagcccacccccaggcccaggctctggcccgccagcaggccctgcagc

SEQ ID NO: 132594 - DNA, 886 bp, Homo sapiens
  Payload ID: 5896
  Gene Symbol: FAM222B
  Gene Name: family with sequence similarity 222, member B
  ENST ID: ENST00000583307
  CDS Start-End: 169-886
cgggcggcaaaggagcagccatgagggccgggcccagtcaccgaccgtgctgaggagtcatggaagagtttttaaaccaggaatatcacaggagtgatgctgtgttcttcactgcatgatttcaaaagtgtgagccactgccccatgttgtgttgatgccaatctgccatgctagcctgtctaccagggccaggtgacctgtcctttcagcttctttctcacacgcagatgaacactggacttcagaaatgggacactacacagaaaatgagaactgctcactatcctaccccagccgaattggatgcgtatgctaagaaggtcgcaaacaacccactgactataaaaatcttccccaacagtgtgaaggttccccagcggaaacacgttcgtcgtactgtgaacggcctcgacacatcagcccagcgctacagcccctacccgacacaggctgccaccaaggcaggcctgcttgccattgtcaaagtgccagccaaaagcatactcaaggactttgacggcacccgagcccggttgctccctgaggccatcatgaaccccccagtggcaccctatgctactgtggcacccagcactttagcccacccccaggcccaggctctggcccgccagcaggccctgcagcatgcacagaccctggcccatgcccctccccagacgctgcagcaccctcagggtatcccgccaccccaggcactgtcccaccctcagagcctccagcagcctcagggcctgggccaccctcagcccatggcccaaacccagggcttggtccaccctcaggccctggctcaccagggtctccagcacccccacaatcccttgctgcatggaggccggaagatgccagactcagatgcccccc

SEQ ID NO: 132595 - DNA, 731 bp, Homo sapiens
  Payload ID: 5896
  Gene Symbol: FAM222B
  Gene Name: family with sequence similarity 222, member B
  ENST ID: ENST00000577513
  CDS Start-End: 324-731
ctggccattactgcgagaagccgaggccaagcggggaccagagaaagcggaccccgcgacgcaggacacgcacctccgttggaagcctaagagtgaggaaaaagggatcacccgctccctcgcgacatgagggcccacctgccagactcttaacaccgattgaacaagcctagccccgcgccagctgggggcagccattacagccgcaaggcactgcgggaaccgaccaggagcgctcctacgattgaacagagcggctgacgaaccagcgagtaggagagagtgtgagccactgccccatgttgtgttgatgccaatctgccatgctagcctgtctaccagggccaggtgacctgtcctttcagcttctttctcacacgcagatgaacactggacttcagaaatgggacactacacagaaaatgagaactgctcactatcctaccccagccgaattggatgcgtatgctaagaaggtcgcaaacaacccactgactataaaaatcttccccaacagtgtgaaggttccccagcggaaacacgttcgtcgtactgtgaacggcctcgacacatcagcccagcgctacagcccctacccgacacaggctgccaccaaggcaggcctgcttgccattgtcaaagtgccagccaaaagcatactcaaggactttgacggcacccgagcccggttgctccctgaggccatcatgaaccccccagtggcaccctat

SEQ ID NO: 132596 - DNA, 564 bp, Homo sapiens
  Payload ID: 5896
  Gene Symbol: FAM222B
  Gene Name: family with sequence similarity 222, member B
  ENST ID: ENST00000583953
  CDS Start-End: 116-202
gattgaacagagcggctgacgaaccagcgagtaggagagaggtgctgaggagtcatggaagagtttttaaaccagtgtgagccactgccccatgttgtgttgatgccaatctgccatgctagcctgtctaccagggccaggtgacctgtcctttcagcttctttctcacacgcagatgaacactggacttcagaaattgtgaaggttccccagcggaaacacgttcgtcgtactgtgaacggcctcgacacatcagcccagcgctacagcccctacccgacacaggctgccaccaaggcaggcctgcttgccattgtcaaagtgccagccaaaagcatactcaaggactttgacggcacccgagcccggttgctccctgaggccatcatgaaccccccagtggcaccctatgctactgtggcacccagcactttagcccacccccaggcccaggctctggcccgccagcaggccctgcagcatgcacagaccctggcccatgcccctccccagacgctgcagcaccctcagggtatcccgccaccccaggcactgtcccaccct

SEQ ID NO: 132597 - DNA, 568 bp, Homo sapiens
  Payload ID: 5896
  Gene Symbol: FAM222B
  Gene Name: family with sequence similarity 222, member B
  ENST ID: ENST00000584059
  CDS Start-End: 438-568
catataatgtgctgcttctgaaaatgtctggctggtctccaaccaggcctataaatgggctggctgagccaggccctatgagggcccactctcctcaggaatactgagacattataaatgcacctgtactttccagttgtatgaataggtgctttccagttttatttctcccatccatacatctgtggtaactgaaaaatcattttaaccatagtgatatttgacagcaaattgtcgtcacagataaagatgtaagtatactttcaaccaacacactgctaattaaattgctttatgtgtctaaacttgggcctcacgccagtcatatccagtgttcctactctcttcttcgaatgagttgccttgtgtttcatgaccttgtttttgttcattacagtgtgagccactgccccatgttgtgttgatgccaatctgccatgctagcctgtctaccagggccaggtgacctgtcctttcagcttctttctcacacgcagatgaacactggacttcagaaatgggacactacacagaaaatgagaactgctcactatcctaccccagccga

SEQ ID NO: 132598 - DNA, 462 bp, Homo sapiens
  Payload ID: 5896
  Gene Symbol: FAM222B
  Gene Name: family with sequence similarity 222, member B
  ENST ID: ENST00000579381
  CDS Start-End: 183-347
acacgctgcgcaggcgcaggagcggctccgggtagtccccacagctgcgccggtgactgaggggccgggcagtggagaagtggtggcggcgggcggcgggcggcaaaggagcagccatgagggccgggcccagtcaccgacctgtgagccactgccccatgttgtgttgatgccaatctgccatgctagcctgtctaccagggccaggtgacctgtcctttcagcttctttctcacacgcagatgaacactggacttcagaaatccctcttcaccatttcagcatcagtggaggcaggacaaagaaaactaatcaatgtggataagtgtccccttccatactcctgaatgaggtcaagcttcccccttgcctctgctaaaaaaaacctcagagttggtactaacttggaacaaagggactcttctactcatcaaggggacactacacagaaaatgagaactg

SEQ ID NO: 132599 - DNA, 598 bp, Homo sapiens
  Payload ID: 5896
  Gene Symbol: FAM222B
  Gene Name: family with sequence similarity 222, member B
  ENST ID: ENST00000581229
  CDS Start-End: 191-598
acagctgcgccggtgactgaggggccgggcagtggagaagtggtggcggcgggcggcgggcggcaaaggagcagccatgagggccgggcccagtcaccgaccgaatatcacaggagtgatgctgtgttcttcactgcatgatttcaaaagtgtgagccactgccccatgttgtgttgatgccaatctgccatgctagcctgtctaccagggccaggtgacctgtcctttcagcttctttctcacacgcagatgaacactggacttcagaaatgggacactacacagaaaatgagaactgctcactatcctaccccagccgaattggatgcgtatgctaagaaggtcgcaaacaacccactgactataaaaatcttccccaacagtgtgaaggttccccagcggaaacacgttcgtcgtactgtgaacggcctcgacacatcagcccagcgctacagcccctacccgacacaggctgccaccaaggcaggcctgcttgccattgtcaaagtgccagccaaaagcatactcaaggactttgacggcacccgagcccggttgctccctgaggccatcatgaaccccccagtggcaccctat

SEQ ID NO: 132600 - DNA, 720 bp, Homo sapiens
  Payload ID: 5896
  Gene Symbol: FAM222B
  Gene Name: family with sequence similarity 222, member B
  ENST ID: ENST00000577376
  CDS Start-End: 184-720
agtccccacagctgcgccggtgactgaggggccgggcagtggagaagtggtggcggcgggcggcgggcggcaaaggagcagccatgagggccgggcccagtcaccgaccgtgctgaggagtcatggaagagtttttaaaccagtgtgagccactgccccatgttgtgttgatgccaatctgccatgctagcctgtctaccagggccaggtgacctgtcctttcagcttctttctcacacgcagatgaacactggacttcagaaatgggacactacacagaaaatgagaactgctcactatcctaccccagccgaattggatgcgtatgctaagaaggtcgcaaacaacccactgactataaaaatcttccccaacagtgtgaaggttccccagcggaaacacgttcgtcgtactgtgaacggcctcgacacatcagcccagcgctacagcccctacccgacacaggctgccaccaaggcaggcctgcttgccattgtcaaagtgccagccaaaagcatactcaaggactttgacggcacccgagcccggttgctccctgaggccatcatgaaccccccagtggcaccctatgctactgtggcacccagcactttagcccacccccaggcccaggctctggcccgccagcaggccctgcagcatgcacagaccctggcccatgcccctccccagacgctgcagcaccctcagggtatcccg

SEQ ID NO: 132601 - DNA, 2417 bp, Homo sapiens
  Payload ID: 5897
  Gene Symbol: FAM227A
  Gene Name: family with sequence similarity 227, member A
  ENST ID: ENST00000355830
  CDS Start-End: 297-2237
agagtagcaaaatgggcctctccccaactcccctcctcatcccccagcacaaggcaaagggcaccccttgctgtgagtttgggggcaccggctgtcgggggccgacccagaactttgcggggtcccctgagggacccgtggcgggaccggccccgggttcgtcaaattccgccgatgctttcaggaggctgattaaacaaacgacaagattggagtgggaaatgagaggctcttaaaagtggaagctttttgtttgtccatttacaagaaattggacaatgaatcacttcaggaagatggaggtcatcaacctcaccaccctacctatgataccagtggatgagcacctggctgtctcgcttgtcgcacggaatacaatggtgaagactgtgaggaaggagttagagaacaatccaccctcatgccttattggctccatgcaccaggtgaaccaaaagattgctgacataaatctgcgtaccgagccgtcggccaacagcctggcaattgagagatttgagttggagaagaaggctttaagagagaaaactcgcagcagtccagaagacaaagtcaagagacaaaggaaatctcagtattcctgcaaaggctccgaactcagacatgccagatcttctgttataaaaaggaaaacagcagataaaaatctgctggcagagctgtaccagtattccaacttcaacagctccaagccaaacaagcttccgaatggcgtggacttctgtgacatggtgggcaacgtggtccgggctgagagagactgccttagtggcaagcatttctgttcaggtagagaattagagaagtttctctcttcttcttctccaagagccatctggctggatagcttttggtggatatttcatgagaggtaccagccaaacaaggagctccagaataatctgtttgaccggatagcccagcactatgccttacttttgtttcgtgtacccaagtcccactctgaagaggcgctcttaaaaaggctgccatcacttctcagcaaagccgtgtacaccagcttctgttgctgctttccacagtcctggttcgacacgcacgaattcaagtctgacatctgtaacacaatgagcctgtggatttcaggtggcacctatcctagcccacagagctatgacagctgggactactcggaactagacccagagcgattccgcagagaagaattaatgttgtacagaagaagactgacaaaggggagagagttttctttgtttgctggtaagagagccttctcccagaagccagcccagagcaggaaattctaccaccctcagtcttctagtgcaaattcacccagtgaaaaaacctcttcggccaagcagaactcagaaaaaagcttacgaatgcagaatactgcaaaagagcatcattgtcagaccctggtcttgaagaaacctacgcaagaagtcaagaggatatcagaagcaagagaatgtgagaatatgtttcctaaaaagtcgtgtgctgcctgcaaaagccctgagctgacttcaaacctcttcaacatttatgggaagagccctctgattgtgtactttctccagaactatgccagtctgcagcagcacggcaagaatgtgttgatagtcagaagggaaaagaccacgagcacccctgactgcaccccaacgtatactgatgtcatcagcgagaccctgtgcagcatgaagaagcggaaagacaacctcaatcagttgtaccagcatcattggactgaatggaattattttgacaagcatctaaaggagctgcaagacaacttctccagggaaatgaagaatattgatccaaaagcagcagatacaaaaaaggcaaaccacatgttcatcccaccttcagccgtcaatgaggaatcacctgacaagaaaactaagggaagtctccaaagagaaattgagtttaagggttgttcgaacaaaaaccatgggaaaggtagaagtgtgaacatgaggggaaaggaggagagggaaagagaagagaaacagaagttgaacatttctttccactcacttccaagccctgaggagctccacaacctagaaccaggaagcgcctacagaatccgtgatatttctgctacgaggaccccgcttagacgtccctcatcttgggagccttccctaatataccaggagcaagtgttgctgaaaacccatactctcagcatggaagaagataaattcagatgttaaactagaagagatgaagttaaaatcctatagtcctgattttgaattgcttatgaattgatgatgaaatgtatgttttagaacatacagtttcctgaagaacaggagggatagctggagaggggataggagggaagctggaaggggttacaaagaggcccaaataaacttttgggggtgaca

SEQ ID NO: 132602 - DNA, 10322 bp, Homo sapiens
  Payload ID: 5897
  Gene Symbol: FAM227A
  Gene Name: family with sequence similarity 227, member A
  Uniprot ID: F5H4B4
  ENST ID: ENST00000535113
  CDS Start-End: 605-2317
ccgcccggcctctaccaccgaggaaaggggtaaccggcgcgggggttcccagcgccagcctgcgccaatccccagaaactccgtgaatcacctcgggatagcaaacggattatacaaaggcagtgtcttctggggtccttttcatgcctctaggaccaggacctgcattcaccctctccactgacacattggtctgggcccccggcccggctgtcaccatagaaacggcatctcgcggacaacgcggcggctcacgaaggttccattgttatgctaaacgggaaagtggagaccgcgccggcgttgcctagagaacgcctggactcagagtagcaaaatgggcctctccccaactcccctcctcatcccccagcacaaggcaaagggcaccccttgctgtgagtttgggggcaccggctgtcgggggccgacccagaactttgcggggtcccctgagggacccgtggcgggaccggccccgggttcgtcaaattccgccgatgctttcaggaggctgattaaacaaacgacaagattggagtgggaaatgagaggctcttaaaagtggaagctttttgtttgtccatttacaagaaattggacaatgaatcacttcaggaagatggaggtcatcaacctcaccaccctacctatgataccagtggatgagcacctggctgtctcgcttgtcgcacggaatacaatggtgaagactgtgaggaaggagttagagaacaatccaccctcatgccttattggctccatgcaccaggtgaaccaaaagattgctgacataaatctgcgtaccgagccgtcggccaacagcctggcaattgagagatttgagttggagaagaaggctttaagagagaaaactcgcagcagtccagaagacaaagtcaagagacaaaggaaatctcagtattcctgcaaaggctccgaactcagacatgccagatcttctgttataaaaaggaaaacagcagataaaaatctgctggcagagctgtaccagtattccaacttcaacagctccaagccaaacaagcttccgaatggcgtggacttctgtgacatggtgggcaacgtggtccgggctgagagagactgccttagtggcaagcatttctgttcaggtagagaattagagaagtttctctcttcttcttctccaagagccatctggctggatagcttttggtggatatttcatgagaggtaccagccaaacaaggagctccagaataatctgtttgaccggatagcccagcactatgccttacttttgtttcgtgtacccaagtcccactctgaagaggcgctcttaaaaaggctgccatcacttctcagcaaagccgtgtacaccagcttctgttgctgctttccacagtcctggttcgacacgcacgaattcaagtctgacatctgtaacacaatgagcctgtggatttcaggcacctatcctagcccacagagctatgacagctgggactactcggaactagacccagagcgattccgcagagaagaattaatgttgtacagaagaagactgacaaaggggagagagttttctttgtttgctggtaagagagccttctcccagaagccagcccagagcaggaaattctaccaccctcagtcttctagtgcaaattcacccagtgaaaaaacctcttcggccaagcagaactcagaaaaaagcttacgaatgcagaatactgcaaaagagcatcattgtcagaccctggtcttgaagaaacctacgcaagaagtcaagaggatatcagaagcaagagaatgtgagaatatgtttcctaaaaagtcgtgtgctgcctgcaaaagccctgagctgacttcaaacctcttcaacatttatgggaagagccctctgattgtgtactttctccagaactatgccagtctgcagcagcacggcaagaatgtgttgatagtcagaagggaaaagaccacgagcaccccagactgcaccccaacgtatactgatgtcatcagcgagaccctgtgcagcatgaagaagcggaaagacaacctcaatcagttgtaccagcatcattggactgaatggaattattttgacaagcatctaaaggagctgcaagacaacttctccagggaaatgaagaatattgatccaaaagcagcagatacaaaaaaggcaaaccacatgttcatcccaccttcagccgtcaatgaggaatcacctgacaagaaaactaaggaggggaaaggaggagagggaaagagaagagaaacagaagttgaacatttctttccactcacttccaagccctgaggagctccacaacctagaaccaggaagcgcctacagaatccgtgatatttctgctacgaggtggagtggaacaagaaaataagaaaattgtggccaaagacagaaataggaatcatgatttctccataggggaaggattccgttgtagtttttcctaggctgagtgaaaagcaggagtagagagttggtgcttgggtcactacatttattcatagatttactctttcagtattttattacgtgcatgctggtaagtatgttacaaatatgacctcatacaaaggtaaaactttcataccagccgtatgaagtagggattatccactgcattttacgcagcagcaagcccaggtttagaaaggtttccgaagttctctgctgtagacactgggtaattaacagtagataagacacagtccctgttctcaagggagtcaccatctggtagagggaagacagatgtatcaacacattaaatgctgtaagtattggacagaggaaaaagagaaaagtgttgtgagggaaaaggaaaatgggcctagaggagtgcaattttttgtaacaagctttgtggaactattaatttgataatttgataggcgcttctattatgctgcctctgaacctttgcctcctgctcctctaaccactgggattgccagcctatttccaatatgccctctttctgcctggcaaacatcttgtcttttctaaactcagcccagggacatgacatctgtaatgtgtttctgtgtgactcccaggcttctgccttcttaacctctcaccttccagctcatttgagtgaatctttgtccaagaattgagagaaactttataggtaaagcatgcacatgttgtctgatttaatctaaaatagaaataagaaaacaaaaaataatactgcaactagggacacatttagtcactcccagttcatgagacaaggaatagtaaagttcattcctaccatagcaaaagtcaggatttaaatgtaaattaatttttttaattaaaaaattttaaattaggccaggcgtggtggctcacacctgtaatcccagcactttgggaggctgaagtgggcagatcacgaggtcaggagttcgagaccatcctggccaacatggtgaaaccccatctctactaaaaatacaaaaattagctggatgttgtggcgggcacctgtaatcccagctactcgggaggctgaggcagaagaatcgttggaacccaggtggcggaggttgcagtgagccaagaccatgctattgcactccagcctgggcaacaagagcgaaactctgtctcaaaaaaaaattttttttaattaattttaactaaattaaattttttagaggcagactctcagtctgttgtccaggctggaatgcagtggcgcagtcatagctcactgcaacctcaaattcctgggctgaagcaatcctcccacctcagcctcccaagtagctaggactacaggtatgccaccatgtctggctaatttttaaagaaatttttttgtagagatgggatctcactgtgttgcccaggctggtctcgaactcctggcttcaagtaatcctcctgccttgtccttccaaagcactgggattctaagtgtgagccaccacacctggcctggagtatctaatattgtataacataataatagtaatcataggtgatgtcatttattgagtacttagtatgtgctgagtgctctgctaagtctggtttagacattatctcagttaaccttcctggtgtcccccaagatggatattgttacctccattttctcctaggaagaaacggacttgggggggatgattaggtatttgctagatgtctattctgtaccatccctgcactaggccctgtgaatacagagataaataaagacacagtccctgaccttatggggctcacaatctggaaaaaagagaaggatgtgtaaaccaataaatgcattaatgctccgatagaaagctgcgtggaatctgagaaaaaccaaggcagatgaagccagtgtgccagcagccctttgggacagaagatatttcactgaggggcacaggcacaggggttggtttgccaaaggaccagcagctgggctgaagggcataggttttatcatttgagcttcaaggcacaaggcagtgacctggtctgtgctagaacagttcacctgtcacagccaagaggaaagaaatggtgcagatggctgtttgcccaaaccaagcagcagataagcagatcttgggaaatgtagctcatccctcagacacacatctttacttgaatcctgagtagaactctaggtgacccccttggaggctattactcatgtaaaaggggatgaaggaaaggtaagagagaaggagcttaggctttggcatgagaaaatttgggcctttgaatccctgccctgcttcaccatatggatgtgtgactcagcatagtagctgtgcatcttgacctttctgaacgtgctttcttgactgcagaaagggaatgcctgcctaggagggttgttgtgaggattagatgagataatttgtgcaaagttcttggcacagtacttttcactttgtaattgccacaagctgttattgttgttattgctgttataaagtgtactcttcttggccgggtgcagtggctcatgcctgtaatcccagcactttgggaggccaaggcaggtggatcgcctgaggtcaggagtttgagaccagcctggccaacgtggcgaaactccatctctactaaaaatacaaaaaaattagccgggcacaatggcaggtgcctgtaacctcagctactcaggaggctgaggcaggagaatcacttgaacccgggaggtggaggatgcagtgagctgagattgcaccattgcactccagcctgggtaacaagagtgaaactccatctcaaaaaaaaaaaaaaaaaagtatagtcttctgaaaccagaacgtgtgagcacctgccgagtacaaggcaccatgtggggcagataagcagaacactctctcaccttccctttactaccccagccactgtcaactcttcatttgcagtttctctaggaaccacactttcctatttctggatcttttgtctgttgctgcttctggacctgaaaatgccttctcctccctcctctttgttaactgccaacatcactaattcctgctcttcctccaggaccccgcttagacgtccctcatcttgggagccttccctaatataccaggagcaaggtaggcacaagtgctccactgcattatgctccaacagcattctgtgccatcccattatggcagcagttaccatagtagattggaattgcctgtctacctatccaccgctactattagcccccatacagcaagaaggtctccttattttctaagcccaggacaaactgcatttctgtctgtcaggaccatttgttgcacagtccaagatcatccctgcatggaccctttccagaaatgactgaggactcagagttgtagcctctcaggatgttaaatatgaagaaacctgtctctgccctttgtaaacattagaagggaaaattatggggaagaattatttgccctttataagggaagcggggtagagcatcaaagggaactaacatttaaaaagcatttgctgtaatgtgggataaagcaaatgagtaattgtatgatattctaattctgtcattcccagtgttgctgaaaacccatactctcagcatggaagaagataaattcagatgttaaactagaagagatgaagttaaaatcctatagtcctgattttgaattgcttatgaattgatgatgaaatgtatgttttagaacatacagtttcctgaagaacaggagggatagctggagaggggataggagggaagctggaaggggttacaaagaggcccaaataaacttttgggggtgacagatatgtctactatcttgattgtggtgaatggctcatgggtgtatacacacctaaatacactttaaatgtgtgcagtttctcatatgtcaattatacttcgataaagctttgttaaaaaacgaacaggccaggcatggtggctcacacctgtaatcccagcactttggaaggccaaggcaagaggattgcttgaggccaggagtttgagaccaaacaggacaacatagtgagaccttgcctctacaaaaacataaaaaattagtccgatgtggtagtgcatacctatagtcctagctactagggaggctgaggtgggaggatcgcttgagcctgggagcttaaggctgccatgagctgtgattgtgctactagactcagcctggatgatagagcaagactgtgtctgggaaaaaaaaaaaaaaaaacctgagccaggtgcggtggctaacgcctgtaatctcagcactttgggaggccgaggcgggtggattgcctgagaccagtagtttgagaccagcctgaccaacatggcgaaatcctgtctctactcaaaatgcaaaattagccgggtgtggtggcagctgcctgtagtcccgggtactcgcaaggctgaggcaggagaattgcttgaacccaggaagcggaggttacagtgagccaagatcatgccactgcactccagcctggacaacacagtgagactctgtctcaaaaatatgtgtatatatttcctaaaactctgtccactgaaatgacctagaaataaagactgacccggcagcagtgacccagactgtggtcttgaaatactatttgccctaaaaggatctagggatccttgaagaaatgatcagttccaggtctagggcaggaaaatcatgagacctgaaacatcttatcacacttaacaccaaggaagctatcaaagacaaggatcctgtcagaaagacttgggagcaaacttagagacaatcccattagctaaaagagaggaccatttgggcattaataataattgccatatttgaagcacgtcaaacgtgttctcacctgtaagttcatattgtgacttttaaaaaacggattggtgtctggacgcggtggctcacgcctgtaatcccagcactttgggaggccgaggtgggcagatcacctgaggtcaggagtttgagaccagcctggccaacaaggcaaaatcccgtctctactaaaaatacaaaaatcagccaggcgtggtggtgcatgcctggaatcctagctattcgggaggccgagacacaagaatcacttgaacttgggaggcggaggttacagtgagctgagatcgcaccactgcactccagcctaggtgatggagtgagactgtctcaaagataaaaaaggaaaggggaaaggaggaaactaattggatactaggaaacttcctcattattttgaaaattggtaagtaaatgaataagcatttatcatgccattcccatatgaactgtattaccaggtaaccaaatagtagtggaacagaaacttgtctttagaaacaatccacctaataaattcagaaataatgatagacttaaaatatcaccattttgaaacccctaatgaattaatggatctaggttgattatccatggctgcttacatcacaaaagacaaacagctattaaatgccttttgatactagaccataagaccacctatcaaatagtcttacaaataagtaaacttgaatgtgatctgaactctagatccaaccaccataacaggaaatacagaggatggggacatcatggcaaatggtaaatgacacctaggggatgcaatcagcaaaatccaggccatggaaaactccagggcaaatgacttcatttttttcaacaaataagtttcaagggaaaaagagagggggaatatatagattaaaagagacttaaaagaggacatcggttgccgagcatggtggcccatgcctgtaatcccagcactttaggaggccaaggtggaagaacccctagagcccaggaggtgagaccaaaccgggtaacatagtgagaccttgtctctacaaaaaaagtaaaaattagcagagcaaggtggcatacgcctgtagtcctagctacttgggaggctgacgtgggagaattgcttaagcctgggagttggagggtgcagtgagctatgatcatgccactgcacactccagcctaggtgacagaatgagaccacatctctaaaaagaaaaaaaaaagacatcaatcaattacaacatgtggacattatttggatcccattgaaacaaaatgtggcatttatgagacaaatggatatctgaatcttaaatattttatatataaaattattctaggcgtgataatagcattatggttatattttttaaagagttatcacattttagagatatatactgaaatattcacagatggaattacaagatttatggaatttgtactcaaataatatgggagagagaaagtggatggaggtataggtgaaacaagattgaccatgtgttgaaaattgttgaagatgggtgatgggaatattatactgttttacttttgtgcatatttgattttagccataatttttaaaattaaaggcatctaccatggacacttctaagcatattttacacactttcattgtggtctcactaaagccctgtgaatgaggtacaatttcccccattttcaaattgaggctcttcttgtttaaagcaccattactcctggcttgggacttctgttatacaatattctcctagcattctctttgccctttctcttgcccctccaatcagttctccacacaggagcccacatacttcatgtgtattaacccatttaattctcacaactcagcgccgatattattcttggttttcagataccgaaactcaggcacagagaggttaaataattttcccaagaccacacagctagtgaatggctgaagtgtgctctatgtctggcttagttgctgctcctatgtgtacttatgacaggaaaataaagtcaagatatgaatatacaagcctgccatatagtggtttagcatgtcagttaagagcatggtcactggagccagactgtgagcctcaggcaagttacttaacctcctggtgccccagttccatcgtgtaaataggggtgataattgttgtgcctcatggtgtctgtgtgaggagtggatgcatgaatctgtgggaggcacttagaacagtgcctgacacatggtaagtgcagcatgtactggctatcatgatcattattgggtgttcaacaaatactcgttccttttggcctctctcctttaattttgaaattaaaatcctccaccagaaccacttgcagttccccaaataagcctctgtgttccttctgcctttcccgccctgcccgattgacaaatcctcactgatccagccccaagctaagggccaccatccccgcaaccccagagagagcctctgcttggttcccagctgcatgtctaatccctctcatcctgccttgtgtggtgattatctctttctgcattgtcttctctactagactcatggctccttgagggcaggtacctacctgtctttatatccagcagagacgtggaattgagcagtgttgaataaatgctagtaaaataaactgtcatagcaagcctctcttggacacctatgtgctgaagttaaaaagtttttcaaatttggactgaaaaaatgagaaagcccaaaatgactattaaatatacatgtatgtgtgtgtatacatacacacagtcatgcaccacgtaacgatgtttcagtcagcagctgactgaatatatgacggtggtcccataagattataatggaactaaacaattcctatcacctagcgactcttagccttcgtaatgtcatagcgtaacgcattagtcacgtgtttgtggtgatgttggtgtgaacaaatgtactgtgttgcctgccagtcatataaaatatagtacacaatactggggtaatggtaataaatgactgttactggtt

SEQ ID NO: 132603 - DNA, 2008 bp, Homo sapiens
  Payload ID: 5898
  Gene Symbol: FAM227B
  Gene Name: family with sequence similarity 227, member B
  Uniprot ID: Q96M60
  ENST ID: ENST00000299338
  CDS Start-End: 305-1831
gcaacaggctgggacgacagcggggggggggttagacgggaagttccgcctcagcctctcaatcagcggcggtgtcgcacttctcccgagaggctccggcgaggggcagggccgcgttcgtccgggacccgcctcaagcctcgcagcctttcacccagtttcctcccgattcttgctgggacaacaaaattgggaagcggttctcgaaacatactgtcaaggcgtagttgcatttggtcgcccaactcacattgaagcctaagacccagctgatttctcttcatttctgcaaagttactgtaccatggcaggccaacgaacatgtcaaaggaggagcagcagagctggccccgggaaaatgcaagaacctccaaagagcattgaagaattcttaaagtttcaaaattgggattattggccaagggaaatccattttagagatgatgataaatggtcatgcactctgaaaaaaataaaagaagatagttcatttgtttcaatttatacacacctatgggaaaatgttcctcgaatatttgaagcacttttgatcatggaatcaaaattaaaggaatattcacttattttgcaaaaccacacctctgaaatatttaagtggaaaagcatgatttctgagacaagttcttatagaaaattggaacgatatggggaatttctaaagaagtaccataagaaaaaaaagataatgctttcagatgaaatggagacagagaagaatatagagggttgcagcttcacaggattcaaagcaaatgaacttactcagctacccagacatttggatgctgaacaaatttatctttttattttaaaagcccataattttgatgaaagagtttttaaaatctggaagactcattttctctcagaagcctccattgctcttttgcatgactccttttggtggtggtttctccataaatttaggcctgacagagaaaaccaagattgcttattcgatagaatttcagaaagttatgtgacacttttcatgagcatacctctaagtcgaaaggatgcattttttcagatatatcctgattgtttggcacaagccatatatgcaacgttccatgaagcatttccagaatcgagttacctctttaatgatgaatttaaagaagatctagggaataacatttttctttggtgttcaggtttaaaacctcaaaaaggcttttggatccactggaaactgaaagaactctccacaaccaccattcatggtagcaaaaaagcacctgcaaaatcagtaaaggaaagaattgcagacagtcaagaacatatatcaactagtatcgacttcaatattataaagattctgaacaacccaagagcatatacgttgcccatatccaaggaagaatcaagattatcaagactagcaacaaagtcgcactatagtagtactggtccagagtttaatcgtgttctcttcaattttggaggtcagagtccattgattttatattatcttaagatgcatgagctggctggtatttccaaagcacctaagaaaaccaagattaaactcactaagatattccaggaaccactacctgctccaacataccgtgatgttataaaggaggcaaaaagacaatttgcaaggaaccaaaaggattttaggatactccaagcaaaggctaccaagaaacctcatgaagtgaaacaggactttgagaagttcctacataaactgcgttccgaagctgaaattgagagagaatgtgtggcatcactatcgtcatcatcatcatcatcaccatcatcaacagacaactacaactttgaggaagaagaatactaagagaaaccagaaatgaactctattcaagaataatgcatacaattcagtggtatcagtttaattgtaacaatatatttaattcaagtccaatccatgtaatcagtattaagagtgtgttttaccattcatctttaaaatcttcaaatcaataaatctcagtaagttattcttaaaaga

SEQ ID NO: 132604 - DNA, 1139 bp, Homo sapiens
  Payload ID: 5898
  Gene Symbol: FAM227B
  Gene Name: family with sequence similarity 227, member B
  ENST ID: ENST00000558594
  CDS Start-End: 249-749
gcgttcgtccgggacccgcctcaagcctcgcagcctttcacccagtttcctcccgattcttgctgggacaacaaaattgggaagcggttctcgaaacatactgtcaaggcgtagttgcagaatttcaagaaagctgagaatggagtggtcaataaaggcttctttttcggacttggtttggtcgcccaactcacattgaagcctaagacccagctgatttctcttcatttctgcaaagttactgtaccatggcaggccaacgaacatgtcaaaggaggagcagcagagctggccccgggaaaatgcaagaacctccaaagagcattgaagaattcttaaagtttcaaaattgggattattggccaagggaaatccattttagagatgatgataaatggtcatgcactctgaaaaaaataaaagaagatagttcatttgtttcaatttatacacacctatgggaaaatgttcctcgaatatttgaagcacttttgatcatggaatcaaaattaaaggaatattcacttattttgcaaaaccacacctctgaaatatttaagtggaaaagcatgatttctgagacaagttcttatagaaaattggaacgatatggggaatttctaaagaagtaccataagaaaaaaaagataatgggggtgtggggaatggggcctcactctgtggcccaggctggagtgcagtggcgcaaccgtggctcactgcaacctctgcctcccagattcaagtgattctcctgcctcagcctcccaagtagctgtgattacagggttgcagcttcacaggattcaaagcaaatgaacttactcagctacccagacatttggatgctgaacaaatttatctttttattttaaaagcccataattttgatgtatgtaaatatttcattttattgtaggatacattttgacagtatgatttaatgaatcagacctttacttaaagctatgataaattaggtgttcaacaagatttgatcctttgggcattaaatttggcaggaaagaccagtgatgtgtctaaccgctaattaccagaaaagaatatattaaactctgtgttactgctttgggaccctgaggttgctagcgtacactggcttggcatgtaaccgtaac

SEQ ID NO: 132605 - DNA, 1596 bp, Homo sapiens
  Payload ID: 5898
  Gene Symbol: FAM227B
  Gene Name: family with sequence similarity 227, member B
  Uniprot ID: Q96M60
  ENST ID: ENST00000561064
  CDS Start-End: 372-1286
aacaggctgggacgacagcggggggggggttagacgggaagttccgcctcagcctctcaatcagcggcggtgtcgcacttctcccgagaggctccggcgaggggcagggccgcgttcgtccgggacccgcctcaagcctcgcagcctttcacccagtttcctcccgattcttgctgggacaacaaaattgggaagcggttctcgaaacatactgtcaaggcgtagttgcagtgagttgtgaagaaatgttgatcccagagaaaagtttgcattttgcccacctcaaagatattttgatttttggtcgcccaactcacattgaagcctaagacccagctgatttctcttcatttctgcaaagttactgtaccatggcaggccaacgaacatgtcaaaggaggagcagcagagctggccccgggaaaatgcaagaacctccaaagagcattgaagaattcttaaagtttcaaaattgggattattggccaagggaaatccattttagagatgatgataaatggtcatgcactctgaaaaaaataaaagaagatagttcatttgtttcaatttatacacacctatgggaaaatgttcctcgaatatttgaagcacttttgatcatggaatcaaaattaaaggaatattcacttattttgcaaaaccacacctctgaaatatttaagtggaaaagcatgatttctgagacaagttcttatagaaaattggaacgatatggggaatttctaaagaagtaccataagaaaaaaaagataatgctttcagatgaaatggagacagagaagaatatagagggttgcagcttcacaggattcaaagcaaatgaacttactcagctacccagacatttggatgctgaacaaatttatctttttattttaaaagcccataattttgatgaaagagtttttaaaatctggaagactcattttctctcagaagcctccattgctcttttgcatgactccttttggtggtggtttctccataaatttaggatatatcctgattgtttggcacaagccatatatgcaacgttccatgaagcatttccagaatcgagttacctctttaatgatgaatttaaagaagatctagggaataacatttttctttggtgttcaggtttaaaacctcaaaaaggcttttggatccactggaaactgaaagaactctccacaaccaccattcatggtagcaaaaaagcacctgcaaaatcagtaaaggaaagaattgcagacagtcaagaacatatatcaactagctgaaagtgagaagatctagattcttatttgtgttggaccactaatgaccagtatgacttcgggcaagttacctgctgttccagagtctcagctgctacatttgtaaaattggtgtattggtctaatgcctctatggtgctttacaattctgtgatctgtgacttatactcactactaatataaggaacagggcacctacttttaaaagctgttattctttaaaaaggaggaaatggtttcacattgattatcagtgtttgatttttgcctcaataagaatattggaacaataaatgttaatttagagatggaa

SEQ ID NO: 132606 - DNA, 792 bp, Homo sapiens
  Payload ID: 5898
  Gene Symbol: FAM227B
  Gene Name: family with sequence similarity 227, member B
  ENST ID: ENST00000559905
  CDS Start-End: 247-792
caaaattgggaagcggttctcgaaacatactgtcaaggcgtagttgcagtgagttgtgaagaaatgttgatcccagagaaaagtttgcattttgcccacctcaaagatattttgattgaatttcaagaaagctgagaatggagtggtcaataaaggcttctttttcggacttggtttggtcgcccaactcacattgaagcctaagacccagctgatttctcttcatttctgcaaagttactgtaccatggcaggccaacgaacatgtcaaaggaggagcagcagagctggccccgggaaaatgcaagaacctccaaagagcattgaagaattcttaaagtttcaaaattgggattattggccaagggaaatccattttagagatgatgataaatggtcatgcactctgaaaaaaataaaagaagatagttcatttgtttcaatttatacacacctatgggaaaatgttcctcgaatatttgaagcacttttgatcatggaatcaaaattaaaggaatattcacttattttgcaaaaccacacctctgaaatatttaagtggaaaagcatgatttctgagacaagttcttatagaaaattggaacgatatggggaatttctaaagaagtaccataagaaaaaaaagataatgctttcagatgaaatggagacagagaagaatatagagggttgcagcttcacaggattcaaagcaaatgaacttactcagctacccagacatttggatgctgaacaaatttatctttttattttaaaagcccataattttgat

SEQ ID NO: 132607 - DNA, 562 bp, Homo sapiens
  Payload ID: 5898
  Gene Symbol: FAM227B
  Gene Name: family with sequence similarity 227, member B
  ENST ID: ENST00000561116
  CDS Start-End: 68-211
tcgcccaactcacattgaagcctaagacccagctgatttctcttcatttctgcaaagttactgtaccatggcaggccaacgaacatgtcaaaggaggagcagcagagctggccccgggaaaatgcaagaacctccaaagagcattgaagaattcttaaagtttcaaaattgggttcttatagaaaattggaacgatatggggaatttctaaagaagtaccataagaaaaaaaagataatgctttcagatgaaatggagacagagaagaatatagagggttgcagcttcacaggattcaaagcaaatgaacttactcagctacccagacatttggatgctgaacaaatttatctttttattttaaaagcccataattttgatgtatgtaaatatttcattttattgtaggatacattttgacagtatgatttaatgaatcagacctttacttaaagctatgataaattaggtgttcaacaagatttgatcctttgggcattaaatttggcaggaaagaccagtgatgtgtctaaccgctaattaccagaaaagaatatattaa

SEQ ID NO: 132608 - DNA, 982 bp, Homo sapiens
  Payload ID: 5898
  Gene Symbol: FAM227B
  Gene Name: family with sequence similarity 227, member B
  ENST ID: ENST00000558579
  CDS Start-End: 1-404
taaaagaagatagttcatttgtttcaatttatacacacctatgggaaaatgttcctcgaatatttgaagcacttttgatcatggaatcaaaattaaaggaatattcacttattttgcaaaaccacacctctgaaatatttaagtggaaaagcatgatttctgagacaagttcttatagaaaattggaacgatatggggaatttctaaagaagtaccataagaaaaaaaagataatgctttcagatgaaatggagacagagaagaatatagagggttgcagcttcacaggattcaaagcaaatgaacttactcagctacccagacatttggatgctgaacaaatttatctttttattttaaaagcccataattttgatgtatgtaaatatttcattttattgtaggatacattttgacagtatgatttaatgaatcagacctttacttaaagctatgataaattaggtgttcaacaagatttgatcctttgggcattaaatttggcaggaaagaccagtgatgtgtctaaccgctaattaccagaaaagaatatattaaactctgtgttactgctttgggaccctgaggttgctagcgtacactggcttggcatgtaaccgtaacaggtgttttttccttcttgtctgttcctgctctgtcagctcaggatgttttagcctgctcatttttgatcctgaaataagttgtgagtgcccttcttcacaacccttctgggtgtttcttttgagtcttcaagtgtctgtgggaattttggggtagtatccctgtagggtaaccaaacagtgaaaaactgcaggtgttgggaggtaattagatcaatagccagtgaatacgagggctaaaatgagggtgggatggttacctggtaaaactggtcattttgccctctatttcagttttctgctctttgtgtttatgtacattacatatgttctttttcattaaaaagtattaaatccaa

SEQ ID NO: 132609 - DNA, 911 bp, Homo sapiens
  Payload ID: 5898
  Gene Symbol: FAM227B
  Gene Name: family with sequence similarity 227, member B
  ENST ID: ENST00000560246
  CDS Start-End: 252-788
cgggacccgcctcaagcctcgcagcctttcacccagtttcctcccgattcttgctgggacaacaaaattgggaagcggttctcgaaacatactgtcaaggcgtagttgcagtgagttgtgaagaaatgttgatcccagagaaaagtttgcattttgcccacctcaaagatattttgatttttggtcgcccaactcacattgaagcctaagacccagctgatttctcttcatttctgcaaagttactgtaccatggcaggccaacgaacatgtcaaaggaggagcagcagagctggccccgggaaaatgcaagaacctccaaagagcattgaagaattcttaaagtttcaaaattgggattattggccaagggaaatccattttagagatgatgataaatggtcatgcactctgaaaaaaataaaagaagatagttcatttgtttcaatttatacacacctatgggaaaatgttcctcgaatatttgaagcacttttgatcatggaatcaaaattaaaggaatattcacttattttgcaaaaccacacctctgaaatatttaagtggaaaagcatgatttctgagacaagttcttatagaaaattggaacgatatggggaatttctaaagaagtaccataagaaaaaaaagataatgctttcagatgaaatggagacagagaagaatatagagggggtgtggggaatggggcctcactctgtggcccaggctggagtgcagtggcgcaaccgtggctcactgcaacctctgcctcccagattcaagtgattctcctgcctcagcctcccaagtagctgtgattacagggttgcagcttcacaggattcaaagcaaatgaacttactcagctacccagacatttggatgctgaacaaatttatctttttattt

SEQ ID NO: 132610 - DNA, 1774 bp, Homo sapiens
  Payload ID: 5899
  Gene Symbol: FAM228A
  Gene Name: family with sequence similarity 228, member A
  Uniprot ID: Q86W67
  ENST ID: ENST00000295150
  CDS Start-End: 87-707
ggacgcggcctcgggggagccctaccgggacggagccgcggggcctgcgacttcccccggagctggcctgagggattctcctgtccatggctgccaccaaaactgcgagttatgatgaacatttcaggccagaaaagttaagagaatggccggagcccgagtccgtttctttaatggaggtattagctagagaagacattgatgaagcagtatgtgcaatattatttaaagaaaattccattgtgaaggttacagtcccaccatttgttgatcctctgtttcaaagacagcaagaggtggatgaagagaggagaactggtcttcagtgtgagacaggaaaacgacattccataaaagaacttgaagaaatagagaaggccaggctgcatgccagctcgccctacttcactttcacttcacactgtgtgattccaaaagagtggcataaagcctctgcaagagccaggagtaaaacttacaaatacagtcctgaaaagctcatctatgcagacaagaaacagaaaagaaaagagaaaaagacggccgacctaagtcaggctgcgtttgaaaggcagttcctttcctcaaagctcagccagaagaacaaagtgggtgaaagaaagggtctggtgagcagaggcctggggcggggctggcatgcagggctttgcagcacccacgagcagcacatactggttccagaatgagccaccgccacagccctccctgtcagacaggcacccaagggcggaggaggcatggcccaagaagaagggtgtgaagaggaggagggagaaatggcggtggcctcaggctcagcactgcagctctgacagggcccctcgggcggggaagccttgcatgaagaaactcagacaagtggtaaatgtgggacctggaccccactttccggagacatcctgtccttccgaggtgagggccaacctggccacaggggcttttccccctgagatttcttcagcgccttcgcccgggcctttgcccttctgccactttcctaccattttccacttactccatccaaactgcaccaaagatggtgttctccttagtccacacacaactggtgggaagtttttgaaatgaaatttataccaaaaaattagggcaagatgagattttttgatatttaaaaggtatttttatatgtaggaattttctgagtatggatttcttatccagagctcatggttcatttgacacagttttcagctcctggtctatttccccttccattctctccgccacgccctgtgccctgaggcctgaggcgcaggaccctcccagggaaggcctagggggcttggtgggccaccgctcagctcaggacctgacagcgtcactcccaccctcaccaccacacacacaggatgggggactgctgctgctttccagcctgtgagcctggataggtattttgtgacccagctcctgctcagtcccatcgctgtccccggtctctccagggagtaagggattctccgtctgtggtaagttacctgtgactcttcagcagtttcctctgagcataattatatctgagagcacagggagctcctcattccatgtatttttcaaatattcaagatgtacaacgtgatgatttgctataggtattcattgtgaaatgtttgccacagtcaagcttgttgacatacccaccagctcacatttactgttttcgtgtgtgtggtgagaatactcacaatctactctctgagcaaactgcaaatatatgttattagtaactgta

SEQ ID NO: 132611 - DNA, 809 bp, Homo sapiens
  Payload ID: 5899
  Gene Symbol: FAM228A
  Gene Name: family with sequence similarity 228, member A
  ENST ID: ENST00000456591
  CDS Start-End: 121-441
gggcccgcgggctcctttctccgtcgccgctccaggacgcggcctcgggggagccctaccgggacggagccgcggggcctgcgacttcccccggagctggcctgagggattctcctgtccatggctgccaccaaaactgcgagttatgatgaacatttcaggccagaaaagttaagagaatggccggagcccgagtccgtttctttaatggaggtattagctagagaagacattgatgaagcagtatgtgcaatattatttaaagaaaattccattgtgaagagattggatatgtattttcagcatgtggatacttttaaggaaagaagaaaagagatgttacataaaaaatgggttgaaaatgttgcagagcctcttcagcagagaattatggaaaaagtaatttcatataaagagcttaaaatgaaacgagaatgttgaatattatttacagcacagacataaaatggttacagtcccaccatttgttgatcctctgtttcaaagacagcaagaggtggatgaagagaggagaactggtcttcagtgtgagacaggaaaacgacattccataaaagaacttgaagaaatagagaaggccaggctgcatgccagctcgccctacttcactttcacttcacactgtgtgattccaaaagagtggcataaagcctctgcaagagccaggagtaaaacttacaaatacagtcctgaaaagctcatctatgcagacaagaaacagaaaagaaaagagaaaaagacggccgacctaagtcaggctgcgtttgaaaggcagttcctttcctcaa

SEQ ID NO: 132612 - DNA, 630 bp, Homo sapiens
  Payload ID: 5899
  Gene Symbol: FAM228A
  Gene Name: family with sequence similarity 228, member A
  ENST ID: ENST00000432434
  CDS Start-End: 1-630
ctgccaccaaaactgcgagttatgatgaacatttcaggccagaaaagttaagagaatggccggagcccgagtccgtttctttaatggaggtattagctagagaagacattgatgaagcagtatgtgcaatattatttaaagaaaattccattgtgaagagattggatatgtattttcagcatgtggatacttttaaggaaagaagaaaagagatgttacataaaaaatgggttgaaaatgttgcagagcctcttcagcagagaattatggaaaaagttacagtcccaccatttgttgatcctctgtttcaaagacagcaagaggtggatgaagagaggagaactggtcttcagtgtgagacaggaaaacgacattccataaaagaacttgaagaaatagagaaggccaggctgcatgccagctcgccctacttcactttcacttcacactgtgtgattccaaaagagtggcataaagcctctgcaagagccaggagtaaaacttacaaatacagtcctgaaaagctcatctatgcagacaagaaacagaaaagaaaagagaaaaagacggccgacctaagtcaggctgcgtttgaaaggcagttcctttcctcaaagctcagccagaaga

SEQ ID NO: 132613 - DNA, 516 bp, Homo sapiens
  Payload ID: 5899
  Gene Symbol: FAM228A
  Gene Name: family with sequence similarity 228, member A
  ENST ID: ENST00000415196
  CDS Start-End: 1-411
ctgcatgccagctcgccctacttcactttcacttcacactgtgtgattccaaaagagtggcataaagcctctgcaagagccaggagtaaaacttacaaatacagtcctgaaaagctcatctatgcagacaagaaacagaaaagaaaagagaaaaagacggccgacctaagtcaggctgcgtttgaaaggcagttcctttcctcaaagctcagccagaagaacaaagtgggtgaaagaaagggtctggttttaggaaccagacagcagagaccccgttcctgggctgctggggacagccaacagcacaggggtccccagcctgtgggaaaaagagtgatgacagctgaggtgctggggcagcacctggcctccctgcagaaggtggccaggcagggccacccttggtactgaagcttcgtggacttgacttggcagtgtctgtacagcagttaaaatactctaaacatattttcttcctccagaagtggaaataaattgcaagaaatacccaaatca

SEQ ID NO: 132614 - DNA, 703 bp, Homo sapiens
  Payload ID: 5900
  Gene Symbol: FAM228B
  Gene Name: family with sequence similarity 228, member B
  ENST ID: ENST00000615135
  CDS Start-End: 200-424
ctctgaagccgtcatctggagtctgtagtgaaggcctcttgttagggaaactggatggttagtgttcaaaatccattttgcgtgtgtgcaaggacacaggtggtattaaacagaagagaaaatcagatgactgtgaaatgttcaatactaaataagatgatttttagtttttccaggggcattgttatttgtgaccacaatgaaaaatgtagacagtgatgatctggtaactggcacacttcccaagctcaagagctcaaaagaatggttggagcccaagcccctttgttttatggaggttttagctaaagaagatactgaggcagctattcaatcaatattatacaaagaaaattctgtaattaagaaacaaagggtcatcctttctagaaagagaaccgctgtgctatcaggagggaaataatccaagtgccaaagaggccatctctgaagggtatttttcttccttgagcctcagccaggaacgggaggaagaccaggatgggtctccctccccgcgtttggggctgctgaagctggagctataagaaagaagagggaggtttcagcaaccaaggagcacacaccctgatccttgattggtgaaaggatacacaaaatcaggctgcttcagaggaagtcatctgctcacaggaatcagggtgaaggccaaggacggcactcaagaattgtcctgtctcta

SEQ ID NO: 132615 - DNA, 1238 bp, Homo sapiens
  Payload ID: 5900
  Gene Symbol: FAM228B
  Gene Name: family with sequence similarity 228, member B
  ENST ID: ENST00000613899
  CDS Start-End: 378-941
gaggagggtggcgagaggtggggtggggcccaggtgagtagcgggcgaaggcggggcctgaggaggactgagctggggcgggacccagcagctgctccaagcttttctgccatttgaagcttcttctgggagccagctgtgaccagaggaatagctccagccatccggttaaaagtttaacaaccggaacagctccagtctgcagctcccagcgtgatcgacgcagaagacaggtgatttctgcatttccgactgaggttttagctaaagaagatactgaggcagctattcaatcaatattatacaaagaaaattctgtaattaagggaaatgcatttatagaacattatgatccaaaagagtatgatcccttttatatgagcaagaaggaccccaattttctgaaggttaccatcccaccatttcatgaccctttgaaaaaagcacaatatgacaaggataacgaaaaaagaactcttcttcagtgtgagactggcaaaatatattcaataaaggaattcaaagaagttgagaaggttcagctgcattccagattcccacaaatttctaattcaaggcactttataactccaaacgagtggctgaaactgcctacaagatacatagaaagtgaattttgtagaaggagaaggttaaaggtgaaagtgaattttaatgactgtagttttgatttgaaacctttggcaagagctccttatcttttggaatcccaggaagaagaaaaaacagttatttacaaaaacaaagggtcatcctttctagaaagagaaccgctgtgctatcaggagggaaataatccaagtgccaaagaggccatctctgaagggtatttttcttccttgagcctcagccaggaacgggaggaagaccaggatgggtctccctccccgcgtttggggctgctgaagctggagctataagaaagaagagggaggtttcagcaaccaaggagcacacaccctgatccttgattggtgaaaggatacacaaaatcaggctgcttcagaggaagtcatctgctcacaggaatcagggtgaaggccaaggacggcactcaagaattgtcctgtctctaaaaaaaaagcatctgcaacgaacttcctttaatttttgagttcagtgtctgtgataattaagaaatggcaataccatgtattttccccagaagttaagaaatattgctgaacgaaccaataaaaataattacagctccctca

SEQ ID NO: 132616 - DNA, 1357 bp, Homo sapiens
  Payload ID: 5900
  Gene Symbol: FAM228B
  Gene Name: family with sequence similarity 228, member B
  ENST ID: ENST00000615575
  CDS Start-End: 87-1061
ggaacccgcggcgcagggggcggagtgctcgcgcggcgctgcgtccgggagacgtttttccaggggcattgttatttgtgaccacaatgaaaaatgtagacagtgatgatctggtaactggcacacttcccaagctcaagagctcaaaagaatggttggagcccaagcccctttgttttatggaggttttagctaaagaagatactgaggcagctattcaatcaatattatacaaagaaaattctgtaattaaggaactagataagtatttacaacatcatgccttcttaaatgcaagaagaaaggagatgttatataaaagatgggttgactgtgtggcagatcctcttcagaagaaaattatagaaaaagtttgctcacataagaagattaaaaaaaggaggcaaggggaattagatggctttttaaaacatgtaaataaaaagggaaatgcatttatagaacattatgatccaaaagagtatgatcccttttatatgagcaagaaggaccccaattttctgaaggttaccatcccaccatttcatgaccctttgaaaaaagcacaatatgacaaggataacgaaaaaagaactcttcttcagtgtgagactggcaaaatatattcaataaaggaattcaaagaagttgagaaggttcagctgcattccagattcccacaaatttctaattcaaggcactttataactccaaacgagtggctgaaactgcctacaagatacatagaaagtgaattttgtagaaggagaaggttaaaggtgaaagtgaattttaatgactgtagttttgatttgaaacctttggcaagagctccttatcttttggaatcccaggaagaagaaaaaacagttatttacaaaaacaaagggtcatcctttctagaaagagaaccgctgtgctatcaggagggaaataatccaagtgccaaagaggccatctctgaagggtatttttcttccttgagcctcagccaggaacgggaggaagaccaggatgggtctccctccccgcgtttggggctgctgaagctggagctataagaaagaagagggaggtttcagcaaccaaggagcacacaccctgatccttgattggtgaaaggatacacaaaatcaggctgcttcagaggaagtcatctgctcacaggaatcagggtgaaggccaaggacggcactcaagaattgtcctgtctctaaaaaaaaagcatctgcaacgaacttcctttaatttttgagttcagtgtctgtgataattaagaaatggcaataccatgtattttccccagaagttaagaaatattgctgaacgaaccaataaaaataattacagctccctc

SEQ ID NO: 132617 - DNA, 757 bp, Homo sapiens
  Payload ID: 5900
  Gene Symbol: FAM228B
  Gene Name: family with sequence similarity 228, member B
  ENST ID: ENST00000611917
  CDS Start-End: 1-327
tattcaataaaggaattcaaagaagttgagaaggttcagctgcattccagattcccacaaatttctaattcaaggcactttataactccaaacgagtggctgaaactgcctacaagatacatagaaagtgaattttgtagaaggagaagaaacaaagggtcatcctttctagaaagagaaccgctgtgctatcaggagggaaataatccaagtgccaaagaggccatctctgaagggtatttttcttccttgagcctcagccaggaacgggaggaagaccaggatgggtcctctctgtgcagatgtgatcatccctccaactcctagtaccagcccctgtctgctctgaggctctgctgtcagtcccctacgtgatctccaaggatcctcaggtcccagatgggagccctccacggtctccctccccgcgtttggggctgctgaagctggagctataagaaagaagagggaggtttcagcaaccaaggagcacacaccctgatccttgattggtgaaaggatacacaaaatcaggctgcttcagaggaagtcatctgctcacaggaatcagggtgaaggccaaggacggcactcaagaattgtcctgtctctaaaaaaaaagcatctgcaacgaacttcctttaatttttgagttcagtgtctgtgataattaagaaatggcaataccatgtattttccccagaagttaagaaatattgctgaacgaaccaataaaaataattacagctccctcact

SEQ ID NO: 132618 - DNA, 362 bp, Homo sapiens
  Payload ID: 5900
  Gene Symbol: FAM228B
  Gene Name: family with sequence similarity 228, member B
  ENST ID: ENST00000611138
  CDS Start-End: 1-117
ccaagtgccaaagaggccatctctgaagggtatttttcttccttgagcctcagccaggaacgggaggaagaccaggatgggtttcagcaaccaaggagcacacaccctgatccttgattggtgaaaggatacacaaaatcaggctgcttcagaggaagtcatctgctcacaggaatcagggtgaaggccaaggacggcactcaagaattgtcctgtctctaaaaaaaaagcatctgcaacgaacttcctttaatttttgagttcagtgtctgtgataattaagaaatggcaataccatgtattttccccagaagttaagaaatattgctgaacgaaccaataaaaataattacagctccctc

SEQ ID NO: 132619 - DNA, 975 bp, Homo sapiens
  Payload ID: 5900
  Gene Symbol: FAM228B
  Gene Name: family with sequence similarity 228, member B
  ENST ID: ENST00000611127
  CDS Start-End: 1-975
atgaaaaatgtagacagtgatgatctggtaactggcacacttcccaagctcaagagctcaaaagaatggttggagcccaagcccctttgttttatggaggttttagctaaagaagatactgaggcagctattcaatcaatattatacaaagaaaattctgtaattaaggaactagataagtatttacaacatcatgccttcttaaatgcaagaagaaaggagatgttatataaaagatgggttgactgtgtggcagatcctcttcagaagaaaattatagaaaaagtttgctcacataagaagattaaaaaaaggaggcaaggggaattagatggctttttaaaacatgtaaataaaaagggaaatgcatttatagaacattatgatccaaaagagtatgatcccttttatatgagcaagaaggaccccaattttctgaaggttaccatcccaccatttcatgaccctttgaaaaaagcacaatatgacaaggataacgaaaaaagaactcttcttcagtgtgagactggcaaaatatattcaataaaggaattcaaagaagttgagaaggttcagctgcattccagattcccacaaatttctaattcaaggcactttataactccaaacgagtggctgaaactgcctacaagatacatagaaagtgaattttgtagaaggagaaggttaaaggtgaaagtgaattttaatgactgtagttttgatttgaaacctttggcaagagctccttatcttttggaatcccaggaagaagaaaaaacagttatttacaaaaacaaagggtcatcctttctagaaagagaaccgctgtgctatcaggagggaaataatccaagtgccaaagaggccatctctgaagggtatttttcttccttgagcctcagccaggaacgggaggaagaccaggatgggtctccctccccgcgtttggggctgctgaagctggagctataa

SEQ ID NO: 132620 - DNA, 362 bp, Homo sapiens
  Payload ID: 5901
  Gene Symbol: FAM229A
  Gene Name: family with sequence similarity 229, member A
  ENST ID: ENST00000428500
  CDS Start-End: 1-159
ttccccattgaggccggagactcccgtggccttgccgccgcccccgagtcccaggacagcccggaggcggtagcgacggagcacaacccggtcagcggcccctgtcgcgcgtcaatttccccaggccgcttcgtcgctgccctggatgccactgcctgacgctgctgcacgtgcccatcgacgtctacctcgccatgggcgggagcccccgggcccgcgccacgtgagtgcgcctgctccctgcggctccgcgggagctgggcgggaacgaggcccccagcgggccaccacgctgaggtcgcatgcgccgagcacgagacaatgatgcacattttaaaataaaagaatgatgcacattttaa

SEQ ID NO: 132621 - DNA, 699 bp, Homo sapiens
  Payload ID: 5901
  Gene Symbol: FAM229A
  Gene Name: family with sequence similarity 229, member A
  Uniprot ID: H3BQW9
  ENST ID: ENST00000432622
  CDS Start-End: 153-536
gcgcgaccccgtctccaggcgccatggccagaggcctccagtccccgattctggcccgcgctgagtgccaggggcggcagggggcaccgttgggggttctccagtgggaggaacgtgctctgtgaggtcagcgcgccgcggcccgggtcacaatgctgccctcctcgacgcccgggcccgggcacgccacagagacctgcccggctccgcctggaccggagcgttctcccgcggccagggctccggcagctgcttctagcctgggaccggtctcaaccgccgggagagcgccccggggcttggacatgagcgcccaggagcccccgcagggtcggagattccccattgaggccggagactcccgtggccttgccgccgcccccgagtcccaggacagcccggaggcggtagcgacggagcacaacccggtcaggccgcttcgtcgctgccctggatgccactgcctgacgctgctgcacgtgcccatcgacgtctacctcgccatgggcgggagcccccgggcccgcgccacgtgagtgcgcctgctccctgcggctccgcgggagctgggcgggaacgaggcccccagcgggccaccacgctgaggtcgcatgcgccgagcacgagacaatgatgcacattttaaaataaaagaatgatgcacattttaataaagcacagcacaaactgttctttcca

SEQ ID NO: 132622 - DNA, 2543 bp, Homo sapiens
  Payload ID: 5902
  Gene Symbol: FAM229B
  Gene Name: family with sequence similarity 229, member B
  Uniprot ID: Q4G0N7
  ENST ID: ENST00000368656
  CDS Start-End: 298-540
gccgcgcaagtgcacttgcgtgtcaccgttaccgtagcgactgggcttctggactgtatatcctagctgccttgtcaacatcttcgagcatcggcagctccggaggccggggtaactggcagcaggtaggaaactatgtgaaagaatctcctgatgtcataatttccgggtgtcaccggaacatttgatcatcattcctttggcaattccagccttctgtggaaaggccagtagaaagcattgatttattcacctctacaggaatcagactcagcctcttttggttttcagtgaagtatgccttttcaatttggaacccagccaaggaggtttccagtggaaggaggagattcttcaattgagctggaacctgggctgagctccagtgctgcctgtaatgggaaggagatgtcaccaaccaggcaactccggaggtgccctggaagtcattgcctgacaataactgatgttcccgtcactgtttatgcaacaacgagaaagccacctgcacaaagcagcaaggaaatgcatcctaaatagcaccattaagtcttttgtcaaggtctgactaggtcaagggtaatggaccagtatcatctggtgatctggtaaacaaataaaagtggtggcacctttagatgatgacaacagttgagctctttacttttagtaagaccgacagaaatgtagtcagtaaagcacatgtagtgataggctatcagttatgtctgatacataagacagaataatatttcacaattagaaagtaccttagagatcatcttgctcacagtagatcattaatatcaataattaaagatgaagcttaatccaccatggtcatcagtcaggtggggcttattctaaatgcttaatgtgtcttaagctcatttccttgttcatatttgggttgctacttggctaaatcctttcaccttagtaccctaagccagtttcctggcttgatactatttgataatgctctgctcaggaatgattatattgggtgagaaatggagccctggggttgtgtgttttggaacagtattcaagatcaaagaaagttcttagtccatggttaatctgcaaggcatttaagccacttccatagaggagcccagattgttggttaaatatattgataatgaagtcaaagctgtggttccaaccccgatttttccaagaaaaatgacgtctggttatcactttgtacacgaagtgctaaccaggtatcttgataaattgtttacagtaggtattgagaaacctcatgtggattttttaatttggttagatgtgggatcacttttgaggatgaggccagctctctatgttctctttttcttcttgcagtagtccccagaaactcagtctgctttccttttctctcgatggctgtcagcacccatctaatgaaattgtcttctccaaaagactgactttaggatcagatacaattttcaccagtgttttttgtctaccttgctgcttctgaaaatatacatataagccttttaaaatgaaaagtttattaacttataattaaatagacgtagatgcatatgtgttgcattaggtgaaaagaaaaactgccagggagttataagaggaaaaactctcagagctcacactgagctgggagaagtttgaatgccaaccagttaaagtggaaagatcttgaacatgtggggcattgagtagagactcagaaaggttgtactttcataagagatccaaactggagctagactaaaggctaatgtataccaattttaagaaagcttaaaaataagccttgagagactcaagatgatctctaagtaacctcattttatctgccaaataaaaatagaacattccttaaaggaagaaaacaaaatcgaggcaggaaattgcctgaggctggagaaaaaatgacaggaaggagaaaggagtgatgaaaaattcctcagagggctgggcttggtggctcatgcctgtaatcctggcactttgggaggccgaagtggatggattatctgaggtcaggcattcgaagccagcctggccaacatggtgaaaccccgactctactaaaaatacaaaaattagtcgggtatgatgggcaggtgcctgtaattccagctacttgggaggctgaggcaggaaaatagcttgaacccaggaggcagaggttgcagtgagctgagattgcatcactgtgctccagcctaggcaacagagtgagactttgtctcaaaaaaaaagaaaaacaaagaaaaattcctcagagctcatacaaggctgggtagaatatgtgtttcaacaatagtggatcttttaatatagtacatggatcattgagtagagtcttcagcaaaatattggcaaagtagggttagggttaggttagggagatgggaatagactgaagactactctggacttgccctaacagagtttaagagcaacatttgaaaggatcaaactgatttcaagtaacttgagtgcatccaaggggagaaaacccatcaaaataaaaataaaaactacaataaaatcca

SEQ ID NO: 132623 - DNA, 598 bp, Homo sapiens
  Payload ID: 5902
  Gene Symbol: FAM229B
  Gene Name: family with sequence similarity 229, member B
  Uniprot ID: Q4G0N7
  ENST ID: ENST00000604268
  CDS Start-End: 248-490
actgggcttctggactgtatatcctagctgccttgtcaacatcttcgagcatcggcagctccggaggccgggcaggtaggaaactatgtgaaagaatctcctgatgtcataatttccgggtgtcaccggaacatttgatcatcattcctttggcaattccagccttctgtggaaaggccagtagaaagcattgatttattcacctctacaggaatcagactcagcctcttttggttttcagtgaagtatgccttttcaatttggaacccagccaaggaggtttccagtggaaggaggagattcttcaattgagctggaacctgggctgagctccagtgctgcctgtaatgggaaggagatgtcaccaaccaggcaactccggaggtgccctggaagtcattgcctgacaataactgatgttcccgtcactgtttatgcaacaacgagaaagccacctgcacaaagcagcaaggaaatgcatcctaaatagcaccattaagtcttttgtcaaggtctgactaggtcaagggtaatggaccagtatcatctggtgatctggtaaacaaataaaagtggtggcacctttagatgatgacaa

SEQ ID NO: 132624 - DNA, 510 bp, Homo sapiens
  Payload ID: 5903
  Gene Symbol: FAM231A
  Gene Name: family with sequence similarity 231, member A
  Uniprot ID: P0DMU4
  ENST ID: ENST00000434336
  CDS Start-End: 1-510
atggtgtcttcaaagggactgtggaaagagaggccttcagcccacacctctgaatgcttttccaccacagcatgccctgtggcctttatcctgctggtgtggaacagtcagacccctgcagggctgcagagcctctgtactgggcggcatcccagcctgagtgccagagctcagagggcaggcccccgagcaagcagagaggagggcaccttttggacagaacgtgtgggacaagagcgatggctcatccgttcaggttcctcacaaaatgagagtcaggaagatcagggcgccggcctgatttcccaggcagggctgaaagcagacaaccggagggagagcagcacctgggccaatgaggtagaagacagaagaccacagtgtactcctgccctcaacctcaccccctcccacccacatcctccacactccctgaccaccttcctcagaagtgtaataggaatccagattccccctggcctggttgctgcaggaggcacagtagcctga

SEQ ID NO: 132625 - DNA, 510 bp, Homo sapiens
  Payload ID: 5904
  Gene Symbol: FAM231B
  Gene Name: family with sequence similarity 231, member B
  Uniprot ID: A6NCW3
  ENST ID: ENST00000601199
  CDS Start-End: 1-510
atggtgtcttcaaagggactgtggaaagagaggccttcagcccacacctctgaatgcttttccaccacagcatgccctgtggcctttatcctgctggtgtggaacagtcagacccctgcagggctgcagagcctctgtactgggcggcatcccagcctgagtgccagagctcagagggcaggcccccgagcaagcagagaggagggcaccttttggacagaacgtgtgggacaagagcgatggctcatccgttcaggttcctcacagaatgagagtcaggaagatcagggcgccggcctgatttcccaggcagggctgaaagcagacaaccggagggagagcagcacctgggccaatgaggtagaagacagaagaccacagtgtactcctgccctcaacctcaccccctcccacccacatcctccacactccctgaccaccttcctcagaagtgtaataggaatccagattccccctggcctggttgctgcaggaggcacagtagcctga

SEQ ID NO: 132626 - DNA, 510 bp, Homo sapiens
  Payload ID: 5905
  Gene Symbol: FAM231C
  Gene Name: family with sequence similarity 231, member C
  Uniprot ID: P0DMU5
  ENST ID: ENST00000600179
  CDS Start-End: 1-510
atggggtgttcaaagggactgtggaaagagaggccttcagcccacacctctgaatgcttttcgaccacagcatgccctgtggcctttatcctgctggtgtggaacagtcagagccctgcagggctgcagagcttctgtactgggcggcatcccagcctgagtgtcagagctcagagagcaggcaccggagcaagtagagaggagggcaccttttggacagaatgtgtgggacaagagcgacggctcatccattcaggttcctcagaaaatgagagtcaggaagatgagggcgcagacctgattccctacacagggctgaaagcagacaaccggaggaagagcagcacctgggccaacgaggtagaagacagaagaccacagtctactcctgccctcaatctcaccccttcccacccacatcctccacgccccctgatcaccttcctcagaagtgtaataggaatccagattccccctggcctggttgctgcgggaggcacagtggcctga

SEQ ID NO: 132627 - DNA, 511 bp, Homo sapiens
  Payload ID: 5906
  Gene Symbol:
  Gene Name: family with sequence similarity 231, member C [Source:EntrezGene
  Acc:729587]
  Uniprot ID: P0DMU3
  ENST ID: ENST00000624031
  CDS Start-End: 1-510
atggtgtcttcaaagggactgtggaaagagaggccttcagcccacacctctgaatgcttttccaccacagcatgccctgtggcctttatcctgctggtgtggaacagtcagacccctgcagggctgcagagcctctgtactgggcggcatcccagcctgagtgccagagctcagagggcaggcccccgagcaagcagagaggagggcaccttttggacagaacgtgtgggacaagagcgatggctcatccgttcaggttcctcacaaaatgagagtcaggaagatcagggcgccggcctgatttcccaggcagggctgaaagcagacaaccggagggagagcagcacctgggccaatgaggtagaagacagaagaccacagtgtactcctgccctcaacctcaccccctcccacccacatcctccacactccctgaccaccttcctcagaagtgtaataggaatccagattccccctggcctggttgctgcaggaggcacagtagcctgat

SEQ ID NO: 132628 - DNA, 3394 bp, Homo sapiens
  Payload ID: 5907
  Gene Symbol: FAM231D
  Gene Name: family with sequence similarity 231, member D
  Uniprot ID: Q6ZW35
  ENST ID: ENST00000607157
  CDS Start-End: 2176-2685
cttgtgcagaggactctccaggtgaaggctcaagggtggatccagctcgagacaccctcgctccccctcacagtcggaccttaggatttaggctttaacatctccacatcatgagattcgaaacctttaggtcttgtcttccgttctgtcctccaaatcggcctcttccgagcctgttgaccagggccagccgggcagagggctgggctcgctcaacgaggctcctctcgcacctcctggagcttcaggcttctttccgttgcagagaagctttatgggccaattcgttcggcatccccgggggcaggtgcgcggtgcgcggggaagaagaggatttgactgcggttctccacccccggcgcccaacctccaccccggtgcgcgcgctcttccaggctcctgctggtcccacttgccaggagttaggtctcaggtcagcctgagctcctgagacgcccaggcccggaaagacacgtaggggaaaccatctgctcacttctgtcctgtccggaagggatccctttctgacgggaaagaaaggcggtgagtcctgtcctgttgagtaggcggaagagagatcaaagggaagacaagaaaaatcctgtgagttttcaggatctaaagttaccatgaggtcgacctaacctcctctggaggtcctcccggtcctcccgtggctgtcgaaggtgaatctagcttccgtctccagttcgccaaggcggacaaagccgacgacaatgggcctgtccactatcttctttcatatgcacaaaatgtcagctcttcttgtttctaacttgcaacatcccacctgatgaccagctcagcaaattagagaccctccatgggattccatctctgtcttagttcgggcttccataactatataccataaactgggtggctaattcacgacagaaatttatttctcacagttctggaggttggaagtccgagatcaaggtgccaacatggtagggttatgatgagagacttttttctggttgtagactgccaccttctcattgtatcctcagggggcagagagagctccctggggtcccttttatagtggcattagtcccactcagactaacgggactaaatccagacccagttattgcaatgtgtgcaaaagaacaaggacttgtactatctgacttcaaggcttactataagctattacagacaaggcatcaggagggacaaatagataaacagactgagttaagagacctgaaactgatccacagccatacagtcaataaatgagctttcaatgaaagcagttcaatagaagaaaataaatcatttcaattaatggactttcatatggaggtgggggagaccaacaatgttattctccctcacactacatacaaaagtaatttgaggtgcattatacaccaaaacttaaaagttaaagatataaagcatttcaaggatactctgtaggtaaagattagcctaccaacaagtaggacactgaaaaaatatatataaaagacatgataaattagacttcatcaacattagccataccttctcatcaaaagataccactaagaaagtgaaaaggcaagcaagccacagacagagagaaaatagtcacaaaacgtatctgacctccacatcctgtaattagaattattgtggtctggtacactgcacccagtttctgcaggagtactttctgggtgtctctaatgagtaagagagggccccatgggatattcctacagttcccagatgaacagtgggaaagactctacgttgacaaaccccggggacctgaaaactcaggtcctcaaggagggtagaggatacctggaccctgacccagacccctagatgggctgtgccaagagacccagcaagggaagggattccctcctgcctcaggttctctgttcttctgtggttagaagacctgaacccaactccctccccaagcactggagatagggcttttccaagggctggggatcttgctgtcctaaggacagctgagcaagggggtcgaggaggagcttgggtggtggaggagaggaaaccgggtaagatgtgtgaagcagtcggctataccaggcacagagaggacccactgggacacaagagcctgcatgtgaagccaggccttgggccaccttgttcctcaaaggggtgcttacttccatgggatcttcaaagggactgtggaaagagaagccttcagcccacacctctgaatgcttttccaccacagcatgccctgtggcctgtatcctgctggtgtggaacagtcagacccctgcagggctgcagagcctctgtactgggcggcatcccagcctgagtgccagagctcagtgggcaggcccccgagcaagcagagaggagggcaccttttggacagaacctgtgggacaagagcgacgtctcatccgttcaggttcctcacaaaatgagagtcaggaagatcagggtgcagacctgatttcccacgaagggctgaaagcagacaaccggagggagagcagcacctgggccaatgaggtagaagacagaagaccacagtgtacttctgccctcaacctcaccccctcccacctacatcctccacaccccctgaccaccttcttcagaaacgtaataggaatcaagatcccccctggcctggttgctatgggaggcacagtggcctgatggagcctgaggcaggtgtgggaagatgtggattgtctaactggaggttgggagtccagggtgcagaaggagaagcttggagtgcaggatttggtggtatgtgtgtggcagtaggcactatgttctaattgccagtttttttttcttcttcctttttttctctagctaaacaagcactggccttgagataagcaatgctgaagcacttgcagctcacctattaccataaactgactgagccctccctacacaagccgtaactactgctttgattggacaagagactgatttcagtagttttctcttgataagagaccactggccgtgggcgggttctggacagtttacagaagctatgcacttgattgcctttgtgtccctgcttcaccttttgaagcatagggcctaattataatgtatttaaatgttgtctccaccccaaagtgaacatgggttgcatgtaacaggcatgtttactcagcatgcatgcagcaggatcccttcacaaatattcagagctccccctattccctgttgaatatgtatatgtggccagccagatcaacgtaaatcactattcgccctcccctccctggaaacctacttttcgggtttcagcaggaagctatgcctcccagtctgtcagaatggccacttgcaggctgtaaccctttataaaaaaataaaatctcctttctaaatttataaa

SEQ ID NO: 132629 - DNA, 2901 bp, Homo sapiens
  Payload ID: 5908
  Gene Symbol: FAM234A
  Gene Name: family with sequence similarity 234, member A
  Uniprot ID: Q9H0X4
  ENST ID: ENST00000301678
  CDS Start-End: 145-1803
ccgcggcggcaggtccacctgggcttgcgaaggcacagattccccgtccacagctcacgaccagatgcaccagcaggagtccacatcgaggacgtcctccgggcactcccacgaccaggagttaaactttgggatgtgcccgtgatgttggaccacaaggacttagaggccgaaatccaccccttgaaaaatgaagaaagaaaatcgcaggaaaatctgggaaatccatcaaaaaatgaggataacgtgaaaagcgcgcctccacagtcccggctctcccggtgccgagcggcggcgttttttctttcattgtttctctgcctttttgtggtgttcgtcgtctcattcgtcatcccgtgtccagaccggccggcgtcacagcgaatgtggaggatagactacagtgccgctgttatctatgactttctggctgtggatgatataaacggggacaggatccaagatgttctttttctttataaaaacaccaacagcagcaacaatttcagccgatcctgtgtggacgaaggcttttcctctccctgcacctttgcagctgctgtgtcgggggccaacggcagcacgctctgggagagacctgtggcccaagacgtggccctcgtggagtgtgctgtgccccagccaagaggcagtgaggcaccttctgcctgcatcctggtgggcagacccagttctttcattgcagtcaacttgttcacaggggaaaccctgtggaaccacagcagcagcttcagcgggaatgcgtccatcctgagccctctgctgcaggtgcctgatgtggacggcgatggggccccagacctgctggttctcacccaggagcgggaggaggttagtggccacctctactccggcagcaccgggcaccagattggcctcagaggcagccttggtgtggacggggaaagtggcttcctccttcacgtcaccaggacaggtgcccactacatcctctttccctgcgcaagctccctctgcggctgctctgtgaagggtctctacgagaaggtgaccgggagcggcggcccgttcaagagtgacccgcactgggagagcatgctcaatgccaccacccgcaggatgctttcccacagctctggagcagtgcgctacctgatgcatgtcccagggaacgccggtgcagatgtgcttcttgtgggctcagaggccttcgtgctgctggacgggcaggagctgacgcctcgctggacacccaaggcagcccatgtcctgagaaaacccatcttcggccgctacaaaccagacaccttggctgtagccgttgaaaacggaactggcaccgacagacagatcctgtttctggaccttggcactggagccgtcctgtgtagcctagccctcccgagcctccctgggggtccactgtccgccagcctgccgaccgcagaccaccgctcagccttcttcttctggggcctccacgagctggggagcaccagcgagacggagaccggggaggcccggcacagcctgtacatgttccaccccaccctgccgcgcgtgctgctggagctggccaatgtctctacccacattgtcgcctttgacgccgtcctgtttgagccaagccgccacgccgcctacatccttctgacaggcccggcagactcagaggcacccggcctggtctctgtgatcaagcacaaggtgcgggaccttgtcccaagcagcagggtggtccgcctgggtgagggtgggccagacagtgaccaagccatcagggaccggttctcccggctgcggtaccagagtgaggcgtagaggcacgccagccagagcctgtggagagactccgcctgctgacactaaacgtcctgggaagtgggcccttccctgggtctctgcactgactcccccactcctgaccctggtgatggtcgccactgggcagcagcagccttaccagtcctccatgatcacacccagggacctgcatgggtgaggggacaccctgggcctctctcccgcccagcatcctccctgagtccccacacagggcctcactctgcaccccaccagggtcccgctcacaccaggcagccttcatagtggtctccctggccaccttgggcagagctgggtcatgcagcaccccatccttacccggtgccctctccttgccagcttctccccaggccagagcggccatcgcgtagaaagaaccagggtgtccccgggacaggccgtcccccaccccatcctgtagaagtccattccccttttccctcctgtgctctgtcccccaaggagtcatggaactcagggtactgggcctcaacgggaacctgagacagctccagcttcgcagcccttcccggagctacagggggatcctctagcatggggggtgtgacttggttcctttgaccaggtcctgtgaggaagcctggagcaagggtctcccccagcaggatgggtggggcctgctctggagctgagcccgtggccgctcacaggtgtccttagtggtgttgcagctgtctactggctgcatgtgctgtgaatatcccaaggaactggctgtggaatgcgtgtttgggtcagtctgtgccctctcagtagacactggagctgctctgtccctgaagaggccccgtgccccaggcatggcaagcgcctgcctctccccttccggtgctcacacgcccacgccgtgccacccgatgcaggactcacctctgtgccttgctgctcctgaggcccaagggcagccatggtgctctgtactgctcgggccgcccaggtcacagagcctgagcttcgtagccaaagcagcctgatgacccacccaccaaggaagaaagcagaataaacatttttgcactgcctgaaaaaccccggtggtcaggcgtgagccta

SEQ ID NO: 132630 - DNA, 1936 bp, Homo sapiens
  Payload ID: 5908
  Gene Symbol: FAM234A
  Gene Name: family with sequence similarity 234, member A
  Uniprot ID: Q9H0X4
  ENST ID: ENST00000301679
  CDS Start-End: 196-1818
agtgacgccagggggcggggccagcggcgcggtcgggtgagaggccgcggcggcaggtccacctgggcttgcgaaggcacagattccccgtccacagctcacgaccagatgcaccagcaggagtccacatcgaggacgtcctccgggcactcccacgaccagtgaccaggagttaaactttgggatgtgcccgtgatgttggaccacaaggacttagaggccgaaatccaccccttgaaaaatgaagaaagaaaatcgcaggaaaatctgggaaatccatcaaaaaatgaggataacgtgaaaagcgcgcctccacagtcccggctctcccggtgccgagcggcggcgttttttctttcattgtttctctgcctttttgtggtgttcgtcgtctcattcgtcatcccgtgtccagaccggccggcgtcacagcgaatgtggaggatagactacagtgccgctgttatctatgactttctggctgtggatgatataaacggggacaggatccaagatgttctttttctttataaaaacaccaacagcagcaacaatttcagccgatcctgtgtggacgaaggcttttcctctccctgcacctttgcagctgctgtgtcgggggccaacggcagcacgctctgggagagacctgtggcccaagacgtggccctcgtggagtgtgctgtgccccagccaagaggcagtgaggcaccttctgcctgcatcctggtgggcagacccagttctttcattgcagtcaacttgttcacaggggaaaccctgtggaaccacagcagcagcttcagcgggaatgcgtccatcctgagccctctgctgcaggtgcctgatgtggacggcgatggggccccagacctgctggttctcacccaggagcgggaggaggttagtggccacctctactccggcagcaccgggcaccagattggcctcagaggcagccttggtgtggacggggaaagtggcttcctccttcacgtcaccaggacaggtgcccactacatcctctttccctgcgcaagctccctctgcggctgctctgtgaagggtctctacgagaaggtgaccgggagcggcggcccgttcaagagtgacccgcactgggagagcatgctcaatgccaccacccgcaggatgctttcccacagctctggagcagtgcgctacctgatgcatgtcccagggaacgccggtgcagatgtgcttcttgtgggctcagaggccttcgtgctgctggacgggcaggagctgacgcctcgctggacacccaaggcagcccatgtcctgagaaaacccatcttcggccgctacaaaccagacaccttggctgtagccgttgaaaacggaactggcaccgacagacagatcctgtttctggaccttggcactggagccgtcctgtgtagcctagccctcccgagcctccctgggggtccactgtccgccagcctgccgaccgcagaccaccgctcagccttcttcttctggggcctccacgagctggggagcaccagcgagacggagaccggggaggcccggcacagcctgtacatgttccaccccaccctgccgcgcgtgctgctggagctggccaatgtctctacccacattgtcgcctttgacgccgtcctgtttgagccaagccgccacgccgcctacatccttctgacaggcccggcagactcagaggcacccggcctggtctctgtgatcaagcacaaggctcacactgggcgacagcggagaggctcttggacggggcagagctcgcgccgagacctgcatgtccgcgtcttgtgacgggtgtgtgggaagccgcccgcctgtgcatcttgcttccgggtattcgctggctgatttactggttttagagatggggatgggcacccagtgctggactgaagaccagagaaggtgg

SEQ ID NO: 132631 - DNA, 3213 bp, Homo sapiens
  Payload ID: 5908
  Gene Symbol: FAM234A
  Gene Name: family with sequence similarity 234, member A
  Uniprot ID: Q9H0X4
  ENST ID: ENST00000399932
  CDS Start-End: 452-2110
tcgggagaggaggaggaggggagcgaggacgcagagaaggaggggaaagaggacggagaggagcgaggacggaggggggacgggaacgaagaggggcgaggacgttcagcatccattgcgacagcgacaaacaggacaccgccaggttcccggcggaggcagcgcccaagatccccgttgccgagcaaccgaagcatggcggtggggcggggtcggagcctgcgcatttccgcccccgcccgcccggctggtcggaagtgacgccagggggcggggccagcggcgcggtcgggtgagaggccgcggcggcaggtccacctgggcttgcgaaggcacagattccccgtccacagctcacgaccagatgcaccagcaggagtccacatcgaggacgtcctccgggcactcccacgaccagtgaccaggagttaaactttgggatgtgcccgtgatgttggaccacaaggacttagaggccgaaatccaccccttgaaaaatgaagaaagaaaatcgcaggaaaatctgggaaatccatcaaaaaatgaggataacgtgaaaagcgcgcctccacagtcccggctctcccggtgccgagcggcggcgttttttctttcattgtttctctgcctttttgtggtgttcgtcgtctcattcgtcatcccgtgtccagaccggccggcgtcacagcgaatgtggaggatagactacagtgccgctgttatctatgactttctggctgtggatgatataaacggggacaggatccaagatgttctttttctttataaaaacaccaacagcagcaacaatttcagccgatcctgtgtggacgaaggcttttcctctccctgcacctttgcagctgctgtgtcgggggccaacggcagcacgctctgggagagacctgtggcccaagacgtggccctcgtggagtgtgctgtgccccagccaagaggcagtgaggcaccttctgcctgcatcctggtgggcagacccagttctttcattgcagtcaacttgttcacaggggaaaccctgtggaaccacagcagcagcttcagcgggaatgcgtccatcctgagccctctgctgcaggtgcctgatgtggacggcgatggggccccagacctgctggttctcacccaggagcgggaggaggttagtggccacctctactccggcagcaccgggcaccagattggcctcagaggcagccttggtgtggacggggaaagtggcttcctccttcacgtcaccaggacaggtgcccactacatcctctttccctgcgcaagctccctctgcggctgctctgtgaagggtctctacgagaaggtgaccgggagcggcggcccgttcaagagtgacccgcactgggagagcatgctcaatgccaccacccgcaggatgctttcccacagctctggagcagtgcgctacctgatgcatgtcccagggaacgccggtgcagatgtgcttcttgtgggctcagaggccttcgtgctgctggacgggcaggagctgacgcctcgctggacacccaaggcagcccatgtcctgagaaaacccatcttcggccgctacaaaccagacaccttggctgtagccgttgaaaacggaactggcaccgacagacagatcctgtttctggaccttggcactggagccgtcctgtgtagcctagccctcccgagcctccctgggggtccactgtccgccagcctgccgaccgcagaccaccgctcagccttcttcttctggggcctccacgagctggggagcaccagcgagacggagaccggggaggcccggcacagcctgtacatgttccaccccaccctgccgcgcgtgctgctggagctggccaatgtctctacccacattgtcgcctttgacgccgtcctgtttgagccaagccgccacgccgcctacatccttctgacaggcccggcagactcagaggcacccggcctggtctctgtgatcaagcacaaggtgcgggaccttgtcccaagcagcagggtggtccgcctgggtgagggtgggccagacagtgaccaagccatcagggaccggttctcccggctgcggtaccagagtgaggcgtagaggcacgccagccagagcctgtggagagactccgcctgctgacactaaacgtcctgggaagtgggcccttccctgggtctctgcactgactcccccactcctgaccctggtgatggtcgccactgggcagcagcagccttaccagtcctccatgatcacacccagggacctgcatgggtgaggggacaccctgggcctctctcccgcccagcatcctccctgagtccccacacagggcctcactctgcaccccaccagggtcccgctcacaccaggcagccttcatagtggtctccctggccaccttgggcagagctgggtcatgcagcaccccatccttacccggtgccctctccttgccagcttctccccaggccagagcggccatcgcgtagaaagaaccagggtgtccccgggacaggccgtcccccaccccatcctgtagaagtccattccccttttccctcctgtgctctgtcccccaaggagtcatggaactcagggtactgggcctcaacgggaacctgagacagctccagcttcgcagcccttcccggagctacagggggatcctctagcatggggggtgtgacttggttcctttgaccaggtcctgtgaggaagcctggagcaagggtctcccccagcaggatgggtggggcctgctctggagctgagcccgtggccgctcacaggtgtccttagtggtgttgcagctgtctactggctgcatgtgctgtgaatatcccaaggaactggctgtggaatgcgtgtttgggtcagtctgtgccctctcagtagacactggagctgctctgtccctgaagaggccccgtgccccaggcatggcaagcgcctgcctctccccttccggtgctcacacgcccacgccgtgccacccgatgcaggactcacctctgtgccttgctgctcctgaggcccaagggcagccatggtgctctgtactgctcgggccgcccaggtcacagagcctgagcttcgtagccaaagcagcctgatgacccacccaccaaggaagaaagcagaataaacatttttgcactgcctgaaaaaccccggtggtcaggcgtgagcctagcgtg

SEQ ID NO: 132632 - DNA, 583 bp, Homo sapiens
  Payload ID: 5908
  Gene Symbol: FAM234A
  Gene Name: family with sequence similarity 234, member A
  ENST ID: ENST00000419173
  CDS Start-End: 277-583
ggggccagcggcgcggtcgggtgagaggccgcggcggcaggtccacctgggcttgcgaaggcacagattccccgtccacagctcacgaccagatgcaccagcaggagtccacatcgaggacgtcctccgggcactcccacgaccagataaggaaactgaggcacagttcagtcaaagcacatgtcctggtcacacagctagggaggtgcaagcctgcccgcccagagcccatcttcactccggtgaccaggagttaaactttgggatgtgcccgtgatgttggaccacaaggacttagaggccgaaatccaccccttgaaaaatgaagaaagaaaatcgcaggaaaatctgggaaatccatcaaaaaatgaggataacgtgaaaagcgcgcctccacagtcccggctctcccggtgccgagcggcggcgttttttctttcattgtttctctgcctttttgtggtgttcgtcgtctcattcgtcatcccgtgtccagaccggccggcgtcacagcgaatgtggaggatagactacagtgccgctgttatctatgactttctggctgtggatgatataaacgggg

SEQ ID NO: 132633 - DNA, 374 bp, Homo sapiens
  Payload ID: 5908
  Gene Symbol: FAM234A
  Gene Name: family with sequence similarity 234, member A
  ENST ID: ENST00000426695
  CDS Start-End: 223-374
ggcgcggtcgggtgagaggccgcggcggcaggtccacctgggcttgcgaaggcacagattccccgtccacagctcacgaccagatgcaccagcaggagtccacatcgaggacgtcctccgggcactcccacgaccagctttgtgccgtgggactgctggcctcgccgacctcttgctttatcgacacagtgaccaggagttaaactttgggatgtgcccgtgatgttggaccacaaggacttagaggccgaaatccaccccttgaaaaatgaagaaagaaaatcgcaggaaaatctgggaaatccatcaaaaaatgaggataacgtgaaaagcgcgcctccacagtcccggctctcccggtgccgagcggcggc

SEQ ID NO: 132634 - DNA, 432 bp, Homo sapiens
  Payload ID: 5908
  Gene Symbol: FAM234A
  Gene Name: family with sequence similarity 234, member A
  ENST ID: ENST00000447499
  CDS Start-End: 172-432
gcggtcgggtgagaggccgcggcggcaggtccacctgggcttgcgaaggcacagattccccgtccacagctcacgaccagatgcaccagcaggagtccacatcgaggacgtcctccgggcactcccacgaccaggtagtgaccaggagttaaactttgggatgtgcccgtgatgttggaccacaaggacttagaggccgaaatccaccccttgaaaaatgaagaaagaaaatcgcaggaaaatctgggaaatccatcaaaaaatgaggataacgtgaaaagcgcgcctccacagtcccggctctcccggtgccgagcggcggcgttttttctttcattgtttctctgcctttttgtggtgttcgtcgtctcattcgtcatcccgtgtccagaccggccggcgtcacagcgaatgtggaggatagactacagt

SEQ ID NO: 132635 - DNA, 1006 bp, Homo sapiens
  Payload ID: 5908
  Gene Symbol: FAM234A
  Gene Name: family with sequence similarity 234, member A
  ENST ID: ENST00000420046
  CDS Start-End: 308-1006
ggccgcggcggcagagatggtccgtgcatgggggaaatgtttgtcctttcggccaggctctccaattcaaaaggcaggaattgagaaaatgacagtactttctctgtccctgccacagaatgtccagtttggtctgatttaacatgacaaatcatgctgtagagataagtccacctgggcttgcgaaggcacagattccccgtccacagctcacgaccagatgcaccagcaggagtccacatcgaggacgtcctccgggcactcccacgaccagtgaccaggagttaaactttgggatgtgcccgtgatgttggaccacaaggacttagaggccgaaatccaccccttgaaaaatgaagaaagaaaatcgcaggaaaatctgggaaatccatcaaaaaatgaggataacgtgaaaagcgcgcctccacagtcccggctctcccggtgccgagcggcggcgttttttctttcattgtttctctgcctttttgtggtgttcgtcgtctcattcgtcatcccgtgtccagaccggccggcgtcacagcgaatgtggaggatagactacagtgccgctgttatctatgactttctggctgtggatgatataaacggggacaggatccaagatgttctttttctttataaaaacaccaacagcagcaacaatttcagccgatcctgtgtggacgaaggcttttcctctccctgcacctttgcagctgctgtgtcgggggccaacggcagcacgctctgggagagacctgtggcccaagacgtggccctcgtggagtgtgctgtgccccagccaagaggcagtgaggcaccttctgcctgcatcctggtgggcagacccagttctttcattgcagtcaacttgttcacaggggaaaccctgtggaaccacagcagcagcttcagcgggaatgcgtccatcctgagccctctgctgcaggtgcctgatgtggacggcgatggggccccagacctgctggttctcacccaggag

SEQ ID NO: 132636 - DNA, 984 bp, Homo sapiens
  Payload ID: 5908
  Gene Symbol: FAM234A
  Gene Name: family with sequence similarity 234, member A
  ENST ID: ENST00000453430
  CDS Start-End: 277-984
tcgggtgagaggccgcggcggcagcagaggtggggtttcaccatgttgttcaggctggtctcgaactcctgacttcgtgatctgcctgcctcggcctccgaaagtgctgggattacaggcgcaaaccaccacgcccggtccacctgggcttgcgaaggcacagattccccgtccacagctcacgaccagatgcaccagcaggagtccacatcgaggacgtcctccgggcactcccacgaccagtgaccaggagttaaactttgggatgtgcccgtgatgttggaccacaaggacttagaggccgaaatccaccccttgaaaaatgaagaaagaaaatcgcaggaaaatctgggaaatccatcaaaaaatgaggataacgtgaaaagcgcgcctccacagtcccggctctcccggtgccgagcggcggcgttttttctttcattgtttctctgcctttttgtggtgttcgtcgtctcattcgtcatcccgtgtccagaccggccggcgtcacagcgaatgtggaggatagactacagtgccgctgttatctatgactttctggctgtggatgatataaacggggacaggatccaagatgttctttttctttataaaaacaccaacagcagcaacaatttcagccgatcctgtgtggacgaaggcttttcctctccctgcacctttgcagctgctgtgtcgggggccaacggcagcacgctctgggagagacctgtggcccaagacgtggccctcgtggagtgtgctgtgccccagccaagaggcagtgaggcaccttctgcctgcatcctggtgggcagacccagttctttcattgcagtcaacttgttcacaggggaaaccctgtggaaccacagcagcagcttcagcgggaatgcgtccatcctgagccctctgctgcaggtgcctgatgtggacggcgatggggccccagacctgctggttctcacccaggagcgggaggag

SEQ ID NO: 132637 - DNA, 554 bp, Homo sapiens
  Payload ID: 5908
  Gene Symbol: FAM234A
  Gene Name: family with sequence similarity 234, member A
  ENST ID: ENST00000438220
  CDS Start-End: 162-554
cgcggtcgggtgagaggccgcggcggcaggtccacctgggcttgcgaaggcacagattccccgtccacagctcacgaccagatgcaccagcaggagtccacatcgaggacgtcctccgggcactcccacgaccaggagttaaactttgggatgtgcccgtgatgttggaccacaaggacttagaggccgaaatccaccccttgaaaaatgaagaaagaaaatcgcaggaaaatctgggaaatccatcaaaaaatgaggataacgtgaaaagcgcgcctccacagtcccggctctcccggtgccgagcggcggcgttttttctttcattgtttctctgcctttttgtggtgttcgtcgtctcattcgtcatcccgtgtccagaccggccggcgtcacagcgaatgtggaggatagactacagtgccgctgttatctatgactttctggctgtggatgatataaacggggacaggatccaagatgttctttttctttataaaaacaccaacagcagcaacaatttcagccgatcctgtgtggacgaagctgctgtg

SEQ ID NO: 132638 - DNA, 583 bp, Homo sapiens
  Payload ID: 5908
  Gene Symbol: FAM234A
  Gene Name: family with sequence similarity 234, member A
  ENST ID: ENST00000417499
  CDS Start-End: 378-583
atttggggacaagcatttgggcacactcgctacaagattggttagtgattatggatgatgaagtctgtcggaaaattcagatcttgattgtccacctgggcttgcgaaggcacagattccccgtccacagctcacgaccagatgcaccagcaggagtccacatcgaggacgtcctccgggcactcccacgaccagataaggaaactgaggcacagttcagtcaaagcacatgtcctggtcacacagctagggaggtgcaagcctgcccgcccagagcccatcttcactccggctttgtgccgtgggactgctggcctcgccgacctcttgctttatcgacacagtgaccaggagttaaactttgggatgtgcccgtgatgttggaccacaaggacttagaggccgaaatccaccccttgaaaaatgaagaaagaaaatcgcaggaaaatctgggaaatccatcaaaaaatgaggataacgtgaaaagcgcgcctccacagtcccggctctcccggtgccgagcggcggcgttttttctttcattgtttctctgcctttttgtggtgttcgtcgtctcattcgt

SEQ ID NO: 132639 - DNA, 887 bp, Homo sapiens
  Payload ID: 5908
  Gene Symbol: FAM234A
  Gene Name: family with sequence similarity 234, member A
  ENST ID: ENST00000449945
  CDS Start-End: 160-887
gtgagaggccgcggcggcaggtccacctgggcttgcgaaggcacagattccccgtccacagctcacgaccagatgcaccagcaggagtccacatcgaggacgtcctccgggcactcccacgaccagtgaccaggagttaaactttgggatgtgcccgtgatgttggaccacaaggacttagaggccgaaatccaccccttgaaaaatgaagaaagaaaatcgcaggaaaatctgggaaatccatcaaaaaatgaggataacgtgaaaagcgcgcctccacagtcccggctctcccggtgccgagcggcggcgttttttctttcattgtttctctgcctttttgtggtgttcgtcgtctcattcgtcatcccgtgtccagaccggccggcgtcacagcgaatgtggaggatagactacagtgccgctgttatctatgactttctggctgtggatgatataaacggggacaggatccaagatgttctttttctttataaaaacaccaacagcagcaacaatttcagccgatcctgtgtggacgaagctgctgtgtcgggggccaacggcagcacgctctgggagagacctgtggcccaagacgtggccctcgtggagtgtgctgtgccccagccaagaggcagtgaggcaccttctgcctgcatcctggtgggcagacccagttctttcattgcagtcaacttgttcacaggggaaaccctgtggaaccacagcagcagcttcagcgggaatgcgtccatcctgagccctctgctgcaggtgcctgatgtggacggcgatggggccccagacctgctggttctcacccaggagcgggaggaggttagtggccacctctactccggcagcaccgggcaccagattggcct

SEQ ID NO: 132640 - DNA, 646 bp, Homo sapiens
  Payload ID: 5908
  Gene Symbol: FAM234A
  Gene Name: family with sequence similarity 234, member A
  ENST ID: ENST00000424016
  CDS Start-End: 1-578
gggagagcatgctcaatgccaccacccgcaggatgctttcccacagctctggagcagtgcgctacctgatgcatgtcccagggaacgccggtgcagatgtgcttcttgtgggctcagaggccttcgtgctgctggacgggcaggagctgacgcctcgctggacacccaaggcagcccatgtcctgagaaaacccatcttcggccgctacaaaccagacaccttggctgtagccgttgaaaacggaactggcaccgacagacaggagaccggggaggcccggcacagcctgtacatgttccaccccaccctgccgcgcgtgctgctggagctggccaatgtctctacccacattgtcgcctttgacgccgtcctgtttgagccaagccgccacgccgcctacatccttctgacaggcccggcagactcagaggcacccggcctggtctctgtgatcaagcacaaggtgcgggaccttgtcccaagcagcagggtggtccgcctgggtgagggtgggccagacagtgaccaagccatcagggaccggttctcccggctgcggtaccagagtgaggcgtagaggcacgccagccagagcctgtggagagactccgcctgctgacactaaacgtcctgggaagtgggccc

SEQ ID NO: 132641 - DNA, 459 bp, Homo sapiens
  Payload ID: 5908
  Gene Symbol: FAM234A
  Gene Name: family with sequence similarity 234, member A
  ENST ID: ENST00000420500
  CDS Start-End: 151-459
cgcggcggcaggtccacctgggcttgcgaaggcacagattccccgtccacagctcacgaccagatgcaccagcaggagtccacatcgaggacgtcctccgggcactcccacgaccagtgaccaggagttaaactttgggatgtgcccgtgatgttggaccacaaggacttagaggccgaaatccaccccttgaaaaatgaagaaagaaaatcgcaggaaaatctgggaaatccatcaaaaaatgaggataacgtgaaaagcgcgcctccacagtcccggctctcccggtgccgagcggcggcgttttttctttcattgtttctctgcctttttgtggtgttcgtcgtctcattcgtcatcccgtgtccagaccggccggcgtcacagcgaatgtggaggatagactacagtgccgctggcttttcctctccctgcacctttgcagctgctgtgtcgggg

SEQ ID NO: 132642 - DNA, 739 bp, Homo sapiens
  Payload ID: 5908
  Gene Symbol: FAM234A
  Gene Name: family with sequence similarity 234, member A
  ENST ID: ENST00000421000
  CDS Start-End: 1-704
gtccagaccggccggcgtcacagcgaatgtggaggatagactacagtgccgctgttatctatgactttctggctgtggatgatataaacggggacaggatccaagatgttctttttctttataaaaacaccaacagcagcaacaatttcagccgatcctgtgtggacgaaggcttttcctctccctgcacctttgcagctgctgtgtcgggggccaacggcagcacgctctgggagagacctgtggcccaagacgtggccctcgtggagtgtgctgtgccccagccaagaggcagtgaggcaccttctgcctgcatcctggtgggcagacccagttctttcattgcagtcaacttgttcacaggggcagtccgatgtcacctgccatggggtagcagagaggaggagcggcttggcccccggctgctcctggggtgtcagtggtggcagtgcccagggcgagcccagaacatgaaccagcactcggcccgtcaggggagatcggggcctgtcagtgcccctaagcctgaaggtgcaggtctccgagccccagcggagccggcctcgtggaaggacgagggaaagaatgcgtggtgcacggggccatgtgtgtgtgtgggctccttgcacctcatcgcggtctggaagatttctgtgcctagatttggtgaatgttcatatttcccttacaagctgtcattttaaggatatggaggagaataaagagcaggctgaaaata

SEQ ID NO: 132643 - DNA, 4808 bp, Homo sapiens
  Payload ID: 5909
  Gene Symbol: FAM234B
  Gene Name: family with sequence similarity 234, member B
  Uniprot ID: A2RU67
  ENST ID: ENST00000197268
  CDS Start-End: 121-1989
ctcagctctgtccccagcaagcgggtcccacctttcccggtcccagccccacgcaccgccgctcggaactacacttcccggcagaacgcgggcgcgcgcacgcgcaccggggcctcagccatggcgaccgtgctgtccagggcgctcaagctgccggggaagaagagcccagacctaggggagtatgatccacttacccaggctgacagtgatgagagcgaagacgatctggtgcttaacctgcagaagaatggaggggtcaaaaatgggaagagtcctttgggagaagcgccagaacccgactcagatgctgaggttgcagaggctgcaaagccacatctttcagaagtcaccacggagggctacccctcagaaccccttgggggcctggaacagaaggcggcctcctccctggtgtcatatgtgcgcacgtctgtcttcctgctgactttggggatctcgatgatcctggtgctcctgtgtgctttcctgatcccctgtcctcccagagatctgcacagcacctggagccgccacttgggctcccagggaggtggggacctgtctccattggaattggctgatgtgaatggagatggcctgcgtgatgtgcttctctcctttgtgatgtcaaggaacgggagtgcagtaggtgtctcaagaccagctgctaatcttgtatgcctttcggggatgaatggcagcacactgtggtctagtcttctccctgaggaggctcgagatatcacatgtttggagctgatgccaggaagcttggctgaaaccatctgccttgtgacagggacacacaagatgctcagcgcattcaatgcaacgtcagggaaagccatttggactttaaacccaaactacttgtccaacggtaccttggctgccccagttgtggtactgccagacttggatgaagacggtgttcgagaccttgtggttctggccattggggaattgcagccagatctgtgctttctgctggtgtctggccggaccggaaatccagtgggtcgacctgtgaagtacaacatcgttggagttgggaatctgattggtcctcaggtttacatcaccacaaatggggctgtctacatcctgtttggctttggaaatatacaagctgtcgcactgcgggacatttttgttcaggcccaaaatcgagacagctcaccaccttctctgcagatagaagagccagaatgggaaaagcgaagatccatcaacctgtctgagctcattgatgtttacagtgatggtgttgaactactccagatggtgaaggcaccagattccaactgcagcaaccttctgattacaaccagacaaagccttgtgctgcttcgggggcaaaatctgacaccttactgggcattgagacttcaaggcctgcgcagccagcctactcctggatatttcactgatgatcagacattagatttccttctgcagatacaggatggagttgggatgaaaaagatgatggttgtggatggtgactctggctccattgtttggagttaccgtgctccgtgtcacatgaaagaaacgccagccacctcagcagttacttcagaccagaagtctgtcttcctcttctgggccgaagggctgtcagctgcatctcccaattccgatatcatcctaggaactgagccgcccagccttcaccacctttacctcctgcatcctgcgttcccctccatccttctggatctggccaacaccaccggcacagtgacggcttcagaggttggaattaacgacctctggaaagatgccttttatgttaccaggacaacagggccaagctccgaaggccatccagcagccctggtggtcagcaagcttagtctacggtgggcactaatggagggccagatggctcagctacaggagtccacccccaaaattggccgtggggagctgcgaagatttctctctaggataaagtttgttgaagctccctacgagatctaatctgatggaatcttcagttgcagaagaagtgaacagagtggataccctctctactctcctgtcactgtaaaatcagttctatggagagaagacttcttcgtcctcatttaccacctccctgatggttgcaaaggcttgggaaggcatgttggagtctttgacggcagcatgatctatttggctggggcatcttacctaccttttcagtccctgcattaatcccctctaggaactctgcgtggatcgtttggaaatgtgaatctcttaagtatttaatttttttggtatgtctaatttatgaagtcttgctgggaaagccagtgaagtctatgactaggaaacattttgttgtacattgtgctgtgtgtgtgtatattttagtgttgtggtgaagttattttccaggtatgtcctaagcttcagggatccagtttcttgtccttctgaaatatatctggtttgtttggtcattttgagacttccagatgccctacctctgatgttgagggccacttatttctctccttattctttcccacctgtaccttggctacttccaaattgtagacagaatgagaaagatttatagtggaagactgagttagccatccaagcattttcatctctcttgttttatatcctatttccttagattttccatccatgtctattaagtgaccacaagaataactatattcctatcacaaggggagcaagaggatgtagtctcagtgacccatctctgaccaagtccacatgttgtgttatatgtggctctgatggttctgccagtcatgatcttttttctgtggcgacatcagaagtgtatgtttgcatgctgtcttcaacttagaggagaactggaagtcaggagcctttgatgtccttatcctgctgtatgtcttctctgcatctttttctatagggcaccctccttagctcccctcactctgttttctcttctattcagggatatgtttctggactttttcttctgctacttgagtccaggatgcaaccattttgtcctgcatctcttctttcctgtagagcctttgaagcattgtattttgggaaaattcttctgtaaatactataacttttataaatggttaagttatttagaattatctccagtgcttacttctcccttcttctgtataaatctgctacttcaattaagttctcctctaaacttttaggtcattgtttatatagcagaaaattcaatgttagcggatggaaaactgcttcttgaataaccttgataggtcatccctgagtgcacctcaggttctctctttacctgggcttgtatcttttttttttttttttttttttttttgagacagagttttgctcttgtcgcccaggctggagtgcagtggcacaatctcggctcactgcaaccttcgcctcctgggttcaagcgattctccagccttagcctcccaagtagctgggactacaggtgcccgctaccatgcctggctaatttttttttttgtatttttagtagagacggggtttcaccatgttggccaggctggtcacgaactcctgacctcagataatccacctgcttctgcctcccaaagtgctgggattacaggcgtgagccaccatgcccggctgggcttgtatcttttagcttgtgttagtaaaaggattctagaaaattatgaagtccagattcaaagggatctctgttaattacccactgacaggcattatgacctaacaggaggttggtagcagtagatccaagcatgcatgttgcctggcctgtagattggccttatcaggtttctgggtgcctctgccttaagatcctgaaggcaaattttgtttcaacagtttggaagtcatctgtgggtccagcttgactttggaggaataagaagatacttctagagtatgggaatgattccagataatttctgggatttgaatctacttgagtttaagggcctgggacctaatttggtttagtatagaatttgaagaattaatttataggcagctgaatacccaaaacttgggtggtggtcctgtggtttggctgagctgtccgggcataacctggttctctgttatgttaaggctttctgggaagccagccactctgcgcaggagtgaaacatgaagttgttttctgaggacctgttttggtgggattgtttgggcagaggactgtgtttatgcagggcaaatcccagaaagataagaggaagctagagaaacttaatgtacctgaattcttcatggtgtatttgcaaactaacttaacatagattcttttgactatggtaagtttgaatctctccttgccaaacaacattataagtttagttttcttcttcctcttgcagccggtacagaaaggtgtaagtggtggctgaaaattgaggaagcttcatctgaccaatgtgggtgctggtttcttgtgaaatgtgtccctaagcctccttctccttgcaggcagccacccacccaggtgtctaagataggacatgctcctttctttctctaatcccatcctgaggttgccggcaaagccaatatgaccactactgagaaatagtaatgacttctacaaatgcaagggtcttaccctcctctttcccttaaacaccctcccttttccttagaccccgtttttgccatcccccaaatgtgtggtatggtgaaactaatcccctgaatgtgaattgctatccttattgccctattaaagaagagccagctggtatattgtcaggaagcactatttaaaatgtgaactgttatagagtaaataaataaatactctacaggaa

SEQ ID NO: 132644 - DNA, 2623 bp, Homo sapiens
  Payload ID: 5909
  Gene Symbol: FAM234B
  Gene Name: family with sequence similarity 234, member B
  Uniprot ID: A2RU67
  ENST ID: ENST00000416494
  CDS Start-End: 24-1892
gcacgcgcaccggggcctcagccatggcgaccgtgctgtccagggcgctcaagctgccggggaagaagagcccagacctaggggagtatgatccacttacccaggctgacagtgatgagagcgaagacgatctggtgcttaacctgcagaagaatggaggggtcaaaaatgggaagagtcctttgggagaagcgccagaacccgactcagatgctgaggttgcagaggctgcaaagccacatctttcagaagtcaccacggagggctacccctcagaaccccttgggggcctggaacagaaggcggcctcctccctggtgtcatatgtgcgcacgtctgtcttcctgctgactttggggatctcgatgatcctggtgctcctgtgtgctttcctgatcccctgtcctcccagagatctgcacagcacctggagccgccacttgggctcccagggaggtggggacctgtctccattggaattggctgatgtgaatggagatggcctgcgtgatgtgcttctctcctttgtgatgtcaaggaacgggagtgcagtaggtgtctcaagaccagctgctaatcttgtatgcctttcggggatgaatggcagcacactgtggtctagtcttctccctgaggaggctcgagatatcacatgtttggagctgatgccaggaagcttggctgaaaccatctgccttgtgacagggacacacaagatgctcagcgcattcaatgcaacgtcagggaaagccatttggactttaaacccaaactacttgtccaacggtaccttggctgccccagttgtggtactgccagacttggatgaagacggtgttcgagaccttgtggttctggccattggggaattgcagccagatctgtgctttctgctggtgtctggccggaccggaaatccagtgggtcgacctgtgaagtacaacatcgttggagttgggaatctgattggtcctcaggtttacatcaccacaaatggggctgtctacatcctgtttggctttggaaatatacaagctgtcgcactgcgggacatttttgttcaggcccaaaatcgagacagctcaccaccttctctgcagatagaagagccagaatgggaaaagcgaagatccatcaacctgtctgagctcattgatgtttacagtgatggtgttgaactactccagatggtgaaggcaccagattccaactgcagcaaccttctgattacaaccagacaaagccttgtgctgcttcgggggcaaaatctgacaccttactgggcattgagacttcaaggcctgcgcagccagcctactcctggatatttcactgatgatcagacattagatttccttctgcagatacaggatggagttgggatgaaaaagatgatggttgtggatggtgactctggctccattgtttggagttaccgtgctccgtgtcacatgaaagaaacgccagccacctcagcagttacttcagaccagaagtctgtcttcctcttctgggccgaagggctgtcagctgcatctcccaattccgatatcatcctaggaactgagccgcccagccttcaccacctttacctcctgcatcctgcgttcccctccatccttctggatctggccaacaccaccggcacagtgacggcttcagaggttggaattaacgacctctggaaagatgccttttatgttaccaggacaacagggccaagctccgaaggccatccagcagccctggtggtcagcaagcttagtctacggtgggcactaatggagggccagatggctcagctacaggagtccacccccaaaattggccgtggggagctgcgaagatttctctctaggataaagtttgttgaagctccctacgagatctaatctgatggaatcttcagttgcagaagaagtgaacagagtggataccctctctactctcctgtcactgtaaaatcagttctatggagagaagacttcttcgtcctcatttaccacctccctgatggttgcaaaggcttgggaaggcatgttggagtctttgacggcagcatgatctatttggctggggcatcttacctaccttttcagtccctgcattaatcccctctaggaactctgcgtggatcgtttggaaatgtgaatctcttaagtatttaatttttttgccggtacagaaaggtgtaagtggtggctgaaaattgaggaagcttcatctgaccaatgtgggtgctggtttcttgtgaaatgtgtccctaagcctccttctccttgcaggcagccacccacccaggtgtctaagataggacatgctcctttctttctctaatcccatcctgaggttgccggcaaagccaatatgaccactactgagaaatagtaatgacttctacaaatgcaagggtcttaccctcctctttcccttaaacaccctcccttttccttagaccccgtttttgccatcccccaaatgtgtggtatggtgaaactaatcccctgaatgtgaattgctatccttattgccctattaaagaagagccagctggtatattgtcaggaagcactatttaaaatgtgaactgttatagagtaaataaataaatactctacaggaa

SEQ ID NO: 132645 - DNA, 2011 bp, Homo sapiens
  Payload ID: 5909
  Gene Symbol: FAM234B
  Gene Name: family with sequence similarity 234, member B
  ENST ID: ENST00000537625
  CDS Start-End: 1-975
cttgtgacagggacacacaagatgctcagcgcattcaatgcaacgtcagggaaagccatttggactttaaacccaaactacttgtccaacggtaccttggctgccccagttgtggtactgccagacttggatgaagacggtgttcgagaccttgtggttctggccattggggaattgcagccagatctgtgctttctgctggtgtctggccggaccggaaatccagtgggtcgacctgtgaagtacaacatcgttggagttgggaatctgattggtcctcaggtttacatcaccacaaatggggctgtctacatcctgtttggctttggaaatatacaagctgtcgcactgcgggacatttttgttcaggcccaaaatcgagacagctcaccaccttctctgcagatagaagagccagaatgggaaaagcgaagatccatcaacctgtctgagctcattgatgtttacagtgatggtgttgaactactccagatggtgaaggcaccagattccaactgcagcaaccttctgattacaaccagacaaagccttgtgctgcttcgggggcaaaatctgacaccttactgggcattgagacttcaaggcctgcgcagccagcctactcctggatatttcactgatgatcagacattagatttccttctgcagatacaggatggagttgggatgaaaaagatgatggttgtggatggtgactctggctccattgtttggagttaccgtgctccgtgtcacatgaaagaaacgccagccacctcagcagttacttcagaccagaagtctgtcttcctcttctgggccgaagggctgtcagctgcatctcccaattccgatatcatcctaggaactgagccgcccagccttcaccacctttacctcctgcatcctgcgttcccctccatccttctggatctggccaacaccaccggcacagtgacggcttcagagggttaaaggccgaatttcttagccattcttgactgccacttgcaggacctcatcactccttggtctcctgttatgggtgatgcctccactaagttctggccgatgtgctgtaagcagaagtaacgtgtagcacttccaggaaatctctttataagacagttgtcagatgccagtttttttccccttccactgcattattactgccaggttcatagccattctgaggatttcagaaggctgatctctggagaactgaggggttcgaaagattgacttctcaggagcagggctgagaatggaatgggcccttaatacctgacagtttcccaagccctgatgacacaaagccagtgtaattaattcagaacataaggcttctgattccattactgactcatcatcagtagtggcagcagcagcagaagtcacttaagcttcttgtgatcatggcaccgtgatgggcatcttgcatgctcctgtctgctgacaatggcacatatctgcagtgacgtgggccgctttggaaagtgagtagcttgggttaggtgtcttcagagatggggttggatgacagtttgcaaaggctgtggtagaggtacgctgggtgaaacagcttccttcagattctgactatggtacagccagtgggaaacactggaatcattcaacttttcttccaacaaacatttcttgaacactaattgcgagcttggcactgtgctaggcccagaagatccccaggtaaatatcaccagttcctgcccttccgaagctcacagctgagaaaagggagacactccaaaaagccatccccggatgctgtgcagaggagtcacgtcgtgttcagactcagtccaaagtcagcacagaaaaggagatgacaaacagcccagaaaactcctccctcaaaaatcccataaatcgattctaaatagcttcctttgtttttagctagaacctccttttaaaaagttttttataaaaatgatgtataaggttgattttttagaggatggggaataaagagatctctttctctttc

SEQ ID NO: 132646 - DNA, 596 bp, Homo sapiens
  Payload ID: 5910
  Gene Symbol: FAM24A
  Gene Name: family with sequence similarity 24, member A
  Uniprot ID: A6NFZ4
  ENST ID: ENST00000368894
  CDS Start-End: 122-439
tccctctttctcagattacaggtttgagaagttccaaatatccgatgccctagaggtttttttcccttaattttattgttacaattggccttcatctagctctggatggttgaactgtagcatggcaaagatgtttgatctcaggacgaagatcatgatcggcatcggaagcagcttactggttgccgcgatggtgctcctaagtgttgtgttctgtctttacttcaaagtagctaaggcactaaaagctgcaaaggaccctgatgctgtggctgtaaaaaatcacaacccagacaaggtgtgttgggccacgaacagccaggccaaagccaccaccatggagtcttgtccatctctccagtgctgtgaaggttgtagaatgcatgccagttctgattccctgccaccttgctgttgtgacataaatgagggcctctgacttgggaaagctgggcacaaaaatcttcatgagcaatatttctttcttaatagaatgttttattattcaagtcaagttctagagtgtttacatactattatataatgtacagtgttattttctgtacttctgaataaatgtgcaatattggaaataa

SEQ ID NO: 132647 - DNA, 704 bp, Homo sapiens
  Payload ID: 5911
  Gene Symbol: FAM24B
  Gene Name: family with sequence similarity 24, member B
  Uniprot ID: Q8N5W8
  ENST ID: ENST00000368896
  CDS Start-End: 269-553
ggagaccatgcgcaggcgcggtgcactgtgcgcgggcaccacggcggtttttcgacgctggcggtggacgcaggcagcatggaccacggttgctgggcggatggggagcgtctatggtcagttgccttagaagtggtgagatgggaagctgcagttggaagaccctggaggatgcctgacaaggggatgtctgacacatgattggagctctttttgaaatgtttcttgcccttcctggagcagaggagccattatttatgcagtgattatgcctgtcatcgctggtggtatcctggcggccttgctcctgctgatagttgtcgtgctctgtctttacttcaaaatacacaacgcgctaaaagctgcaaaggaacctgaagctgtggctgtaaaaaatcacaacccagacaaggtgtggtgggccaagaacagccaggccaaaaccattgccacggagtcttgtcctgccctgcagtgctgtgaaggatatagaatgtgtgccagttttgattccctgccaccttgctgttgcgacataaatgagggcctctgagttaggaaaggtgggcacaaaaatcttcatgagcaatacttcttagtagattgttttgttattcaaatcaagttctagtgtttttatgtgagattatataatttacagtgttgttttatatacttttgaataaatgtacactattaaaaat

SEQ ID NO: 132648 - DNA, 745 bp, Homo sapiens
  Payload ID: 5911
  Gene Symbol: FAM24B
  Gene Name: family with sequence similarity 24, member B
  Uniprot ID: Q8N5W8
  ENST ID: ENST00000368898
  CDS Start-End: 292-576
atgcgcaggcgcggtgcactgtgcgcgggcaccacggcggtttttcgacgctggcggtggacgcaggcagcatggaccacggttgctgggcggatggggagcgtctatggtcagttgccttagaagtggtgagatgggaagctgcagttggaagaccctggaggatgcctgacaaggggatgtctgacacatgattggagctctttttgaaatgtttcttgcccttcctggagcagaggagccattatttatgcaggtacatcgaagtcttttgacctccatacagtgattatgcctgtcatcgctggtggtatcctggcggccttgctcctgctgatagttgtcgtgctctgtctttacttcaaaatacacaacgcgctaaaagctgcaaaggaacctgaagctgtggctgtaaaaaatcacaacccagacaaggtgtggtgggccaagaacagccaggccaaaaccattgccacggagtcttgtcctgccctgcagtgctgtgaaggatatagaatgtgtgccagttttgattccctgccaccttgctgttgcgacataaatgagggcctctgagttaggaaaggtgggcacaaaaatcttcatgagcaatacttcttagtagattgttttgttattcaaatcaagttctagtgtttttatgtgagattatataatttacagtgttgttttatatacttttgaataaatgtacactattaaaaataatcctctttgctgccaa

SEQ ID NO: 132649 - DNA, 345 bp, Homo sapiens
  Payload ID: 5912
  Gene Symbol: FAM25A
  Gene Name: family with sequence similarity 25, member A
  Uniprot ID: B3EWG3
  ENST ID: ENST00000343959
  CDS Start-End: 20-289
cactgtctgctgccacacgatgctgggaggcctggggaagctggctgccgaaggcctggcccaccgcaccgagaaggccaccgagggagccattcatgccgtggaagaagtggtgaaggaggtggtgggacacgccaaggagactggagagaaagccattgctgaagccataaagaaagcccaagagtcaggggacaaaaagatgaaggaaatcactgagacagtgaccaacacagtcacaaatgccatcacccatgcagcagagagtctggacaaacttggacagtgagtgcacctgctaccacggcccttccccagtctcaataaaaagccatgacatgtgta

SEQ ID NO: 132650 - DNA, 319 bp, Homo sapiens
  Payload ID: 5913
  Gene Symbol: FAM25C
  Gene Name: family with sequence similarity 25, member C
  Uniprot ID: B3EWG5
  ENST ID: ENST00000617224
  CDS Start-End: 27-296
agttcgccactgtctgctgccacacgatgctgggaggcctggggaagctggctgccgagggcctggcccaccgcaccgagaaggccaccgagggagccattcatgccgtggaggaagtggtgaaggaggtggtgggacatgccaaggagactggagagaaagccattgctgaagccataaagaaagcccaggagtcaggggacaaaaagatgaaggaaatcaccgagacagtgaccaacacagtcacaaatgccatcacccatgcagcagaaagtctggacaaacttggacagtgagtgcacctgctaccacggccctt

SEQ ID NO: 132651 - DNA, 345 bp, Homo sapiens
  Payload ID: 5914
  Gene Symbol: FAM25G
  Gene Name: family with sequence similarity 25, member G
  Uniprot ID: B3EWG6
  ENST ID: ENST00000452267
  CDS Start-End: 20-289
cactgtctgctgccacacgatgctgggaggcctggggaagctggctgccgagggcctggcccaccgcaccgagaaggccaccgagggagccattcatgccgtggaggaagtggtgaaggaggtggtgggacatgccaaggagactggagagaaagccattgctgaagccataaagaaagcccaggagtcaggggacaaaaagatgaaggaaatcaccgagacagtgaccaacacagtcacaaatgccatcacccatgcagcagaaagtctggacaaacttggacagtgagtgcacctgctaccacggcccttccccagtctcaataaaaagccatgacatgtgta

SEQ ID NO: 132652 - DNA, 1353 bp, Homo sapiens
  Payload ID: 5915
  Gene Symbol: FAM26D
  Gene Name: family with sequence similarity 26, member D
  Uniprot ID: Q5JW98
  ENST ID: ENST00000368596
  CDS Start-End: 45-989
gatcagaaagggccacaagctgatttgtgtaacagcttcccaagatgtgcccaactctcaacaatattgtgtcttctctgcagagaaatggaatatttatcaattctttaattgcagccttgactattggtgggcaacaactcttctcctcttctacattcagctgtccttgtcaggttggaaaaaatttctattatggttctgcttttcttgtcattcctgccttgatccttctcgttgctggctttgctctgagaagccaaatgtggacaattaccggtgaatactgctgcagctgtgcccctccatacaggagaatcagccccctagagtgcaagctggcttgccttaggttcttcagcatcactgggagggcagttattgctcctttaacttggctggcggtgaccctgctgacaggcacgtattatgaatgtgcagcaagtgaatttgcatctgtggaccattacccaatgtttgataatgtcagtgccagcaaacgagaagagatcctggctgggtttccatgttgcagatcagctccttctgacgtgatcctagtaagagatgaaatagctcttctgcacagataccagtcacagatgctgggttggattttgatcaccttggcaaccattgctgccttagtctcctgctgtgtggcaaagtgctgctctcccctcacctctctgcaacattgctactggaccagccacctccagaatgagagagaactctttgaacaagcagcagagcagcactctcggctcctcatgatgcatcgcataaagaagctatttggcttcattcccgggagtgaagacgtcaaacacatccgcattccttcttgtcaggactggaaagatatttcagtacccactcttttatgcatgggtgatgacttgcaaggtcactatagcttccttggaaatagggtggatgaggataatgaggaagacagatcaagaggtattgaattaaaaccttgattacagcacctttcatgagtcaggttgcttagcagatacttggcttttatggcttttatgatcaggccatttcaatgtaatctcttcatctttttctttctctctgatatttgtttacgtaagtccatctcaaatattatttctaaaatcaatctattagataattgtgccaatctctcattttgaaattttgccaatggtctggtaatgcctagagtggaatgtgaagtcacatggaaatttgcatcttagttctgttacttagtagctgtgtgaaaattaatatttctgagtgccattttgtcatctgcacattgtagctacctcctagagctattatgagaattaaacatgataatacaaa

SEQ ID NO: 132653 - DNA, 1311 bp, Homo sapiens
  Payload ID: 5915
  Gene Symbol: FAM26D
  Gene Name: family with sequence similarity 26, member D
  Uniprot ID: Q5JW98
  ENST ID: ENST00000368597
  CDS Start-End: 268-654
cccctgcctacactgtgctgagaactgctctctctgaccgggtctcctgtttctacctggtttgttgtgaacctgtgttctccacatttgtcctgactcttcaggtgaataactgagcctttcacttggctttgctgcaacccttcagctctgtgcgtgttggaagcaagaattggataagacttctcaggcgtctgcacaatccctaatggcccccagatctgccaaggagaccttcaggataaacccaaatgtagcagcaaatttatgctgggttggattttgatcaccttggcaaccattgctgccttagtctcctgctgtgtggcaaagtgctgctctcccctcacctctctgcaacattgctactggaccagccacctccagaatgagagagaactctttgaacaagcagcagagcagcactctcggctcctcatgatgcatcgcataaagaagctatttggcttcattcccgggagtgaagacgtcaaacacatccgcattccttcttgtcaggactggaaagatatttcagtacccactcttttatgcatgggtgatgacttgcaaggtcactatagcttccttggaaatagggtggatgaggataatgaggaagacagatcaagaggtattgaattaaaaccttgattacagcacctttcatgagtcaggttgcttagcagatacttggcttttatggcttttatgatcaggccatttcaatgtaatctcttcatctttttctttctctctgatatttgtttacgtaagtccatctcaaatattatttctaaaatcaatctattagataattgtgccaatctctcattttgaaattttgccaatggtctggtaatgcctagagtggaatgtgaagtcacatggaaatttgcatcttagttctgttacttagtagctgtgtgaaaattaatatttctgagtgccattttgtcatctgcacattgtagctacctcctagagctattatgagaattaaacatgataatacaaagtgtttagcacagtgtctttcataaaaatagatgctaatgaatgttactttctctctttctcttttgcattccatgtcttctattcaccattttccctgcctctattttctggttttatcagtttctacctttatataatgtccagaacttttcacagcctccccctctttcttcagacctaaatatctgaccttttgggaagcaggacagaaacctctttctaatccagtaacatgtgagggagaagcccatgcaggaagctcttgagttactgtactataacctggggaca

SEQ ID NO: 132654 - DNA, 1165 bp, Homo sapiens
  Payload ID: 5915
  Gene Symbol: FAM26D
  Gene Name: family with sequence similarity 26, member D
  Uniprot ID: Q5JW98
  ENST ID: ENST00000405399
  CDS Start-End: 286-801
gtgctgagaactgctctctctgaccgggtctcctgtttctacctggtttgttgtgaacctgtgttctccacatttgtcctgactcttcaggtgaataactgagcctttcacttggctttgctgcaacccttcagctctgtgcgtgttggaagcaagaattggataagacttctcaggcgtctgcacaatccctaatggcccccagatctgccaaggagaccttcaggataaacccaaatgtagcagcaaatttcaagtgaatttgcatctgtggaccattacccaatgtttgataatgtcagtgccagcaaacgagaagagatcctggctgggtttccatgttgcagatcagctccttctgacgtgatcctagtaagagatgaaatagctcttctgcacagataccagtcacagatgctgggttggattttgatcaccttggcaaccattgctgccttagtctcctgctgtgtggcaaagtgctgctctcccctcacctctctgcaacattgctactggaccagccacctccagaatgagagagaactctttgaacaagcagcagagcagcactctcggctcctcatgatgcatcgcataaagaagctatttggcttcattcccgggagtgaagacgtcaaacacatccgcattccttcttgtcaggactggaaagatatttcagtacccactcttttatgcatgggtgatgacttgcaaggtcactatagcttccttggaaatagggtggatgaggataatgaggaagacagatcaagaggtattgaattaaaaccttgattacagcacctttcatgagtcaggttgcttagcagatacttggcttttatggcttttatgatcaggccatttcaatgtaatctcttcatctttttctttctctctgatatttgtttacgtaagtccatctcaaatattatttctaaaatcaatctattagataattgtgccaatctctcattttgaaattttgccaatggtctggtaatgcctagagtggaatgtgaagtcacatggaaatttgcatcttagttctgttacttagtagctgtgtgaaaattaatatttctgagtgccattttgtcatctgcacattgtagctacctcctagagctattatgagaattaaacatgataatacaaa

SEQ ID NO: 132655 - DNA, 568 bp, Homo sapiens
  Payload ID: 5915
  Gene Symbol: FAM26D
  Gene Name: family with sequence similarity 26, member D
  ENST ID: ENST00000452373
  CDS Start-End: 199-568
gtgctgagaactgctctctctgaccgggtctcctgtttctacctggtttgttgtgaacctgtgttctccacatttgtcctgactcttcagttggaagcaagaattggataagacttctcaggcgtctgcacaatccctaatggcccccagatctgccaaggagaccttcaggataaacccaaatgtagcagcaaatttatgctgggttggattttgatcaccttggcaaccattgctgccttagtctcctgctgtgtggcaaagtgctgctctcccctcacctctctgcaacattgctactggaccagccacctccagaatgagagagaactctttgaacaagcagcagagcagcactctcggctcctcatgatgcatcgcataaagaagctatttggcttcattcccgggagtgaagacgtcaaacacatccgcattccttcttgtcaggactggaaagatatttcagtacccactcttttatgcatgggtgatgacttgcaaggtcactatagcttccttggaaatagggtggatgaggataatgaggaagacagatcaagaggta

SEQ ID NO: 132656 - DNA, 1117 bp, Homo sapiens
  Payload ID: 5915
  Gene Symbol: FAM26D
  Gene Name: family with sequence similarity 26, member D
  Uniprot ID: Q5JW98
  ENST ID: ENST00000628083
  CDS Start-End: 228-740
tgttttacccttgggtcctcccctgcctacactgtgctgagaactgctctctctgaccgggtctcctgtttctacctggtttgttgtgaacctgtgttctccacatttgtcctgactcttcaggtgaataactgagcctttcacttggctttgctgcaacccttcagctctgtgcgtgttggaagcaagaattggataagacttctcaggcgtctgcacaatccctaatggcccccagatctgccaaggagaccttcaggataaacccaaatgtagcagcaaatttatcagctccttctgacgtgatcctagtaagagatgaaatagctcttctgcacagataccagtcacagatgctgggttggattttgatcaccttggcaaccattgctgccttagtctcctgctgtgtggcaaagtgctgctctcccctcacctctctgcaacattgctactggaccagccacctccagaatgagagagaactctttgaacaagcagcagagcagcactctcggctcctcatgatgcatcgcataaagaagctatttggcttcattcccgggagtgaagacgtcaaacacatccgcattccttcttgtcaggactggaaagatatttcagtacccactcttttatgcatgggtgatgacttgcaaggtcactatagcttccttggaaatagggtggatgaggataatgaggaagacagatcaagaggtattgaattaaaaccttgattacagcacctttcatgagtcaggttgcttagcagatacttggcttttatggcttttatgatcaggccatttcaatgtaatctcttcatctttttctttctctctgatatttgtttacgtaagtccatctcaaatattatttctaaaatcaatctattagataattgtgccaatctctcattttgaaattttgccaatggtctggtaatgcctagagtggaatgtgaagtcacatggaaatttgcatcttagttctgttacttagtagctgtgtgaaaattaatatttctgagtgccattttgtcatctgcacattgtagctacctcctagagctattatgagaattaaacatgataatacaaagtgtttagcacag

SEQ ID NO: 132657 - DNA, 9784 bp, Homo sapiens
  Payload ID: 5916
  Gene Symbol: FAM26E
  Gene Name: family with sequence similarity 26, member E
  Uniprot ID: Q8N5C1
  ENST ID: ENST00000368599
  CDS Start-End: 52-981
ctgctctgccaataacaaaggcacagcattttccctctgtgcatctccaacatggatgcttttcagggcattttaaaattcttccttaatcagaaaactgttattggctacagcttcatggctctgctgaccgtgggaagtgagcgtctcttttctgttgtggcttttaagtgcccctgcagcactgagaatatgacctatgggctggttttcctctttgctcctgcctgggtgttactgatcctgggattctttctgaacaataggtcgtggagactcttcacaggctgctgtgtgaatcccaggaaaatctttcccagaggccacagctgccgtttcttctacgtcctcggccagatcactctgagctcattggtggctccagtgatgtggctttctgtggctctgctcaatggaactttctatgaatgtgccatgagcgggacgagaagttcaggactcctggaactgatttgcaagggtaagcccaaagagtgctgggaagaacttcacaaagtatcttgtggcaaaactagcatgctacctaccgtcaatgaagaactgaaactctcccttcaggcccagtctcagattctaggatggtgcctgatttgttcagcgtctttcttctctctgctcaccacatgttatgctcgctgccgatctaaagttagctaccttcagctgagtttttggaagacatatgcacaaaaggagaaggagcagttggaaaatacatttctggactatgccaacaagctgagcgagaggaacctgaaatgtttttttgaaaacaagaggccagatccttttcccatgcctacgtttgctgcctgggaggctgcttcagagctgcattctttccaccaaagccagcaacactatagcaccctccacagagtggtggacaatggtctgcaacttagccctgaggatgatgagacgacaatggtccttgtgggtactgcccacaatatgtagctcatccaccatcaatgactcatggtgttgagtggcatgctcattctgtgatcctcctaacgtatcaccagcaacctgtgtgtctctgtattttcttacatttggagtatgtttacaagacaataacacaaaggaaactgctttgaagctctcaagtggaacatcaggatgtgctcaaattgatgctgaggggtgacaaaggtgctcttgcattggtggagaggggctcagtaggcctaaatgttgctccaagatctaagattttatcattcaacagacagactcatgtgagagggctcatcagtctctgtaaatattggttgcagaatttaggggcagaagcaatggcttgtgagtgagcaagttactcttaacataggttgccctacacagtggctcctgcagtgtgatcagcaggagtctctgtcctacaaatctacacttttaaggatgtatgaaattgtggaattcattccctcaggatctgaagatctcagttctcaaaaatcacaagttgcaagaatatgatacctaaaattgaaagtttttcacatgttttcactgtatactgaaaatactcccctggaagcagggctgcatcataatttttgtgggctttatgtacttttgcctttgcgaaccatttcctacattcaaaatagtagtaacaaatatatatatatatatatatatatatatatatatatatatatatatatacacacacacagaaatatatatttataactgcattgataaaaggtgaatatattagcattttcttcaacctaaaagtttatgtattttcttctgattttaaaagaaattaaaaacattttagtgggcccttacaagtattatggtccttaggcacagtgcttactaggccgtgggtatgtcttagtgcgtttgggctactataacaaaatatcatagataggtggcttatacaaaatagaaatttatttctcacagttctggaggctgggaagtccgaggtcaggctgccagcatgctcaggttctggtgagagcaattttccaggttgcaaactgcttgctgacttctcagtgtccttccatggtggaaagtgcaaataagctcccttgagcatttttataaggcactaatcccattcctggaggctccaccttcatgacccaattacttctcaaggctctgcttcttagtactatcagcttgggggttaagatttcaacatatgaaattgggggagacacaaacattcagactatagtagggtaaattgaccttggctaaaggtctggggacactgtccaaagcagtactggcataaaactgcattgcagtcttacatttatcagaaataatgcaaatcttgcattctacaatgtactatatccatgttagtatgtacatatatatgtgtatgtatatatgtacataaattctccttaaatctctgagaagaattgtgctttaaaaaagaactatgttttgtgctgtggctcataccttacagtggtagtctatgtctcttagtttgagaaagctgaatattaacttcttattaacatgaaacatgatggcaaactgaatcctacaagtataggacccagaacatatctatgttattgtcatttacaagaagaaatatgtatttggtctttcttcctattcctggtgcagagctcctaaaacctttgggacctcccaagtgatgtgtctggtagtacgcgaatgagatgactgatagttaggggcttctgaatggcctcagaatagggtctggttgccacgggaaccaaccatgtgtttagagggttggaactttcagccccactcccagaccttggggaaggaagaggggctgaaggttgagtcgatcacaaatggataatgatttaatcaatcatgcctaagaataaagcttcccataaaaatctaaaggacaaggttcagagagcttctgcattgctcaatacatgaggagtggtgagcccaaaggggccgtggaagctccgtgccccttcccccaaacctgttcctgtgcctccatctggctgtttctgagttatattattttataatagactgatgatagtaaataaagccctttcctgagttctgtgagctactctagcaaatggtgaaatctgagaaggaaatcatgggaacctctgctttgtagccacgtcagatagaagatgtgagtaactttggaacctactgcttgtgactggtgtctgaagttgggggagatcttatgggactgagctcttaacctgctggggatctgcacttaatgccgattaatgccagaattgaattgtatgatatccagttggtattggagaattggccagtgtgggagaaaacccacacagttggtggcaaggagtgttcagtgttgagtgtgaatgtcaataaaaaaaggtttgttttttctacgtacaatatctttgggaacttggaggtgcagggtcagacgtctgtgtgtgtatgtggcagggacagaacagggattagggatgtgagggggtagagttttcagaataaagggagagaaaattcagcaaagagttctccttcttaatctttcttgacttaaagtttgtctgcccttaagtgtcttctgagctggaaaaagacatataggaactggccgatgccgatgcctcttttgcagtgtgtgagaggctgaaacagaagttctacagaagtaggttagctgtaaggagctgaggattgaggagtcatatctgggggatattcctgccaccctcaagtccagggactttctgcactcaaaaaacttacgctcatgacaatgactgcctcattcaagaaaacccaagctgactggcaagaagccagcagcctgggtacttgttgctgcagcttagtaagtagcagaagagctcatcctcctcctctggaagaagccacttaacaggttctcatcctgactcctaaattccttaacagtcctttactcaggaataaaacaagtccaagaaaacttatctgtcccacaaatagtcctggaggcagtggagtaagatagggagagcaaattggtgtctgctcttgagtatcttgagggaatgggtatctagaggcagcaggatgaactggctttgatagcagagactttaaaatgtgtggaccattagttgtctttggatgtgctccctagaggctgcgcctgacacagggagctgtgtatacatgatttattaaaaggaaatcctcttaggagaaacatattagcaggataaacacaagaaagaatgcagttacaagtggagtctcaatcaatcccagaggaaattctgggacttcagcctcagcttgacctatgggggggctctggaatgtcagatttctcctgatcccaagtgtgctctggggcttccattgcagccaagagagagcattccccagaaaactccaggtgaggagtctccagtggcccaagggtgatcctccagaggaggttacactgccgaactgggacattggcaccctggatttgaatatctagagagggcacccaatggtcatactaatgtttgccataacagtctcttctaggtctagacttgaagcatatggaagggtccttgggctagagccaacccaagcccaggctgactcccttttaatacttctaattttccctgaagatctggtcttctccctaccaccactaccctattacataagagaaaaggattggagaatgctcttgaaaagaatgtgatgctttcccatacaaggaatatactcaaggaaaaatttcatggcacaaaatgctgattctgtccaatttatcccatgaataaattgtgtacacatatatatatgattcttttgtttttcctgtgcagttccttccttttttcaggctcaaccacttaattcagctttaggatacattcagcttattcatatcaaatataaagtgggagaaaaaaaggtatgtaacaaagattacaaaaataaggcatggcagacaaatcactacataattctatgcattataccttaaagtaatgtattgtaaaatatatgtgtccaaagcaacttttaaaatttttgtatggttttctacttgagacctttaaagcatcactaaaaatgtatacatttaatgagaaaacgatgacattattgattcaaattagttgtttcaaagcctgatgatccactgatttactctaaaaactggttaaagcaatccagaagtcactgggtagcagaaaactgctaccgcttctcacatgatatatttcaagtacttcaactattaactatattattctatttagactttggtggttccgaattctctaaggtaattatcttaattttctaatatttccctctcatttttctctcttattttaaatatcccctgttgtacaagccagaggatattaatttcctttgtgggtagtgcttggacttctctgattttagatcccaaaatcattaagaaaaagctaagaggttggcatgagaggttggatggaaagcatctatctgtgtttgtcagtagctctcgatgttggctgcaaattggaatcacctgggggcctttgacaatcacaatgtctggacccatttcctgagaacctgatgtaacttttctgggttagggcctgaacattgagatttcttttaaaagctttctaagtgattataatgtgcagtcatggtgaagaactactgattttatatggggagtcagtgaaggtggtgaggggctgtgaggttgaaatattggaaatgttatctggatttcaaacagtagagtatgataaaaatttaaaaactggctctccaggaaaaaagagacatcctaatatgatgtatttgccaatataccatgggttttcttgggctgggatgaactttcagaagttttacagtgagcatttttttttttatgaatttaaattggttctagctaagcaattttggagtatctttgatgtacctgggtctctcattttaataaacataacagtggtatgttagtcagggttctccagagaaacagaaccaacagtacaacagtatatatacatacatacatatatatgtgtgtgcatgtgtgtgtgtgtatgcgtgtatatatatatatgctacatatatgaaaggggatttcttgtgggaatatatattatatataacaaaacatgacaaatatataacaaaatatatgtgctatatatattgtgtgtgtatatatatatgaaagaggatttattgtggaaattggctcatgtgattatgaaggctgagaaggcccatgacgtgccacctgtaagctggagaatcagggaaatgtgtagggtggctcaagtcccagtctgagggcctgagaaccaggggagttgatggtacaaatcccagagccaaaggcaaaggaacctgaagtttttatttccaagggccaatagataaggagaatattggtgacccaactccaggagacagagaaaagattggtgacccaactcgagtggagagagagggagagagagagagacagagagcaaatttgcccatcctctccctttttgtcctacccaggccctcaatggattgtatggtgcctgcccaggttaggtgagggcagattttccttactcagtccactgattcaaatgccaatcttttttggaaacacccctacatacatacccagaaataatgctttaataactatctggctaccccttaatccaatcaagttgacatctaaaattaaccagcacatgtgataaattaaatatggttcaatggctccttctggcagatgtagtcgtgttatcctcactttgaatctgaccttatgaaccaataaaatatggcagacatgaggtagattgttaagcagtatcacagtttatgccttggtctcttacaatgttgcaatgctcaacagtctggtaaaagccactatgtaagaactgcaattactcagggactaccaagctctgaagaggcccaagctagccagtgggaggagagagagagagataaaaagagagagagagagagatcccaatggctccaattgtctcagatattctagcttaggggtcaggcatgtgaatgaaggagccattttaaacattcaggccccagtgtacacgacatggagaagaaccaggaagtccaaccaacagtgagaataaaaggccccagatctatggccctaatcaaatcattgcagccatctccaaacatttgacccactccagtggaggctgcaggctttgtagagaagtccttgccatgtcctatccaactccatgaccccaaaaatcatgagcttaaataaatgtttgtggctttaagccactgaattttggggcaatatgaagcgacagaacctgaacactaacatgaaaatcagaatttataaaaagacaaaaattacaggcaaattgtatttatacatttatacattctccctatgcatagagagcattttcttcaatcatgttttctttttctttaggttccagttagcagtatagcatctacagcatgatttgatagatgctgataagtaggtctctaaaatctctccaccaaagctggagattcactttcaattatttttggttaatttttgtttgaaaggaatacaaacatattattgggaggagtaacacattaaactattatttgtcattaatatctacgaaaaaatagcaagtgagggtttcagactaggctggccttcagtaagctggaaagagattgttcttctagtcgtctctcaaaatgttatcttcagactgtcaacatcagtatcacgatgaagcttgttagaaatgcagaatcagacagtatctaaaacctgttgagtcaagcctgcagtttaacgtgatcctagctgattccagttcaagctaaatttgataacactaaggcagtggttctcaaactttagtccatataaaaatcatctggagggcttattaaaatgtggattgctgaactccacccccagggtgtctgattcagtaggtctggggtgaggcaagataatctgcatttctaacaggttctcaggtgatactgatgctgctggtctagggactacatcttgaaaataactgctctacagcacagagcaggctattctggggaaggcaggctgtaagaaactcagaatcctggcctgcactccagatctactgaatcggtcatcagcccgtccaagattttggggtgcctttccattcattcaaggatacctttctattcattcaaggatatattttgtcctttaggaatattttaaagtttacttcacataagttttacatgtttcttgtaaactctatttgtaggtgttttctttgttcctgttgtaaatggtttcttttttccactatatctttctaagtgattgttgtctgagtacgtgaaaagctattgtcttatgcttattaattttatctctctactaattcttttattgtttgtagggcttttcagaatttgaaagtaaacattttgcaacctttgatgacaaaatggatctagacaataaataatgaattctaaactattaggtgaaagcagaatggggtcagacctatgcaatttgaagccactcatctatattagcatcactaaaaatcaaagcagatgctacgtgccttatgatgcaaggcaagaataagtacatagtatcacatgtgaaatattgtttcctaagaagctaaacctaatcaagtatttagacattactgctagtttataggaaacataagcaacaaaaaacaaggcaattagcaccacaaaaaaacaaccaggtacatctagatctaacagaacattccattttacagatgactcagtctccccacagattaacagtattaagaaaggagaataaaggagatataagtgacttaataaccagatatgctatatagaccttatttgtatcctgtttccaacaaccaactgtaacaagatatctttgagatatttaggaaaatatgaatgaatattagatgatttttagagaattattaattttgctatgtgtggtaatggtgtgccgatttatgttttttaaaaagttcttcagttagagatgtatatttaaatatttatgtgtgaactgccatgatgtctagaagtttctttaaaatactctagaaaaaagagtttagggagaaagctgaaagatgaaataagattggcaaaatatggaaactattgaagctggatggtaggtacacggaattcattacattattctctttacatttgtatatgtttgaaaaatttcataaggtacacaacaaaataaatgacatggtcacctcagttattttgctgaagttttgtcaatcaccccctgcttagctggagtttaccttctagtatcattctcagcaaaggctcacaggaatgctattctctgaattcttacatattcagcctgttggcctgttctcgaattgaaggacagcttgtctggttcatactttctctacatgagtgtattgtaagcattacttcattgtcttttgtcattgaatattgctgaggtggccacagcctgatttctgatgccatctctatttctttctttattactaacaagatgttttatcctatattctcattggtttctttatctttcatgtccaaaaatgttaaataggccttcaggtaggtctttttggaacgatttttcctgctacaagtttactctttcattgtggagaatcattttcttatatttcaataaaaaagttggaaaattttcaactta

SEQ ID NO: 132658 - DNA, 540 bp, Homo sapiens
  Payload ID: 5917
  Gene Symbol: FAM26F
  Gene Name: family with sequence similarity 26, member F
  ENST ID: ENST00000368604
  CDS Start-End: 1-477
cgctgggggcgtttgggaggagccgagaggccgagctttctcagggccgctggggtgttgggctggatcttgatagcagttgttatcatcattcttctgatttttacatctgtcacccgatgcctatctccagttagttttctgcagctgaaattctggaaaatctatttggaacaggagcagcagatccttaaaagtaaagccacagagcatgcaactgaattggcaaaagagaatattaaatgtttctttgagggctcgcatccaaaagaatataacactccaagcatgaaagagtggcagcaaatttcatcactgtatactttcaatccgaagggccagtactacagcatgttgcacaaatatgtcaacagaaaagagaagactcacagtatcaggtctactgaaggagatacggtgattcctgttcttggctttgtagattcatctggtataaacagcactcctgagttatgaccttttgaatgagtagaaaaaaaaattgttttgaattattgctttattaaaaaataaacattg

SEQ ID NO: 132659 - DNA, 1117 bp, Homo sapiens
  Payload ID: 5917
  Gene Symbol: FAM26F
  Gene Name: family with sequence similarity 26, member F
  Uniprot ID: Q5R3K3
  ENST ID: ENST00000368605
  CDS Start-End: 96-1043
agaggaaccagaaatttgtccttgaataatgtttcccgacaacgaagaggcagaaggatctgggcctgtgcgcgacgccccgggggacgaggctcatggagaagtttcgggcggtgctggacctgcacgtcaagcaccacagcgccttgggctacggcctggtgaccctgctgacggcgggcggggagcgcatcttctccgccgtggcattccagtgcccgtgcagcgccgcctggaacctgccctacggcctggtcttcttgctggtgccggcgctcgcgctcttcctcctgggctacgtgctgagcgcacgcacgtggcgcctgctcaccggatgctgctccagcgcccgcgcgagttgcggatcggcgctgcgcggctccctggtgtgcacgcaaatcagcgcggccgccgcgctcgcgcccctcacctgggtggccgtggcgctgctcgggggcgccttttacgagtgcgcggccaccgggagcgcggccttcgcgcagcgcctgtgcctcggccgcaaccgcagctgcgccgcggagctgccgctggtgccgtgcaaccaggccaaggcgtcggacgtgcaggacctcctgaaggatctgaaggctcagtcgcaggtgttgggctggatcttgatagcagttgttatcatcattcttctgatttttacatctgtcacccgatgcctatctccagttagttttctgcagctgaaattctggaaaatctatttggaacaggagcagcagatccttaaaagtaaagccacagagcatgcaactgaattggcaaaagagaatattaaatgtttctttgagggctcgcatccaaaagaatataacactccaagcatgaaagagtggcagcaaatttcatcactgtatactttcaatccgaagggccagtactacagcatgttgcacaaatatgtcaacagaaaagagaagactcacagtatcaggtctactgaaggagatacggtgattcctgttcttggctttgtagattcatctggtataaacagcactcctgagttatgaccttttgaatgagtagaaaaaaaaattgttttgaattattgctttattaaaaaataaacattggtattttttga

SEQ ID NO: 132660 - DNA, 546 bp, Homo sapiens
  Payload ID: 5917
  Gene Symbol: FAM26F
  Gene Name: family with sequence similarity 26, member F
  Uniprot ID: Q5R3K3
  ENST ID: ENST00000368606
  CDS Start-End: 52-483
actttgctgatttagcttatggaagaggaaccagaaatttgtccttgaataatgtttcccgtgttgggctggatcttgatagcagttgttatcatcattcttctgatttttacatctgtcacccgatgcctatctccagttagttttctgcagctgaaattctggaaaatctatttggaacaggagcagcagatccttaaaagtaaagccacagagcatgcaactgaattggcaaaagagaatattaaatgtttctttgagggctcgcatccaaaagaatataacactccaagcatgaaagagtggcagcaaatttcatcactgtatactttcaatccgaagggccagtactacagcatgttgcacaaatatgtcaacagaaaagagaagactcacagtatcaggtctactgaaggagatacggtgattcctgttcttggctttgtagattcatctggtataaacagcactcctgagttatgaccttttgaatgagtagaaaaaaaaattgttttgaattattgctttattaaaaaataaacattg

SEQ ID NO: 132661 - DNA, 1815 bp, Homo sapiens
  Payload ID: 5918
  Gene Symbol: FAM3A
  Gene Name: family with sequence similarity 3, member A
  ENST ID: ENST00000322269
  CDS Start-End: 430-1164
cttagccgccattgccgggcctgcctggccaccctgcgcagcggccttgcgtcctctcccggggcggagcgggtcggcgggcctgacagggaacctccctgaccgagcccacgtctccccacggccagagaaatctccggcccggcccgcatcgccagcccccaggcccggaggaacggcccgagcccaggagaaccacatcttcgtcccagccccggaggctcctgtgggcaagatcgtgagccaacgggttcctgaggcccctcctggccaggcagggtttccccgcgcgtttccgaggagccctgcctggccgggcggctggacaaacagtgcacttgccggcggtcccaacccagcaggagaagtggacatgaggttggcaggccctctccgcattgtggtcctagtcgtcagtgtgggtgtcacatggatcgtggtcagcatcctcctgggtgggcctggcagtggctttcctcgcatccagcaactcttcaccagctggagtgcagtggtgcaatctcggttcactgcaacctctacctcctgggttcaagcgattctagtgccccagcctcccgagtagctgagactacaggtccagagagctcggtgactgcagcgccacgggccaggaagtacaagtgtggcctgccccagccgtgtcctgaggagcacctggccttccgcgtggtcagcggggccgccaacgtcattgggcccaagatctgcctcgaggacaagatgctgatgagcagcgtcaaggacaacgtgggccgcgggctgaacatcgccctggtgaacggggtcagcggcgagctcatcgaggcccgggcctttgacatgtgggccggagatgtcaacgacctgttgaagtttattcggccactgcacgaaggcaccctggtgttcgtggcatcctacgacgacccagccaccaagatgaatgaagagaccagaaagctcttcagtgagctgggcagcaggaacgccaaggagctggccttccgggacagctgggtgtttgtcggggccaagggtgtgcagaacaagagcccctttgagcagcacgtgaagaacagtaagcacagcaacaagtacgaaggctggcccgaggcgctggagatggaaggctgtatcccgcggagaagcacggccagctagcacggccagtgccaggaccgggccgagggaggccagaccaagggaggcacgcgcgctgccgggcggacagaggctgaggctcacaccccacacccgggcaggagcgctccctggccccaacacatcggggctccgaggcagtgaccagaacgtggtctcaaggtggtgggggctatgggggctgcagggggtagccctgccgcactttgtcacgggagcccagggtacccgcctccttttcgtaacactgttccccccggtcagcccatctagccctgtcctccattcctcacgccatctccatccccatcttgagtcctggaacggccctgggtgcctgcccctcactgtgcatctctgggagcagcccggcaggttggggcgtcttccagaacctctcccttctggagccactctgcactgcgggctaaacatgtttccagtgtgattccttccagtgagccaaacccggtggctgcttcatgagcctgactgcctctcgcctgctctcagcaggaagggacccctggagcaggctggcccggggtggtgaagtagctggagcccgatcacagtcccgcggtttgtcagggggcccaccttctagatgaccccttaataaagtgatggccccacagaagaaatgccttc

SEQ ID NO: 132662 - DNA, 1712 bp, Homo sapiens
  Payload ID: 5918
  Gene Symbol: FAM3A
  Gene Name: family with sequence similarity 3, member A
  Uniprot ID: P98173
  ENST ID: ENST00000359889
  CDS Start-End: 368-1060
cgccattgccgggcctgcctggccaccctgcgcagcggccttgcgtcctctcccggggcggagcgggtcggcgggcctgacagggaacctccctgaccgagcccacgtctccccacggccagagaaatctccggcccggcccgcatcgccagcccccaggcccggaggaacggcccgagcccaggagaaccacatcttcgtcccagccccggaggctcctgtgggcaagatcgtgagccaacgggttcctgaggcccctcctggccaggcagggtttccccgcgcgtttccgaggagccctgcctggccgggcggctggacaaacagtgcacttgccggcggtcccaacccagcaggagaagtggacatgaggttggcaggccctctccgcattgtggtcctagtcgtcagtgtgggtgtcacatggatcgtggtcagcatcctcctgggtgggcctggcagtggctttcctcgcatccagcaactcttcaccagtccagagagctcggtgactgcagcgccacgggccaggaagtacaagtgtggcctgccccagccgtgtcctgaggagcacctggccttccgcgtggtcagcggggccgccaacgtcattgggcccaagatctgcctcgaggacaagatgctgatgagcagcgtcaaggacaacgtgggccgcgggctgaacatcgccctggtgaacggggtcagcggcgagctcatcgaggcccgggcctttgacatgtgggccggagatgtcaacgacctgttgaagtttattcggccactgcacgaaggcaccctggtgttcgtggcatcctacgacgacccagccaccaagatgaatgaagagaccagaaagctcttcagtgagctgggcagcaggaacgccaaggagctggccttccgggacagctgggtgtttgtcggggccaagggtgtgcagaacaagagcccctttgagcagcacgtgaagaacagtaagcacagcaacaagtacgaaggctggcccgaggcgctggagatggaaggctgtatcccgcggagaagcacggccagctagcacggccagtgccaggaccgggccgagggaggccagaccaagggaggcacgcgcgctgccgggcggacagaggctgaggctcacaccccacacccgggcaggagcgctccctggccccaacacatcggggctccgaggcagtgaccagaacgtggtctcaaggtggtgggggctatgggggctgcagggggtagccctgccgcactttgtcacgggagcccagggtacccgcctccttttcgtaacactgttccccccggtcagcccatctagccctgtcctccattcctcacgccatctccatccccatcttgagtcctggaacggccctgggtgcctgcccctcactgtgcatctctgggagcagcccggcaggttggggcgtcttccagaacctctcccttctggagccactctgcactgcgggctaaacatgtttccagtgtgattccttccagtgagccaaacccggtggctgcttcatgagcctgactgcctctcgcctgctctcagcaggaagggacccctggagcaggctggcccggggtggtgaagtagctggagcccgatcacagtcccgcggtttgtcagggggcccaccttctagatgaccccttaataaagtgatggccccacagaagaaatgccttca

SEQ ID NO: 132663 - DNA, 1359 bp, Homo sapiens
  Payload ID: 5918
  Gene Symbol: FAM3A
  Gene Name: family with sequence similarity 3, member A
  ENST ID: ENST00000369641
  CDS Start-End: 370-1083
gccgccattgccgggcctgcctggccaccctgcgcagcggccttgcgtcctctcccggggcggagcgggtcggcgggcctgacagggaacctccctgaccgagcccacgtctccccacggccagagaaatctccggcccggcccgcatcgccagcccccaggcccggaggaacggcccgagcccaggagaaccacatcttcgtcccagccccggaggctcctgtgggcaagatcgtgagccaacgggttcctgaggcccctcctggccaggcagggtttccccgcgcgtttccgaggagccctgcctggccgggcggctggacaaacagtgcacttgccggcggtcccaacccagcaggagaagtggacatgaggttggcaggccctctccgcattgtggtcctagtcgtcagtgtgggtgtcacatggatcgtggtcagcatcctcctgggtgggcctggcagtggctttcctcgcatccagcaactcttcaccagtccagagagctcggtgactgcagcgccacgggccaggaagtacaagtgtggcctgccccagccgtgtcctgaggagcacctggccttccgcgtggtcagcggggccgccaacgtcattgggcccaagatctgcctcgaggacaagatgctgatgagcagcgtcaaggacaacgtgggccgcgggctgaacatcgccctggtgaacgggcccctccctcctgacacaggggtcagcggcgagctcatcgaggcccgggcctttgacatgtgggccggagatgtcaacgacctgttgaagtttattcggccactgcacgaaggcaccctggtgttcgtggcatcctacgacgacccagccaccaagatgaatgaagagaccagaaagctcttcagtgagctgggcagcaggaacgccaaggagctggccttccgggacagctgggtgtttgtcggggccaagggtgtgcagaacaagagcccctttgagcagcacgtgaagaacagtaagcacagcaacaagtacgaaggctggcccgaggcgctggagatggaaggctgtatcccgcggagaagcacggccagctagcacggccagtgccaggaccgggccgagggaggccagaccaagggaggcacgcgcgctgccgggcggacagaggctgaggctcacaccccacacccgggcaggagcgctccctggccccaacacatcggggctccgaggcagtgaccagaacgtggtctcaaggtggtgggggctatgggggctgcagggggtagccctgccgcactttgtcacgggagcccagggtacccgcctccttttcgtaacactgttccccccggtcagcccatctagccc

SEQ ID NO: 132664 - DNA, 1521 bp, Homo sapiens
  Payload ID: 5918
  Gene Symbol: FAM3A
  Gene Name: family with sequence similarity 3, member A
  Uniprot ID: P98173
  ENST ID: ENST00000369643
  CDS Start-End: 189-881
agagaaatctccggcccggcccgcatcgccagcccccaggcccggaggaacggcccgagcccaggagaaccacatcttcgtcccagccccggaggctcctgtgggcaagatcgtgagccaacgggttcctgaggcccctcctggccagtgcacttgccggcggtcccaacccagcaggagaagtggacatgaggttggcaggccctctccgcattgtggtcctagtcgtcagtgtgggtgtcacatggatcgtggtcagcatcctcctgggtgggcctggcagtggctttcctcgcatccagcaactcttcaccagtccagagagctcggtgactgcagcgccacgggccaggaagtacaagtgtggcctgccccagccgtgtcctgaggagcacctggccttccgcgtggtcagcggggccgccaacgtcattgggcccaagatctgcctcgaggacaagatgctgatgagcagcgtcaaggacaacgtgggccgcgggctgaacatcgccctggtgaacggggtcagcggcgagctcatcgaggcccgggcctttgacatgtgggccggagatgtcaacgacctgttgaagtttattcggccactgcacgaaggcaccctggtgttcgtggcatcctacgacgacccagccaccaagatgaatgaagagaccagaaagctcttcagtgagctgggcagcaggaacgccaaggagctggccttccgggacagctgggtgtttgtcggggccaagggtgtgcagaacaagagcccctttgagcagcacgtgaagaacagtaagcacagcaacaagtacgaaggctggcccgaggcgctggagatggaaggctgtatcccgcggagaagcacggccagctagcacggccagtgccaggaccgggccgagggaggccagaccaagggaggcacgcgcgctgccgggcggacagaggctgaggctcacaccccacacccgggcaggagcgctccctggccccaacacatcggggctccgaggcagtgaccagaacgtggtctcaaggtggtgggggctatgggggctgcagggggtagccctgccgcactttgtcacgggagcccagggtacccgcctccttttcgtaacactgttccccccggtcagcccatctagccctgtcctccattcctcacgccatctccatccccatcttgagtcctggaacggccctgggtgcctgcccctcactgtgcatctctgggagcagcccggcaggttggggcgtcttccagaacctctcccttctggagccactctgcactgcgggctaaacatgtttccagtgtgattccttccagtgagccaaacccggtggctgcttcatgagcctgactgcctctcgcctgctctcagcaggaagggacccctggagcaggctggcccggggtggtgaagtagctggagcccgatcacagtcccgcggtttgtcagggggcccaccttctagatgaccccttaataaagtgatggccccacagaa

SEQ ID NO: 132665 - DNA, 1041 bp, Homo sapiens
  Payload ID: 5918
  Gene Symbol: FAM3A
  Gene Name: family with sequence similarity 3, member A
  Uniprot ID: P98173
  ENST ID: ENST00000393572
  CDS Start-End: 292-870
ctgacagggaacctccctgaccgagcccacgtctccccacggccagagaaatctccggcccggcccgcatcgccagcccccaggcccggaggaacggcccgagcccaggagaaccacatcttcgtcccagccccggaggctcctgtgggcaagatcgtgagccaacgggttcctgaggcccctcctggccaggcagggtttccccgcgcgtttccgaggagccctgcctggccgggcggctggacaaacagtgcacttgccggcggtcccaacccagcaggagaagtggacatgaggttggcaggtccagagagctcggtgactgcagcgccacgggccaggaagtacaagtgtggcctgccccagccgtgtcctgaggagcacctggccttccgcgtggtcagcggggccgccaacgtcattgggcccaagatctgcctcgaggacaagatgctgatgagcagcgtcaaggacaacgtgggccgcgggctgaacatcgccctggtgaacggggtcagcggcgagctcatcgaggcccgggcctttgacatgtgggccggagatgtcaacgacctgttgaagtttattcggccactgcacgaaggcaccctggtgttcgtggcatcctacgacgacccagccaccaagatgaatgaagagaccagaaagctcttcagtgagctgggcagcaggaacgccaaggagctggccttccgggacagctgggtgtttgtcggggccaagggtgtgcagaacaagagcccctttgagcagcacgtgaagaacagtaagcacagcaacaagtacgaaggctggcccgaggcgctggagatggaaggctgtatcccgcggagaagcacggccagctagcacggccagtgccaggaccgggccgagggaggccagaccaagggaggcacgcgcgctgccgggcggacagaggctgaggctcacaccccacacccgggcaggagcgctccctggccccaacacatcggggctccgaggcagtgaccagaacgtggtctcaaggtggtgggg

SEQ ID NO: 132666 - DNA, 706 bp, Homo sapiens
  Payload ID: 5918
  Gene Symbol: FAM3A
  Gene Name: family with sequence similarity 3, member A
  ENST ID: ENST00000433619
  CDS Start-End: 458-670
gccgggcctgcctggccaccctgcgcagcggccttgcgtcctctcccggggcggagcgggtcggcgggcctgacagggaacctccctgaccgagcccacgtctccccacggccagagaaatctccggcccggcccgcatcgccagcccccaggcccggaggaacggcccgagcccaggagaaccacatcttcgtcccagccccggaggctcctgtgggcaagatcgtgagccaacgggttcctgaggcccctcctggccaggcagggtttccccgcgcgtttccgaggagccctgcctggccgggcggctggacaaacaggtcgtagcaccgatcgcgcccgcccccagcaggggtcccgcacaggcttgcccctgacccccacccaaacctgtccttccgctttgcccccaaacagtgcacttgccggcggtcccaacccagcaggagaagtggacatgaggttggcaggccctctccgcattgtggtcctagtcgtcagtgtgggtgtcacatggatcgtggtcagcatcctcctgggtgggcctggcagtggctttcctcgcatccagcaactcttcaccatgtctcactttgtctcccaggctggagtgcagtggtgcaatctcggttcactgcaacctctacctcctgggttcaagcgattctagtgccccagcctcccgagtagctgagactacaggtcc

SEQ ID NO: 132667 - DNA, 1763 bp, Homo sapiens
  Payload ID: 5918
  Gene Symbol: FAM3A
  Gene Name: family with sequence similarity 3, member A
  Uniprot ID: P98173
  ENST ID: ENST00000419205
  CDS Start-End: 471-1112
cttagccgccattgccgggcctgcctggccaccctgcgcagcggccttgcgtcctctcccggggcggagcgggtcggcgggcctgacagggaacctccctgaccgagcccacgtctccccacggccagagaaatctccggcccggcccgcatcgccagcccccaggcccggaggaacggcccgagcccaggagaaccacatcttcgtcccagccccggaggctcctgtgggcaagatcgtgagccaacgggttcctgaggcccctcctggccaggcagggtttccccgcgcgtttccgaggagccctgcctggccgggcggctggacaaacaggtcgtagcaccgatcgcgcccgcccccagcaggggtcccgcacaggcttgcccctgacccccacccaaacctgtccttccgctttgcccccaaacagtgcacttgccggcggtcccaacccagcaggagaagtggacatgaggttggcaggccctctccgcattgtggtcctagtcgtcagtgtgggtgtcacatggatcgtggtcagcatcctcctgggtgggcctggcagtggctttcctcgcatccagcaactcttcaccagtccagagagctcggtgactgcagcgccacgggccaggaagtacaagtgtggcctgccccagccgtgtcctgaggagcacctggccttccgcgtggtcagcggggccgccaacgtcattgggcccaagatctgcctcgaggacaagatgctgatgagcagcgtcaaggacaacgtgggccgcgggctgaacatcgccctggtgaacgatgtcaacgacctgttgaagtttattcggccactgcacgaaggcaccctggtgttcgtggcatcctacgacgacccagccaccaagatgaatgaagagaccagaaagctcttcagtgagctgggcagcaggaacgccaaggagctggccttccgggacagctgggtgtttgtcggggccaagggtgtgcagaacaagagcccctttgagcagcacgtgaagaacagtaagcacagcaacaagtacgaaggctggcccgaggcgctggagatggaaggctgtatcccgcggagaagcacggccagctagcacggccagtgccaggaccgggccgagggaggccagaccaagggaggcacgcgcgctgccgggcggacagaggctgaggctcacaccccacacccgggcaggagcgctccctggccccaacacatcggggctccgaggcagtgaccagaacgtggtctcaaggtggtgggggctatgggggctgcagggggtagccctgccgcactttgtcacgggagcccagggtacccgcctccttttcgtaacactgttccccccggtcagcccatctagccctgtcctccattcctcacgccatctccatccccatcttgagtcctggaacggccctgggtgcctgcccctcactgtgcatctctgggagcagcccggcaggttggggcgtcttccagaacctctcccttctggagccactctgcactgcgggctaaacatgtttccagtgtgattccttccagtgagccaaacccggtggctgcttcatgagcctgactgcctctcgcctgctctcagcaggaagggacccctggagcaggctggcccggggtggtgaagtagctggagcccgatcacagtcccgcggtttgtcagggggcccaccttctagatgaccccttaataaagtgatggccccacagaagaaatgccttc

SEQ ID NO: 132668 - DNA, 1817 bp, Homo sapiens
  Payload ID: 5918
  Gene Symbol: FAM3A
  Gene Name: family with sequence similarity 3, member A
  ENST ID: ENST00000434658
  CDS Start-End: 471-683
cttagccgccattgccgggcctgcctggccaccctgcgcagcggccttgcgtcctctcccggggcggagcgggtcggcgggcctgacagggaacctccctgaccgagcccacgtctccccacggccagagaaatctccggcccggcccgcatcgccagcccccaggcccggaggaacggcccgagcccaggagaaccacatcttcgtcccagccccggaggctcctgtgggcaagatcgtgagccaacgggttcctgaggcccctcctggccaggcagggtttccccgcgcgtttccgaggagccctgcctggccgggcggctggacaaacaggtcgtagcaccgatcgcgcccgcccccagcaggggtcccgcacaggcttgcccctgacccccacccaaacctgtccttccgctttgcccccaaacagtgcacttgccggcggtcccaacccagcaggagaagtggacatgaggttggcaggccctctccgcattgtggtcctagtcgtcagtgtgggtgtcacatggatcgtggtcagcatcctcctgggtgggcctggcagtggctttcctcgcatccagcaactcttcaccagctggagtgcagtggtgcaatctcggttcactgcaacctctacctcctgggttcaagcgattctagtgccccagcctcccgagtagctgagactacaggtccagagagctcggtgactgcagcgccacgggccaggaagtacaagtgtggcctgccccagccgtgtcctgaggagcacctggccttccgcgtggtcagcggggccgccaacgtcattgggcccaagatctgcctcgaggacaagatgctgatgagcagcgtcaaggacaacgtgggccgcgggctgaacatcgccctggtgaacgatgtcaacgacctgttgaagtttattcggccactgcacgaaggcaccctggtgttcgtggcatcctacgacgacccagccaccaagatgaatgaagagaccagaaagctcttcagtgagctgggcagcaggaacgccaaggagctggccttccgggacagctgggtgtttgtcggggccaagggtgtgcagaacaagagcccctttgagcagcacgtgaagaacagtaagcacagcaacaagtacgaaggctggcccgaggcgctggagatggaaggctgtatcccgcggagaagcacggccagctagcacggccagtgccaggaccgggccgagggaggccagaccaagggaggcacgcgcgctgccgggcggacagaggctgaggctcacaccccacacccgggcaggagcgctccctggccccaacacatcggggctccgaggcagtgaccagaacgtggtctcaaggtggtgggggctatgggggctgcagggggtagccctgccgcactttgtcacgggagcccagggtacccgcctccttttcgtaacactgttccccccggtcagcccatctagccctgtcctccattcctcacgccatctccatccccatcttgagtcctggaacggccctgggtgcctgcccctcactgtgcatctctgggagcagcccggcaggttggggcgtcttccagaacctctcccttctggagccactctgcactgcgggctaaacatgtttccagtgtgattccttccagtgagccaaacccggtggctgcttcatgagcctgactgcctctcgcctgctctcagcaggaagggacccctggagcaggctggcccggggtggtgaagtagctggagcccgatcacagtcccgcggtttgtcagggggcccaccttctag

SEQ ID NO: 132669 - DNA, 936 bp, Homo sapiens
  Payload ID: 5918
  Gene Symbol: FAM3A
  Gene Name: family with sequence similarity 3, member A
  ENST ID: ENST00000426266
  CDS Start-End: 446-936
tggccaccctgcgcagcggccttgcgtcctctcccggggcggagcgggtcggcgggcctgacagggaacctccctgaccgagcccacgtctccccacggccagagaaatctccggcccggcccgcatcgccagcccccaggcccggaggaacggcccgagcccaggagaaccacatcttcgtcccagccccggaggctcctgtgggcaagatcgtgagccaacgggttcctgaggcccctcctggccaggcagggtttccccgcgcgtttccgaggagccctgcctggccgggcggctggacaaacaggtcgtagcaccgatcgcgcccgcccccagcaggggtcccgcacaggcttgcccctgacccccacccaaacctgtccttccgctttgcccccaaacagtgcacttgccggcggtcccaacccagcaggagaagtggacatgaggttggcaggccctctccgcattgtggtcctagtcgtcagtgtgggtgtcacatggatcgtggtcagcatcctcctgggtgggcctggcagtggctttcctcgcatccagcaactcttcaccagtccagagagctcggtgactgcagcgccacgggccaggaagtacaagtgtggcctgccccagccgtgtcctgaggagcacctggccttccgcgtggtcagcggggccgccaacgtcattgggcccaagatctgcctcgaggacaagatgctgatgagcagcgtcaaggacaacgtgggccgcgggctgaacatcgccctggtgaacgggcccctccctcctgacacaggggtcagcggcgagctcatcgaggcccgggcctttgacatgtgggccggagatgtcaacgacctgttgaagtttattcggccactgcacgaaggcaccctggtgttcgtggcatcctacgacgacccagccaccaa

SEQ ID NO: 132670 - DNA, 832 bp, Homo sapiens
  Payload ID: 5918
  Gene Symbol: FAM3A
  Gene Name: family with sequence similarity 3, member A
  ENST ID: ENST00000412894
  CDS Start-End: 399-518
gtcggcgggcctgacagggaacctccctgaccgagcccacgtctccccacggccagagaaatctccggcccggcccgcatcgccagcccccaggcccggaggaacggcccgagcccaggagaaccacatcttcgtcccagccccggaggctcctgtgggcaagatcgtgagccaacgggttcctgaggcccctcctggccaggcagggtttccccgcgcgtttccgaggagccctgcctggccgggcggctggacaaacaggtcgtagcaccgatcgcgcccgcccccagcaggggtcccgcacaggcttgcccctgacccccacccaaacctgtccttccgctttgcccccaaacagtgcacttgccggcggtcccaacccagcaggagaagtggacatgaggttggcaggtccagagagctcggtgactgcagtaacagaaaatccttctgtcttgggtccctgtggcctcaccagtaggacacagagtatggaagtgtccccagcctcggcctgagccacatccccctacttgtgtcctgctctgcggtcacttgttctaccatgtgtgctggtcctgacctccccttcagatctcaggtgacctcagggccaggcccatggataacacctgctatccctgcccagcgccacgggccaggaagtacaagtgtggcctgccccagccgtgtcctgaggagcacctggccttccgcgtggtcagcggggccgccaacgtcattgggcccaagatctgcctcgaggacaagatgctgatgagcagcgtcaaggacaacgtgggccgcgggctgaacatcgccctggtgaacg

SEQ ID NO: 132671 - DNA, 441 bp, Homo sapiens
  Payload ID: 5918
  Gene Symbol: FAM3A
  Gene Name: family with sequence similarity 3, member A
  ENST ID: ENST00000440318
  CDS Start-End: 50-205
cccaaacagtgcacttgccggcggtcccaacccagcaggagaagtggacatgaggttggcaggccctctccgcattgtggtcctagtcgtcagtgtgggtgtcacatggatcgtggtcagcatcctcctgggtgggcctggcagtggctttcctcgcatccagcaactcttcaccagtccagagagctcggtgactgcaggctgatgagcagcgtcaaggacaacgtgggccgcgggctgaacatcgccctggtgaacggggtcagcggcgagctcatcgaggcccgggcctttgacatgtgggccggaggtgagttgcagcgcagcgtcttgcattttgactgcagcaaaatgacctgggcagcttcccctgagacactgctctctctgtctgtacttggagcttctcagtcacctccgtgggttcagaaaggacagggg

SEQ ID NO: 132672 - DNA, 1056 bp, Homo sapiens
  Payload ID: 5918
  Gene Symbol: FAM3A
  Gene Name: family with sequence similarity 3, member A
  ENST ID: ENST00000449971
  CDS Start-End: 362-574
tgccgggcctgcctggccaccctgcgcagcggccttgcgtcctctcccggggcggagcgggtcggcgggcctgacagggaacctccctgaccgagcccacgtctccccacggccagagaaatctccggcccggcccgcatcgccagcccccaggcccggaggaacggcccgagcccaggagaaccacatcttcgtcccagccccggaggctcctgtgggcaagatcgtgagccaacgggttcctgaggcccctcctggccaggcagggtttccccgcgcgtttccgaggagccctgcctggccgggcggctggacaaacagtgcacttgccggcggtcccaacccagcaggagaagtggacatgaggttggcaggccctctccgcattgtggtcctagtcgtcagtgtgggtgtcacatggatcgtggtcagcatcctcctgggtgggcctggcagtggctttcctcgcatccagcaactcttcaccagctggagtgcagtggtgcaatctcggttcactgcaacctctacctcctgggttcaagcgattctagtgccccagcctcccgagtagctgagactacaggtccagagagctcggtgactgcagcgccacgggccaggaagtacaagtgtggcctgccccagccgtgtcctgaggagcacctggccttccgcgtggtcagcggggccgccaacgtcattgggcccaagatctgcctcgaggacaagatgctgatgagcagcgtcaaggacaacgtgggccgcgggctgaacatcgccctggtgaacggggtcagcggcgagctcatcgaggcccgggcctttgacatgtgggccggagatgtcaacgacctgttgaagtttattcggccactgcacgaaggcaccctggtgttcgtggcatcctacgacgacccagccaccaagatgaatgaagagaccagaaagctcttcagtgagctgggcagcaggaacgccaaggagctggccttccgggacagctgggtgtttgtcggggccaagggtgtgcagaacaagagcccctttgagcag

SEQ ID NO: 132673 - DNA, 853 bp, Homo sapiens
  Payload ID: 5918
  Gene Symbol: FAM3A
  Gene Name: family with sequence similarity 3, member A
  ENST ID: ENST00000421517
  CDS Start-End: 394-606
cgggcctgacagggaacctccctgaccgagcccacgtctccccacggccagagaaatctccggcccggcccgcatcgccagcccccaggcccggaggaacggcccgagcccaggagaaccacatcttcgtcccagccccggaggctcctgtgggcaagatcgtgagccaacgggttcctgaggcccctcctggccaggcagggtttccccgcgcgtttccgaggagccctgcctggccgggcggctggacaaacaggtcgtagcaccgatcgcgcccgcccccagcaggggtcccgcacaggcttgcccctgacccccacccaaacctgtccttccgctttgcccccaaacagtgcacttgccggcggtcccaacccagcaggagaagtggacatgaggttggcaggccctctccgcattgtggtcctagtcgtcagtgtgggtgtcacatggatcgtggtcagcatcctcctgggtgggcctggcagtggctttcctcgcatccagcaactcttcaccagctggagtgcagtggtgcaatctcggttcactgcaacctctacctcctgggttcaagcgattctagtgccccagcctcccgagtagctgagactacaggtccagagagctcggtgactgcagatctcaggtgacctcagggccaggcccatggataacacctgctatccctgcccagcgccacgggccaggaagtacaagtgtggcctgccccagccgtgtcctgaggagcacctggccttccgcgtggtcagcggggccgccaacgtcattgggcccaagatctgcctcgaggacaagatgctgatgagcagcgtcaaggacaacgtgggcc

SEQ ID NO: 132674 - DNA, 905 bp, Homo sapiens
  Payload ID: 5918
  Gene Symbol: FAM3A
  Gene Name: family with sequence similarity 3, member A
  ENST ID: ENST00000457212
  CDS Start-End: 466-627
ccgccattgccgggcctgcctggccaccctgcgcagcggccttgcgtcctctcccggggcggagcgggtcggcgggcctgacagggaacctccctgaccgagcccacgtctccccacggccagagaaatctccggcccggcccgcatcgccagcccccaggcccggaggaacggcccgagcccaggagaaccacatcttcgtcccagccccggaggctcctgtgggcaagatcgtgagccaacgggttcctgaggcccctcctggccaggcagggtttccccgcgcgtttccgaggagccctgcctggccgggcggctggacaaacaggtcgtagcaccgatcgcgcccgcccccagcaggggtcccgcacaggcttgcccctgacccccacccaaacctgtccttccgctttgcccccaaacagtgcacttgccggcggtcccaacccagcaggagaagtggacatgaggttggcaggccctctccgcattgtggtcctagtcgtcagtgtgggtgtcacatggatcgtggtcagcatcctcctgggtgggcctggcagtggctttcctcgcatccagcaactcttcaccagtccagagagctcggtgactgcagatctcaggtgacctcagggccaggcccatggataacacctgctatccctgcccagcgccacgggccaggaagtacaagtgtggcctgccccagccgtgtcctgaggagcacctggccttccgcgtggtcagcggggccgccaacgtcattgggcccaagatctgcctcgaggacaagatgctgatgagcagcgtcaaggacaacgtgggccgcgggctgaacatcgccctggtgaacggggtcagcggcgagctcatcgaggcccgggcctttgacatgtgggccggag

SEQ ID NO: 132675 - DNA, 500 bp, Homo sapiens
  Payload ID: 5918
  Gene Symbol: FAM3A
  Gene Name: family with sequence similarity 3, member A
  ENST ID: ENST00000442929
  CDS Start-End: 438-500
ctgcgcagcggccttgcgtcctctcccggggcggagcgggtcggcgggcctgacagggaacctccctgaccgagcccacgtctccccacggccagagaaatctccggcccggcccgcatcgccagcccccaggcccggaggaacggcccgagcccaggagaaccacatcttcgtcccagccccggaggctcctgtgggcaagatcgtgagccaacgggttcctgaggcccctcctggccaggcagggtttccccgcgcgtttccgaggagccctgcctggccgggcggctggacaaacaggtcgtagcaccgatcgcgcccgcccccagcaggggtcccgcacaggcttgcccctgacccccacccaaacctgtccttccgctttgcccccaaacagtgcacttgccggcggtcccaacccagcaggagaagtggacatgaggttggcaggtccagagagctcggtgactgcagcgccacgggccaggaagtacaagtgt

SEQ ID NO: 132676 - DNA, 1113 bp, Homo sapiens
  Payload ID: 5918
  Gene Symbol: FAM3A
  Gene Name: family with sequence similarity 3, member A
  ENST ID: ENST00000416319
  CDS Start-End: 347-580
gccaccctgcgcagcggccttgcgtcctctcccggggcggagcgggtcggcgggcctgacagggaacctccctgaccgagcccacgtctccccacggccagagaaatctccggcccggcccgcatcgccagcccccaggcccggaggaacggcccgagcccaggagaaccacatcttcgtcccagccccggaggctcctgtgggcaagatcgtgagccaacgggttcctgaggcccctcctggccaggcagggtttccccgcgcgtttccgaggagccctgcctggccgggcggctggacaaacagtgcacttgccggcggtcccaacccagcaggagaagtggacatgaggttggcaggccctctccgcattgtggtcctagtcgtcagtgtgggtgtcacatggatcgtggtcagcatcctcctgggtgggcctggcagtggctttcctcgcatccagcaactcttcaccagtccagagagctcggtgactgcagtaacagaaaatccttctgtcttgggtccctgtggcctcaccagtaggacacagagtatggaagtgtccccagcctcggcctgagccacatccccctacttgtgtcctgctctgcggtcacttgttctaccatgtgtgctggtcctgacctccccttcagatctcaggtgacctcagggccaggcccatggataacacctgctatccctgcccagcgccacgggccaggaagtacaagtgtggcctgccccagccgtgtcctgaggagcacctggccttccgcgtggtcagcggggccgccaacgtcattgggcccaagatctgcctcgaggacaagatgctgatgagcagcgtcaaggacaacgtgggccgcgggctgaacatcgccctggtgaacggggtcagcggcgagctcatcgaggcccgggcctttgacatgtgggccggagatgtcaacgacctgttgaagtttattcggccactgcacgaaggcaccctggtgttcgtggcatcctacgacgacccagccaccaagatgaatgaagagaccagaaagctcttcagtgagctgggcagcaggaacgccaaggagctggccttccgggacagctgggtgt

SEQ ID NO: 132677 - DNA, 1800 bp, Homo sapiens
  Payload ID: 5918
  Gene Symbol: FAM3A
  Gene Name: family with sequence similarity 3, member A
  Uniprot ID: P98173
  ENST ID: ENST00000447601
  CDS Start-End: 468-1160
agccgccattgccgggcctgcctggccaccctgcgcagcggccttgcgtcctctcccggggcggagcgggtcggcgggcctgacagggaacctccctgaccgagcccacgtctccccacggccagagaaatctccggcccggcccgcatcgccagcccccaggcccggaggaacggcccgagcccaggagaaccacatcttcgtcccagccccggaggctcctgtgggcaagatcgtgagccaacgggttcctgaggcccctcctggccaggcagggtttccccgcgcgtttccgaggagccctgcctggccgggcggctggacaaacaggtcgtagcaccgatcgcgcccgcccccagcaggggtcccgcacaggcttgcccctgacccccacccaaacctgtccttccgctttgcccccaaacagtgcacttgccggcggtcccaacccagcaggagaagtggacatgaggttggcaggccctctccgcattgtggtcctagtcgtcagtgtgggtgtcacatggatcgtggtcagcatcctcctgggtgggcctggcagtggctttcctcgcatccagcaactcttcaccagtccagagagctcggtgactgcagcgccacgggccaggaagtacaagtgtggcctgccccagccgtgtcctgaggagcacctggccttccgcgtggtcagcggggccgccaacgtcattgggcccaagatctgcctcgaggacaagatgctgatgagcagcgtcaaggacaacgtgggccgcgggctgaacatcgccctggtgaacggggtcagcggcgagctcatcgaggcccgggcctttgacatgtgggccggagatgtcaacgacctgttgaagtttattcggccactgcacgaaggcaccctggtgttcgtggcatcctacgacgacccagccaccaagatgaatgaagagaccagaaagctcttcagtgagctgggcagcaggaacgccaaggagctggccttccgggacagctgggtgtttgtcggggccaagggtgtgcagaacaagagcccctttgagcagcacgtgaagaacagtaagcacagcaacaagtacgaaggctggcccgaggcgctggagatggaaggctgtatcccgcggagaagcacggccagctagcacggccagtgccaggaccgggccgagggaggccagaccaagggaggcacgcgcgctgccgggcggacagaggctgaggctcacaccccacacccgggcaggagcgctccctggccccaacacatcggggctccgaggcagtgaccagaacgtggtctcaaggtggtgggggctatgggggctgcagggggtagccctgccgcactttgtcacgggagcccagggtacccgcctccttttcgtaacactgttccccccggtcagcccatctagccctgtcctccattcctcacgccatctccatccccatcttgagtcctggaacggccctgggtgcctgcccctcactgtgcatctctgggagcagcccggcaggttggggcgtcttccagaacctctcccttctggagccactctgcactgcgggctaaacatgtttccagtgtgattccttccagtgagccaaacccggtggctgcttcatgagcctgactgcctctcgcctgctctcagcaggaagggacccctggagcaggctggcccggggtggtgaagtagctggagcccgatcacagtcccgcggtttgtcagggggcccaccttctagatgaccccttaataaagtgatggccccacagaa

SEQ ID NO: 132678 - DNA, 1901 bp, Homo sapiens
  Payload ID: 5918
  Gene Symbol: FAM3A
  Gene Name: family with sequence similarity 3, member A
  ENST ID: ENST00000621967
  CDS Start-End: 471-683
cttagccgccattgccgggcctgcctggccaccctgcgcagcggccttgcgtcctctcccggggcggagcgggtcggcgggcctgacagggaacctccctgaccgagcccacgtctccccacggccagagaaatctccggcccggcccgcatcgccagcccccaggcccggaggaacggcccgagcccaggagaaccacatcttcgtcccagccccggaggctcctgtgggcaagatcgtgagccaacgggttcctgaggcccctcctggccaggcagggtttccccgcgcgtttccgaggagccctgcctggccgggcggctggacaaacaggtcgtagcaccgatcgcgcccgcccccagcaggggtcccgcacaggcttgcccctgacccccacccaaacctgtccttccgctttgcccccaaacagtgcacttgccggcggtcccaacccagcaggagaagtggacatgaggttggcaggccctctccgcattgtggtcctagtcgtcagtgtgggtgtcacatggatcgtggtcagcatcctcctgggtgggcctggcagtggctttcctcgcatccagcaactcttcaccagctggagtgcagtggtgcaatctcggttcactgcaacctctacctcctgggttcaagcgattctagtgccccagcctcccgagtagctgagactacaggtccagagagctcggtgactgcagcgccacgggccaggaagtacaagtgtggcctgccccagccgtgtcctgaggagcacctggccttccgcgtggtcagcggggccgccaacgtcattgggcccaagatctgcctcgaggacaagatgctgatgagcagcgtcaaggacaacgtgggccgcgggctgaacatcgccctggtgaacggggtcagcggcgagctcatcgaggcccgggcctttgacatgtgggccggagatgtcaacgacctgttgaagtttattcggccactgcacgaaggcaccctggtgttcgtggcatcctacgacgacccagccaccaagatgaatgaagagaccagaaagctcttcagtgagctgggcagcaggaacgccaaggagctggccttccgggacagctgggtgtttgtcggggccaagggtgtgcagaacaagagcccctttgagcagcacgtgaagaacagtaagcacagcaacaagtacgaaggctggcccgaggcgctggagatggaaggctgtatcccgcggagaagcacggccagctagcacggccagtgccaggaccgggccgagggaggccagaccaagggaggcacgcgcgctgccgggcggacagaggctgaggctcacaccccacacccgggcaggagcgctccctggccccaacacatcggggctccgaggcagtgaccagaacgtggtctcaaggtggtgggggctatgggggctgcagggggtagccctgccgcactttgtcacgggagcccagggtacccgcctccttttcgtaacactgttccccccggtcagcccatctagccctgtcctccattcctcacgccatctccatccccatcttgagtcctggaacggccctgggtgcctgcccctcactgtgcatctctgggagcagcccggcaggttggggcgtcttccagaacctctcccttctggagccactctgcactgcgggctaaacatgtttccagtgtgattccttccagtgagccaaacccggtggctgcttcatgagcctgactgcctctcgcctgctctcagcaggaagggacccctggagcaggctggcccggggtggtgaagtagctggagcccgatcacagtcccgcggtttgtcagggggcccaccttctagatgaccccttaataaagtgatggccccacagaa

SEQ ID NO: 132679 - DNA, 1088 bp, Homo sapiens
  Payload ID: 5919
  Gene Symbol: FAM3B
  Gene Name: family with sequence similarity 3, member B
  Uniprot ID: P58499
  ENST ID: ENST00000357985
  CDS Start-End: 147-854
tttgcccgactggccgcgcacccagctggcccgcccctgcccgacacgaccgctgcccgccccttgccttcctgacccaggggctccgctggctgcggtcgcctgggagctgccgccagggccaggaggggagcggcacctggaagatgcgcccattggctggtggcctgctcaaggtggtgttcgtggtcttcgcctccttgtgtgcctggtattcggggtacctgctcgcagagctcattccagatgcacccctgtccagtgctgcctatagcatccgcagcatcggggagaggcctgtcctcaaagctccagtccccaaaaggcaaaaatgtgaccactggactccctgcccatctgacacctatgcctacaggttactcagcggaggtggcagaagcaagtacgccaaaatctgctttgaggataacctacttatgggagaacagctgggaaatgttgccagaggaataaacattgccattgtcaactatgtaactgggaatgtgacagcaacacgatgttttgatatgtatgaaggtgataactctggaccgatgacaaagtttattcagagtgctgctccaaaatccctgctcttcatggtgacctatgacgacggaagcacaagactgaataacgatgccaagaatgccatagaagcacttggaagtaaagaaatcaggaacatgaaattcaggtctagctgggtatttattgcagcaaaaggcttggaactcccttccgaaattcagagagaaaagatcaaccactctgatgctaagaacaacagatattctggctggcctgcagagatccagatagaaggctgcatacccaaagaacgaagctgacactgcagggtcctgagtaaatgtgttctgtataaacaaatgcagctggaatcgctcaagaatcttatttttctaaatccaacagcccatatttgatgagtattttgggtttgttgtaaaccaatgaacatttgctagttgtatcaaatcttggtacgcagtatttttataccagtattttatgtagtgaagatgtcaattagcaggaaactaaaatgaatggaaattcttaaa

SEQ ID NO: 132680 - DNA, 1026 bp, Homo sapiens
  Payload ID: 5919
  Gene Symbol: FAM3B
  Gene Name: family with sequence similarity 3, member B
  ENST ID: ENST00000398646
  CDS Start-End: 16-792
tgacactgggccgggatgaaaagccacaggggggatggggagggccaagggccagggccgccaccaagtcgttcacagcagctgcttggtgtcctctctgcaggcctgctcaaggtggtgttcgtggtcttcgcctccttgtgtgcctggtattcggggtacctgctcgcagagctcattccagatgcacccctgtccagtgctgcctatagcatccgcagcatcggggagaggcctgtcctcaaagctccagtccccaaaaggcaaaaatgtgaccactggactccctgcccatctgacacctatgcctacaggttactcagcggaggtggcagaagcaagtacgccaaaatctgctttgaggataacctacttatgggagaacagctgggaaatgttgccagaggaataaacattgccattgtcaactatgtaactgggaatgtgacagcaacacgatgttttgatatgtatgaaggtgataactctggaccgatgacaaagtttattcagagtgctgctccaaaatccctgctcttcatggtgacctatgacgacggaagcacaagactgaataacgatgccaagaatgccatagaagcacttggaagtaaagaaatcaggaacatgaaattcaggtctagctgggtatttattgcagcaaaaggcttggaactcccttccgaaattcagagagaaaagatcaaccactctgatgctaagaacaacagatattctggctggcctgcagagatccagatagaaggctgcatacccaaagaacgaagctgacactgcagggtcctgagtaaatgtgttctgtataaacaaatgcagctggaatcgctcaagaatcttatttttctaaatccaacagcccatatttgatgagtattttgggtttgttgtaaaccaatgaacatttgctagttgtatcaaatcttggtacgcagtatttttataccagtattttatgtagtgaagatgtcaattagcaggaaactaaaatgaatggaaattcttaaa

SEQ ID NO: 132681 - DNA, 864 bp, Homo sapiens
  Payload ID: 5919
  Gene Symbol: FAM3B
  Gene Name: family with sequence similarity 3, member B
  Uniprot ID: P58499
  ENST ID: ENST00000398647
  CDS Start-End: 67-630
gggctccgctggctgcggtcgcctgggagctgccgccagggccaggaggggagcggcacctggaagatgcgcccattggctggtgctccagtccccaaaaggcaaaaatgtgaccactggactccctgcccatctgacacctatgcctacaggttactcagcggaggtggcagaagcaagtacgccaaaatctgctttgaggataacctacttatgggagaacagctgggaaatgttgccagaggaataaacattgccattgtcaactatgtaactgggaatgtgacagcaacacgatgttttgatatgtatgaaggtgataactctggaccgatgacaaagtttattcagagtgctgctccaaaatccctgctcttcatggtgacctatgacgacggaagcacaagactgaataacgatgccaagaatgccatagaagcacttggaagtaaagaaatcaggaacatgaaattcaggtctagctgggtatttattgcagcaaaaggcttggaactcccttccgaaattcagagagaaaagatcaaccactctgatgctaagaacaacagatattctggctggcctgcagagatccagatagaaggctgcatacccaaagaacgaagctgacactgcagggtcctgagtaaatgtgttctgtataaacaaatgcagctggaatcgctcaagaatcttatttttctaaatccaacagcccatatttgatgagtattttgggtttgttgtaaaccaatgaacatttgctagttgtatcaaatcttggtacgcagtatttttataccagtattttatgtagtgaagatgtcaattagcaggaaactaaaatgaatggaaattcttaaa

SEQ ID NO: 132682 - DNA, 1125 bp, Homo sapiens
  Payload ID: 5919
  Gene Symbol: FAM3B
  Gene Name: family with sequence similarity 3, member B
  Uniprot ID: P58499
  ENST ID: ENST00000398652
  CDS Start-End: 67-891
gggctccgctggctgcggtcgcctgggagctgccgccagggccaggaggggagcggcacctggaagatgcgcccattggctggtggttcacgttgggcatgctggctcacaaggtgcttgattagctgctttgacataaacgttcaaggacgtttgttggttaagttaagacctaaaccaacagcaaatacaacttgccctggcctgctcaaggtggtgttcgtggtcttcgcctccttgtgtgcctggtattcggggtacctgctcgcagagctcattccagatgcacccctgtccagtgctgcctatagcatccgcagcatcggggagaggcctgtcctcaaagctccagtccccaaaaggcaaaaatgtgaccactggactccctgcccatctgacacctatgcctacaggttactcagcggaggtggcagaagcaagtacgccaaaatctgctttgaggataacctacttatgggagaacagctgggaaatgttgccagaggaataaacattgccattgtcaactatgtaactgggaatgtgacagcaacacgatgttttgatatgtatgaaggtgataactctggaccgatgacaaagtttattcagagtgctgctccaaaatccctgctcttcatggtgacctatgacgacggaagcacaagactgaataacgatgccaagaatgccatagaagcacttggaagtaaagaaatcaggaacatgaaattcaggtctagctgggtatttattgcagcaaaaggcttggaactcccttccgaaattcagagagaaaagatcaaccactctgatgctaagaacaacagatattctggctggcctgcagagatccagatagaaggctgcatacccaaagaacgaagctgacactgcagggtcctgagtaaatgtgttctgtataaacaaatgcagctggaatcgctcaagaatcttatttttctaaatccaacagcccatatttgatgagtattttgggtttgttgtaaaccaatgaacatttgctagttgtatcaaatcttggtacgcagtatttttataccagtattttatgtagtgaagatgtcaattagcaggaaactaaaatgaatggaaattcttaaa

SEQ ID NO: 132683 - DNA, 2508 bp, Homo sapiens
  Payload ID: 5920
  Gene Symbol: FAM3C
  Gene Name: family with sequence similarity 3, member C
  Uniprot ID: Q92520
  ENST ID: ENST00000359943
  CDS Start-End: 215-898
agcggcgagctggctttctcctggccacttgccggggtgaggggcagccggaggagtccgagaggaagcggaggcgcgagctggaggcggcggctcccgtcggcctccggcaggactgagcgctgggaggccggaaggcgggcgcgcgcggcggagaggcgggcgggaggccggagcatattaatgaaaagtgccataaactgaaaaaccaaacatgagggtagcaggtgctgcaaagttggtggtagctgtggcagtgtttttactgacattttatgttatttctcaagtatttgaaataaaaatggatgcaagtttaggaaatctatttgcaagatcagcattggacacagctgcacgttctacaaagcctcccagatataagtgtgggatctcaaaagcttgccctgagaagcattttgcttttaaaatggcaagtggagcagccaacgtggtgggacccaaaatctgcctggaagataatgttttaatgagtggtgttaagaataatgttggaagagggatcaatgttgccttggcaaatggaaaaacaggagaagtattagacactaaatattttgacatgtggggaggagatgtggcaccatttattgagtttctgaaggccatacaagatggaacaatagttttaatgggaacatacgatgatggagcaaccaaactcaatgatgaggcacggcggctcattgctgatttggggagcacatctattactaatcttggttttagagacaactgggtcttctgtggtgggaagggcattaagacaaaaagcccttttgaacagcacataaagaacaataaggatacaaacaaatatgaaggatggcctgaagttgtagaaatggaaggatgcatcccccagaagcaagactaatggaaatgtggagagaattgaagaaagcgcactttcactcttaatgggagagctataaatggcagagctatgtgtaaatattttaagagcatgcagccatcttggtgtgtgcatgagtattgtctcttttgatatcaggattatttattgctaacgtaaatagatagcattgtaaataatcatcacaatgatcaaatcactgaaccatgtctccgcacatttccctaaaagtacaatgtttagactgctatggtaatacatattttaaattctaaaagcatacacaatgtgtaactgaatggtttgtgaaaaatatattgatatatatactagttgctatgaaaatatcatggaataatagggattttagggtggatactttattttcttttatgtttctatatgttgcgttgtgatgacattatcttttaaattaaaaagagatttggctagttgtgtgtgtaatgttactttacagtccgactctcctgatgtacctcttttcatgatctttttctttccttcccaagaaactgaggaatgtttaatatgaaaacatacatcggatatgtgaaaagcacaacaaaattcttaatgtacacagtaaaaaagtaaatatataaatgtagatggcatttaggaccacagcttgctggatttgtgttagctatgggaataacttgattttgtataagctatttagagtgaggctggaggtggcagcttcacagaactggagaaccaggccaagtcccctccccaacctaattaggtcattcaggacagctaagtcagtatatttagagcaatactagcatacgtttttcttaattgttatcagcattgaccaagtggtttggaaggaggcatgctttaatatcacaataattttgatttgtaaaccaagaaattaatcctgtgtttatctaacttcataatagcaattattgcccgaagctatagtggcatatttacaaaagttcttattactgggcggactgataacatttaaaaaataattgtgtttgaccccaaatgactttatacccaattctacataaaaatatagaagatctatctttttttgttaccttcagatgttcactaaataactcagtttttaagcagaagttttcagggcattaaatatatgttgtgtatgaagtatctcaaactggaacataaatttagtgatcaaactgccattcacagtgtaaggcagcacttaaatttcgaacctaaagtttagatgcattgtataaaaaaacctaaaagcagtatctgttatttagctgtaaaccaagttggaagctattcggataatttcttaaatattgatgaactttggagtactgtttcttccttcaaactgaatgtaattaattcatgaataaatgcaccttatatgtttaaacaatctttgtatacttttgggatttttggtgcttatatgctaaatcacattcagcatgtgtattttgacatttaaaatacttccctcaattctgtaaattaaaagaatagttattttacagttccagggattgtgaaataaatgttgcagttttttaaaataatgaaaataaatactcttggttttgctttgtgaa

SEQ ID NO: 132684 - DNA, 561 bp, Homo sapiens
  Payload ID: 5920
  Gene Symbol: FAM3C
  Gene Name: family with sequence similarity 3, member C
  ENST ID: ENST00000412653
  CDS Start-End: 108-561
gtcgcggccgggaagcgtgggaggaggcccagcggcgagctggctttctcctggccacttgccggggagcatattaatgaaaagtgccataaactgaaaaaccaaacatgagggtagcaggtgctgcaaagttggtggtagctgtggcagtgtttttactgacattttatgttatttctcaagtatttgaaataaaaatggatgcaagtttaggaaatctatttgcaagatcagcattggacacagctgcacgttctacaaagcctcccagatataagtgtgggatctcaaaagcttgccctgagaagcattttgcttttaaaatggcaagtggagcagccaacgtggtgggacccaaaatctgcctggaagataatgttttaatgagtggtgttaagaataatgttggaagagggatcaatgttgccttggcaaatggaaaaacaggagaagtattagacactaaatattttgacatgtggggaggagatgtggcaccatttattgagtttctgaaggccatacaagatggaacaatagttttaatgggaacatacgatg

SEQ ID NO: 132685 - DNA, 662 bp, Homo sapiens
  Payload ID: 5920
  Gene Symbol: FAM3C
  Gene Name: family with sequence similarity 3, member C
  ENST ID: ENST00000426156
  CDS Start-End: 335-662
acttgccggggtgaggggcagccggaggagtccgagaggaagcggaggcgcgagctggaggcggcggctcccgtcggcctccggcaggactgagcgctgggaggccggaaggcgggcgcgcgcggcggagaggcgggcgggaggccggagcatattaatgaaaagtgccataaactgaaaaaccaaacatgagggtagcaggacagggaaaagttatctctggttgcatgtgcctatgattgctagaaaataagatggtgctgcaaagttggtggtagctgtggcagtgtttttactgacattttatgttatttctcaagtatttgaaataaaaatggatgcaagtttaggaaatctatttgcaagatcagcattggacacagctgcacgttctacaaagcctcccagatataagtgtgggatctcaaaagcttgccctgagaagcattttgcttttaaaatggcaagtggagcagccaacgtggtgggacccaaaatctgcctggaagataatgttttaatgagtggtgttaagaataatgttggaagagggatcaatgttgccttggcaaatggaaaaacaggagaagtattagacactaaatattttgacatgtggggaggagatgtggcaccatttattgagtttctgaaggccatac

SEQ ID NO: 132686 - DNA, 1319 bp, Homo sapiens
  Payload ID: 5921
  Gene Symbol: FAM3D
  Gene Name: family with sequence similarity 3, member D
  Uniprot ID: Q96BQ1
  ENST ID: ENST00000358781
  CDS Start-End: 312-986
gttgatggcaaacttcctcaaaggaggggcagagcctgcgcagggcaggagcagctggcccactggcggcccgcaacactccgtctcaccctctgggcccactgcatctagaggagggccgtctgtgaggccactacccctccagcaactgggaggtgggactgtcagaagctggcccagggtggtggtcagctgggtcagggacctacggcacctgctggaccacctcgccttctccatcgaagcagggaagtgggagcctcgagccctcgggtggaagctgaccccaagccacccttcacctggacaggatgagagtgtcaggtgtgcttcgcctcctggccctcatctttgccatagtcacgacatggatgtttattcgaagctacatgagcttcagcatgaaaaccatccgtctgccacgctggctggcagcctcgcccaccaaggagatccaggttaaaaagtacaagtgtggcctcatcaagccctgcccagccaactactttgcgtttaaaatctgcagtggggccgccaacgtcgtgggccctactatgtgctttgaagaccgcatgatcatgagtcctgtgaaaaacaatgtgggcagaggcctaaacatcgccctggtgaatggaaccacgggagctgtgctgggacagaaggcatttgacatgtactctggagatgttatgcacctagtgaaattccttaaagaaattccggggggtgcactggtgctggtggcctcctacgacgatccagggaccaaaatgaacgatgaaagcaggaaactcttctctgacttggggagttcctacgcaaaacaactgggcttccgggacagctgggtcttcataggagccaaagacctcaggggtaaaagcccctttgagcagttcttaaagaacagcccagacacaaacaaatacgagggatggccagagctgctggagatggagggctgcatgcccccgaagccattttagggtggctgtggctcttcctcagccaggggcctgaagaagctcctgcctgacttaggagtcagagcccggcaggggctgaggaggaggagcagggggtgctgcgtggaaggtgctgcaggtccttgcacgctgtgtcgcgcctctcctcctcggaaacagaaccctcccacagcacatcctacccggaagaccagcctcagagggtccttctggaaccagctgtctgtggagagaatggggtgctttcgtcagggactgctgacggctggtcctgaggaaggacaaactgcccagacttgagcccaattaaattttatttttgctggttttgaa

SEQ ID NO: 132687 - DNA, 737 bp, Homo sapiens
  Payload ID: 5921
  Gene Symbol: FAM3D
  Gene Name: family with sequence similarity 3, member D
  ENST ID: ENST00000483787
  CDS Start-End: 284-737
cagtcctgggccccagctccagagcactcacgggctgccagggtgagcaggctagaaactcacgacaccaggtagctctgcaggtgctgggagggcaactcagcccagaggaagagcaggctggggagccctcaccgcccaatggggactgacccctggcccctgcccctctccaccccactgccctgaagccagatttcctgctcagcatggacaggacagcaagaggctaaccctctgcccaggtggaagctgaccccaagccacccttcacctggacaggatgagagtgtcaggtgtgcttcgcctcctggccctcatctttgccatagtcacgacatggatgtttattcgaagctacatgagcttcagcatgaaaaccatccgtctgccacgctggctggcctcgcccaccaaggagatccaggttaaaaagtacaagtgtggcctcatcaagccctgcccagccaactactttgcgtttaaaatctgcagtggggccgccaacgtcgtgggccctactatgtgctttgaagaccgcatgatcatgagtcctgtgaaaaacaatgtgggcagaggcctaaacatcgccctggtgaatggaaccacgggagctgtgctgggacagaaggcatttgacatgtactctggagatgttatgcacctagtgaaattccttaaagaaattccggggggtgcactggtgctggtggcctcctacgacgatccagggacca

SEQ ID NO: 132688 - DNA, 633 bp, Homo sapiens
  Payload ID: 5921
  Gene Symbol: FAM3D
  Gene Name: family with sequence similarity 3, member D
  ENST ID: ENST00000489857
  CDS Start-End: 298-633
tcctcaaaggaggggcagagcctgcgcagggcaggagcagctggcccactggcggcccgcaacactccgtctcaccctctgggcccactgcatctagaggagggccgtctgtgaggccactacccctccagcaactgggaggtgggactgtcagaagctggcccagggtggtggtcagctgggtcagggacctacggcacctgctggaccacctcgccttctccatcgaagcagggaagtgggagcctcgagccctcgggtggaagctgaccccaagccacccttcacctggacaggatgagagtgtcagcctcgcccaccaaggagatccaggttaaaaagtacaagtgtggcctcatcaagccctgcccagccaactactttgcgtttaaaatctgcagtggggccgccaacgtcgtgggccctactatgtgctttgaagaccgcatgatcatgagtcctgtgaaaaacaatgtgggcagaggcctaaacatcgccctggtgaatggaaccacgggagctgtgctgggacagaaggcatttgacatgtactctggagatgttatgcacctagtgaaattccttaaagaaattccggggggtgcactggtgctggtggcctcctacgacgat

SEQ ID NO: 132689 - DNA, 625 bp, Homo sapiens
  Payload ID: 5921
  Gene Symbol: FAM3D
  Gene Name: family with sequence similarity 3, member D
  ENST ID: ENST00000482623
  CDS Start-End: 214-333
ggtagctctgcaggtgctgggagggcaactcagcccagaggaagagcaggctggggagccctcaccgcccaatggggactgacccctggcccctgcccctctccaccccactgccctgaagccagatttcctgctcagcatggacaggacagcaagaggctaaccctctgcccaggtggaagctgaccccaagccacccttcacctggacaggatgagagtgtcagcccccagcccccaacctccatcctgcaggagggtccgaagtgcttttcctctaaccagattctgtcttctctccagcagcctcgcccaccaaggagatccaggttaaaaagtacaagtgtggcctcatcaagccctgcccagccaactactttgcgtttaaaatctgcagtggggccgccaacgtcgtgggccctactatgtgctttgaagaccgcatgatcatgagtcctgtgaaaaacaatgtgggcagaggcctaaacatcgccctggtgaatggaaccacgggagctgtgctgggacagaaggcatttgacatgtactctggagatgttatgcacctagtgaaattccttaaagaaattccggggggtgcactggtgctggtggcctcctacgac

SEQ ID NO: 132690 - DNA, 449 bp, Homo sapiens
  Payload ID: 5921
  Gene Symbol: FAM3D
  Gene Name: family with sequence similarity 3, member D
  ENST ID: ENST00000498347
  CDS Start-End: 142-449
ccagagcactcacgggctgccagggtgagcaggctagaaactcacgacaccagatttcctgctcagcatggacaggacagcaagaggctaaccctctgcccaggtggaagctgaccccaagccacccttcacctggacaggatgagagtgtcaggtgtgcttcgcctcctggccctcatctttgccatagtcacgacatggatgtttattcgaagctacatgagcttcagcatgaaaaccatccgtctgccacgctggctggcagcctcgcccaccaaggagatccaggttaaaaagtacaagtgtggcctcatcaagccctgcccagccaactactttgcgtttaaaatctgcagtggggccgccaacgtcgtgggccctactatgtgctttgaagaccgcatgatcatgagtcctgtgaaaaacaatgtgggcagaggcctaaacat

SEQ ID NO: 132691 - DNA, 1455 bp, Homo sapiens
  Payload ID: 5922
  Gene Symbol: FAM32A
  Gene Name: family with sequence similarity 32, member A
  Uniprot ID: Q9Y421
  ENST ID: ENST00000263384
  CDS Start-End: 26-364
agctaccgaagcactggagagtgtcatggaggcctacgagcaggtccaaaagggacccctgaagctgaaaggcgtcgcagagctgggagtgaccaagcggaagaagaaaaagaaggacaaagacaaagcgaaactcctggaagcaatgggaacgagcaaaaagaacgaggaggagaagcggcgcggcctggacaagcggaccccggcccaggcggccttcgagaaaatgcaggagaagcggcaaatggaaaggatcctaaagaaggcatccaaaacccacaagcagagagtggaggacttcaacagacacctggacacactcacggagcattacgacattcccaaagtcagctggacgaagtagccgcctgcccccagtatggagcagcatcgagggttcgcaaaaggccacactggggttgtgtgtgtttcctttggtatattctggaaacatggctacacacacccttgcatcttctgctacagactgcttttcgaagctgtgtaccctcattctggaacttgattaaagtaagatcgtccttgtactcagtttaggcttcttggcaacatacagaagatacacccttttcgtttggatggaaagtttctaagtttatccagaggtaaagcccattgtgtgtctgtgtcatgtaaaaatgttttcacccgagttgcatgtaacgctctgaggccagccagctgtcttctcctggatgagacagactccagagggtaaggagctagcgccatggtggcctgcagtatgcagagccccgcaggacccagcgtgggcgcccttccaagcttcctctagctttgggcctatgctgtcccctgcaggccctagggaagccacttgcaactatgcggccttcagacttcctcctcagccacctggccactgagacagcatagcctgggtaacggaacagccacctaaggcaagaatggaacggacacaccttgctcctttctgagcccgtttcccaaaaccccccttccaggtgcttctaatgggtgttgccatagcagacgctgctaatgcatcacagcattctttgaaatggaaccagacacagcctgcctctcaatcctcagctgggggctcctagcagcctcttgtatttactcagagttgacacatcacacagatcctgtttggcattcctaccttacggacgtctcaggggtgacaggaccagggcagagccccggtacaaacagacaaggctgcagtcaaatgggagggtccaggtgtccgtgttggagggctgggatcttgtagggcctgtgcgtcctggctgaggatcaaaccacatatgttattgggagaaacgatttctgttgacgtagatattgaaagaataatgaaggcagaagagaaaaacgaagtgtggaatttggggttgtcctgtgtaaattacacaataaagcaaaagtcagttattgtaa

SEQ ID NO: 132692 - DNA, 798 bp, Homo sapiens
  Payload ID: 5922
  Gene Symbol: FAM32A
  Gene Name: family with sequence similarity 32, member A
  ENST ID: ENST00000588367
  CDS Start-End: 21-305
ccgaagcactggagagtgtcatggaggcctacgagcaggtccaaaagggacccctgaagctgaaaggcgtcgcagagctgggagtgaccaagcggaagaagaaaaagaaggacaaagacaaagcgaaactcctggaagcaatgggaacgagcaaaaagaacgaggaggagaagcggcgcggcctggacaagcggaccccggcccaggcggccttcgagaaaatgcaggagaagcgggacttcaacagacacctggacacactcacggagcattacgacattcccaaagtcagctggacgaagtagccgcctgcccccagtatggagcagcatcgagggttcgcaaaaggccacactggggttgtgtgtgtttcctttggtatattctggaaacatggctacacacacccttgcatcttctgctacagactgcttttcgaagctgtgtaccctcattctggaacttgattaaagtaagatcgtccttgtactcagtttaggcttcttggcaacatacagaagatacacccttttcgtttggatggaaagtttctaagtttatccagaggtaaagcccattgtgtgtctgtgtcatgtaaaaatgttttcacccgagttgcatgtaacgctctgaggccagccagctgtcttctcctggatgagacagactccagagggtaaggagctagcgccatggtggcctgcagtatgcagagccccgcaggacccagcgtgggcgcccttccaagcttcctctagctttgggcctatgctgtcccctgcaggccctagggaagcc

SEQ ID NO: 132693 - DNA, 1168 bp, Homo sapiens
  Payload ID: 5922
  Gene Symbol: FAM32A
  Gene Name: family with sequence similarity 32, member A
  Uniprot ID: Q9Y421
  ENST ID: ENST00000589852
  CDS Start-End: 231-509
gcggaaatagtgtttgcaaacaggaagtgtggcactccagctaccgaagcactggagagtgtcatggaggcctacgagcaggtccaaaagggacccctgaagctgaaaggcgtcgcagagctgggagtgaccaagcggtgaggcccgagggcccgcgggattccgtcttcatcccccttagaccttttctcgggacccctggccctgatcctccgacccgccgcctcctcatgtctttttccaggaagaagaaaaagaaggacaaagacaaagcgaaactcctggaagcaatgggaacgagcaaaaagaacgaggaggagaagcggcgcggcctggacaagcggaccccggcccaggcggccttcgagaaaatgcaggagaagcggcaaatggaaaggatcctaaagaaggcatccaaaacccacaagcagagagtggaggacttcaacagacacctggacacactcacggagcattacgacattcccaaagtcagctggacgaagtagccgcctgcccccagtatggagcagcatcgagggttcgcaaaaggccacactggggttgtgtgtgtttcctttggtatattctggaaacatggctacacacacccttgcatcttctgctacagactgcttttcgaagctgtgtaccctcattctggaacttgattaaagtaagatcgtccttgtactcagtttaggcttcttggcaacatacagaagatacacccttttcgtttggatggaaagtttctaagtttatccagaggtaaagcccattgtgtgtctgtgtcatgtaaaaatgttttcacccgagttgcatgtaacgctctgaggccagccagctgtcttctcctggatgagacagactccagagggtaaggagctagcgccatggtggcctgcagtatgcagagccccgcaggacccagcgtgggcgcccttccaagcttcctctagctttgggcctatgctgtcccctgcaggccctagggaagccacttgcaactatgcggccttcagacttcctcctcagccacctggccactgagacagcatagcctgggtaacggaacagccacctaaggcaagaatggaacggacacaccttgctcctttctgagcccgtttcccaaaaccccccttccaggtgcttctaatgggtg

SEQ ID NO: 132694 - DNA, 401 bp, Homo sapiens
  Payload ID: 5922
  Gene Symbol: FAM32A
  Gene Name: family with sequence similarity 32, member A
  ENST ID: ENST00000587351
  CDS Start-End: 1-249
gagcaggtccaaaagggacccctgaagctgaaaggcgtcgcagagctgggagtgaccaagcggaagaagaaaaagaaggacaaagacaaagcgaaactcctggaagcaatgggaacgagcaaaaagaacgaggaggagaagcggcgcggcctggacaagcggaccccggcccaggcggccttcgagaaaatgcaggagaagcggagatgcggtttcaccatgttggccaggctgatctcgaacttctgatctcaagtgatccgcccgcctcagcttcccaaagtgctgggattacaggcgtgagccaccgcacccagtctcagctgttgatattgaatggccatgcccatgacgactttgtttgtattgtattataaggctccgataaattattttttctt

SEQ ID NO: 132695 - DNA, 896 bp, Homo sapiens
  Payload ID: 5922
  Gene Symbol: FAM32A
  Gene Name: family with sequence similarity 32, member A
  ENST ID: ENST00000585831
  CDS Start-End: 11-334
ggagagtgtcatggaggcctacgagcaggtccaaaagggacccctgaagctgaaaggcgtcgcagagctgggagtgaccaagcggaagaagaaaaagaaggacaaagacaaagcgaaactcctggaagcaatgggaacgagcaaaaagaacgaggaggagaagcggcgcggcctggacaagcggaccccggcccaggcggccttcgagaaaatgcaggagaagcggcagggccatcagacttcctgcacagcaactggcttccaagggcacaaagctaatgctgccaggtcttatgcatggacccagaactggtactgtgttccttcgagttaactgagtccacggccagcaaatggaaaggatcctaaagaaggcatccaaaacccacaagcagagagtggaggacttcaacagacacctggacacactcacggagcattacgacattcccaaagtcagctggacgaagtagccgcctgcccccagtatggagcagcatcgagggttcgcaaaaggccacactggggttgtgtgtgtttcctttggtatattctggaaacatggctacacacacccttgcatcttctgctacagactgcttttcgaagctgtgtaccctcattctggaacttgattaaagtaagatcgtccttgtactcagtttaggcttcttggcaacatacagaagatacacccttttcgtttggatggaaagtttctaagtttatccagaggtaaagcccattgtgtgtctgtgtcatgtaaaaatgttttcacccgagttgcatgtaacgctctgaggccagccagctgtcttctcctggatgagacagactccagagggtaaggagctagcgccatggtggcctgcagtatgcagagccccgcaggaccc

SEQ ID NO: 132696 - DNA, 3402 bp, Homo sapiens
  Payload ID: 5923
  Gene Symbol: FAM35A
  Gene Name: family with sequence similarity 35, member A
  Uniprot ID: Q86V20
  ENST ID: ENST00000298784
  CDS Start-End: 115-2622
acgggcggccggatttgcccggaggccgcacccgcctccggcggggctctcagtgaaaaatgtactctgacctgaatcctgaattttccttgatggtcaaaagattaagaaatcatgagtggaggatctcaagtccacattttttggggtgctccaattgctccactgaaaatcacagtatcagaagacacagcttctttaatgtctgttgctgacccctggaaaaaaattcagcttttatacagtcaacattctttatatctgaaggatgaaaaacagcacaaaaatcttgaaaactataaagtcccagaatctattggttctccagatcttagtggtcatttcttagcaaactgtatgaatagacatgttcatgtgaaagatgactttgtacgttctgtttctgaaacacagaatatagaatcccagaagattcactcctctagactgagtgatataactagctctaatatgcaaatatgtggatttaaaagcacagttccgcatttcaccgaagaagaaaagtatcaaaagcttctcagtgaaaataaaattagagatgaacagcctaaacatcagccagatatatgtggtaagaactttaacacaaatttgtttcagttgggccataaatgtgcagctgtgttggatttggtttgtagtactgaaaaaattaatatagggcctgaagtggtacaaagagagtgtgtgccaacagaatatcatgaaatacaaaaccagtgtttgggattattttcctcgaacgcagtagataagtcaaggtctgaagcagcagttaggaaggtctcagaccttaaaatatcaactgatacagaatttctcagtataattacctccagccaggttgcttttttagctcaaaagaaagataaaaggcggagtcctgtaaataaagggaatgtaaacatggagactgaaccaaaggcaagttacggggagataagaatacctgaagagaattcgattcagcttgatggttttacagaagcatatgaaagtggacaaaaccaagcatattcccttgaactttttagtcctgtttgtcctaaaacagaaaatagccgcattcacataaactctgataaaggtcttgaagaacatacaggatctcaagaacttttcagttctgaagatgaactgccaccaaatgagatacgtattgagttgtgtagctcaggaatactgtgttcccaactaaataccttccacaaaagtgctattaaaagaagctgtacctctgaagataaagtgggccagtctgaagctctatctagagtccttcaagtagctaagaaaatgaagttgatttctaatggaggagattctgctgtagaaatggatcggagaaatgtgtctgaatttaagagtattaaaaaaacatcattaataaaaaactgtgattctaaaagccagaagtataattgtttagtcatggtgctatctccatgccatgtgaaggaaataaacataaaattcggaccaaattctggctctaaagtgcctttagcaacagttacagtaattgatcaatcagaaactaagaagaaggtttttctgtggaggactgcagcattttgggcatttacagtgtttcttggagatataattttactcacagatgttgttattcatgaggaccaatggattggcgagacagtactacaatcaacatttagcagtcagttattaaatcttgggagttattcatctattcagcctgaagaatattccagtgtagttagtgaagttgtacttcaagacttactggcatatgtgtcctcaaaacattcctacctcagagatcttcctccgaggcagcctcagagggtgaacagtatagactttgtagaattggagcaccttcaacctgatgtattagtccacgcagtactaagagttgttgatttcactatactgacagaggcagtatacagttatagaggacagaagcagaaaaaagttatgttaacagtggaacaggcccaagatcaacattatgcgcttgtattatggggtcctggagcagcctggtaccctcaacttcaaaggaaaaaaggagtggttctgattaaagcccagatttcagagctggcatttcctattacagcatctcagaagatagcgctaaatgctcacagttctctgaagagtattttttcttctcttcccaacatcgtatatactggttgtgcaaaatgtggattggaactagaaacagatgagaacaggatctacaaacaatgttttagctgcttgccatttactatgaagaaaatatattataggccagcgttaatgactgccattgatggaagacatgatgtttgtatccgtgtagaatcaaagctgatagagaagattcttctcaacatttctgcagactgcctcaacagagtgatagttccttcctcagagatcacctatgggatggtcgtggcagacctgttccactccttgttggcagtcagcgcagaaccttgtgtattaaagattcagagcctttttgtgttagatgaaaacagctatccattacaacaagatttctccctcctggatttttatcctgacattgtaaagcatggagccaatgcccgtctctgaggccagaggaagaaattgcaggcatttcaaggaagaagtactgaaatgatttgtcttttgaaataaatgaatgacagggcttttgctttggattttttatgaaatatattttacaaagagaattgcactagatatataaattaaaacttttttctaagaaaatcctgtgaggtttaaaaagattgtttttgtcttttggtttcttactttctcctggagaaatgatctaccagtcaaggcaatatgtagcagatccctgggaattaaaggtttgcccatttgttcactgtatttagtccctgctacattccaggcattgtactaagtatggggaaccacagagaagacattccctcagaaactgctgcagtgctttcgcttatccctacctaaaaaaccgtcaatgtgaaatcatttccttgattataactataatgataatggattagtttatataaacctatgtttagacaagttcaagacaagcgtgtctttctataaaaagtattgaaaatgaaggaaatgagatcatgtttcaatttattaaagcagggaagagcgttctgtgcttagttcgtgtctaggatttgagtgccttactgaatgcatttaccagcaaacatgtagcaatctgttctctcattgtgattgtggaagaagctcatgtaaaatgatagtcattaatgaggaagtatggcgtggtacttattctgtaagttcagagtatgctgagtgttaatagattatcatattgcctgaaaataaattcatgatgacatg

SEQ ID NO: 132697 - DNA, 3614 bp, Homo sapiens
  Payload ID: 5923
  Gene Symbol: FAM35A
  Gene Name: family with sequence similarity 35, member A
  Uniprot ID: Q86V20
  ENST ID: ENST00000298786
  CDS Start-End: 115-2829
acgggcggccggatttgcccggaggccgcacccgcctccggcggggctctcagtgaaaaatgtactctgacctgaatcctgaattttccttgatggtcaaaagattaagaaatcatgagtggaggatctcaagtccacattttttggggtgctccaattgctccactgaaaatcacagtatcagaagacacagcttctttaatgtctgttgctgacccctggaaaaaaattcagcttttatacagtcaacattctttatatctgaaggatgaaaaacagcacaaaaatcttgaaaactataaagtcccagaatctattggttctccagatcttagtggtcatttcttagcaaactgtatgaatagacatgttcatgtgaaagatgactttgtacgttctgtttctgaaacacagaatatagaatcccagaagattcactcctctagactgagtgatataactagctctaatatgcaaatatgtggatttaaaagcacagttccgcatttcaccgaagaagaaaagtatcaaaagcttctcagtgaaaataaaattagagatgaacagcctaaacatcagccagatatatgtggtaagaactttaacacaaatttgtttcagttgggccataaatgtgcagctgtgttggatttggtttgtagtactgaaaaaattaatatagggcctgaagtggtacaaagagagtgtgtgccaacagaatatcatgaaatacaaaaccagtgtttgggattattttcctcgaacgcagtagataagtcaaggtctgaagcagcagttaggaaggtctcagaccttaaaatatcaactgatacagaatttctcagtataattacctccagccaggttgcttttttagctcaaaagaaagataaaaggcggagtcctgtaaataaagggaatgtaaacatggagactgaaccaaaggcaagttacggggagataagaatacctgaagagaattcgattcagcttgatggttttacagaagcatatgaaagtggacaaaaccaagcatattcccttgaactttttagtcctgtttgtcctaaaacagaaaatagccgcattcacataaactctgataaaggtcttgaagaacatacaggatctcaagaacttttcagttctgaagatgaactgccaccaaatgagatacgtattgagttgtgtagctcaggaatactgtgttcccaactaaataccttccacaaaagtgctattaaaagaagctgtacctctgaagataaagtgggccagtctgaagctctatctagagtccttcaagtagctaagaaaatgaagttgatttctaatggaggagattctgctgtagaaatggatcggagaaatgtgtctgaatttaagagtattaaaaaaacatcattaataaaaaactgtgattctaaaagccagaagtataattgtttagtcatggtgctatctccatgccatgtgaaggaaataaacataaaattcggaccaaattctggctctaaagtgcctttagcaacagttacagtaattgatcaatcagaaactaagaagaaggtttttctgtggaggactgcagcattttgggcatttacagtgtttcttggagatataattttactcacagatgttgttattcatgaggaccaatggattggcgagacagtactacaatcaacatttagcagtcagttattaaatcttgggagttattcatctattcagcctgaagaatattccagtgtagttagtgaagttgtacttcaagacttactggcatatgtgtcctcaaaacattcctacctcagagatcttcctccgaggcagcctcagagggtgaacagtatagactttgtagaattggagcaccttcaacctgatgtattagtccacgcagtactaagagttgttgatttcactatactgacagaggcagtatacagttatagaggacagaagcagaaaaaagttatgttaacagtggaacaggcccaagatcaacattatgcgcttgtattatggggtcctggagcagcctggtaccctcaacttcaaaggaaaaaaggttatatttgggaatttaaatatctttttgttcagtgcaattacacactagaaaacctagaattgcatacaacgccttggtcatcctgtgagtgcttgtttgatgatgatataagggcaattacatttaaagcaaaatttcaaaaaagtgcaccctcctttgtgaagatatcagacttagcaacccacctagaggataagtgttcaggagtggttctgattaaagcccagatttcagagctggcatttcctattacagcatctcagaagatagcgctaaatgctcacagttctctgaagagtattttttcttctcttcccaacatcgtatatactggttgtgcaaaatgtggattggaactagaaacagatgagaacaggatctacaaacaatgttttagctgcttgccatttactatgaagaaaatatattataggccagcgttaatgactgccattgatggaagacatgatgtttgtatccgtgtagaatcaaagctgatagagaagattcttctcaacatttctgcagactgcctcaacagagtgatagttccttcctcagagatcacctatgggatggtcgtggcagacctgttccactccttgttggcagtcagcgcagaaccttgtgtattaaagattcagagcctttttgtgttagatgaaaacagctatccattacaacaagatttctccctcctggatttttatcctgacattgtaaagcatggagccaatgcccgtctctgaggccagaggaagaaattgcaggcatttcaaggaagaagtactgaaatgatttgtcttttgaaataaatgaatgacagggcttttgctttggattttttatgaaatatattttacaaagagaattgcactagatatataaattaaaacttttttctaagaaaatcctgtgaggtttaaaaagattgtttttgtcttttggtttcttactttctcctggagaaatgatctaccagtcaaggcaatatgtagcagatccctgggaattaaaggtttgcccatttgttcactgtatttagtccctgctacattccaggcattgtactaagtatggggaaccacagagaagacattccctcagaaactgctgcagtgctttcgcttatccctacctaaaaaaccgtcaatgtgaaatcatttccttgattataactataatgataatggattagtttatataaacctatgtttagacaagttcaagacaagcgtgtctttctataaaaagtattgaaaatgaaggaaatgagatcatgtttcaatttattaaagcagggaagagcgttctgtgcttagttcgtgtctaggatttgagtgccttactgaatgcatttaccagcaaacatgtagcaatctgttctctcattgtgattgtggaagaagctcatgtaaaatgatagtcattaatgaggaagtatggcgtggtacttattctgtaagttcagagtatgctgagtgttaatagattatcatattgcctgaaaataaattcatgatgacatgaacaa

SEQ ID NO: 132698 - DNA, 969 bp, Homo sapiens
  Payload ID: 5923
  Gene Symbol: FAM35A
  Gene Name: family with sequence similarity 35, member A
  ENST ID: ENST00000437629
  CDS Start-End: 690-969
tccacagagccggccacatccgaggcggggtgacccgggcggggacccggcccgctccagctgggctgggctgggctgagcagcggccccgcaccggcaggaggccggaggggagggccgcaggggaggcagggagggcgggacggggcccggccgacgctcacctcccttgcagggcgtgcggtgctggctgtgctgggcccggtagccttcgatgacctcccaggagccgtcgtcgcgccggatggggaaggagagactcagcacatggttgcagggcttgatgatccgcaggatgccgcgcacccggttccgcttctgctcctcgctctcccgggtcctcaggtcctccaccagcttgtcctccacgatgctggcgccgcgatcgaagaagccctccaccatcttgaagaagttggggtcgtcctcgcggtcggccaccgcctcgctgtagtggcgccgggcggccaatgccagccccggctgcggggcggcggcgggctgtccccgggcccagcccagcaacgcggccgagtcggcggacgccgagcccagggcagcgggcccggcccgggacagcaacagcgcttcgcccaggtagcggtacatggccacaagcggaggggagtgaaaaatgtactctgacctgaatcctgaattttccttgatggtcaaaagattaagaaatcatgagtggaggatctcaagtccacattttttggggtgctccaattgctccactgaaaatcacagtatcagaagacacagcttctttaatgtctgttgctgacccctggaaaaaaattcagcttttatacagtcaacattctttatatctgaaggatgaaaaacagcacaaaaatcttgaaaactataaagtcccagaatctattggttctccagatcttagtggtcatttcttagcaaactgtatgaatagacatgttcatgtgaaagatgactttgtac

SEQ ID NO: 132699 - DNA, 2494 bp, Homo sapiens
  Payload ID: 5924
  Gene Symbol: FAM43A
  Gene Name: family with sequence similarity 43, member A
  Uniprot ID: Q8N2R8
  ENST ID: ENST00000329759
  CDS Start-End: 284-1555
tggggtaattctgtgtgcgcgcgtgtctcccccgcaccaaccttttttgcacactcgaagctgaatattttcttttttagagaatttacccgcacctcctgcggggttcctaagcactctctctgctcccctccccccaactccctaccacagggccgctcccagtagttttattcttcgatcttgcccgggccgagcctggcaggggccggtggctcagcgggcctcgcacccggcgctccgccgccgccgccgcccagctgcgccggggcgccctccggagatgctgccgtggaagaagcacaagttcgagctgctggccgaggcgccgccgcggcaggcgtccaagcccaagggctacgctgtgagcctgcactactcggcgctcagctcgctggcgcgggcgtgccccgaaggcgcgcttagccgggtgggcagcatgttccgctccaagcgcaagaagctgcacatcactagcgaggacccaacttacaccgtgctctacctgggcaatgccaccaccatccaggcgcgcggcgacggctgcaccgaccttgctgtgggcaagatctggagcaagagcgaggcgggccgtcagggcaccaagatgaagctgacggtgagtgcgcagggtatccgcatggtgcacgccgaggagcgcgcgctgcgccgcccgggccacctctacctgctgcaccgcgtcacctactgcgtggccgacgcgcggctgcccaaggtcttcgcctgggtgtaccggcacgagctgaagcacaaggccgtgatgctgcgctgccacgccgtgctggtgtccaagcccgaaaaggcgcaggccatggccctgctgctctaccagacgtcggccaacgcgctggcggaatttaaacgcctcaagcggcgggacgacgcgcgtcaccagcagcaggagctggtgggcgcacacaccatcccgctagtgccgctgcgcaagctgctcctacacggaccctgctgctataaaccgccggtggagcgcagccgcagcgcgcccaagcttggctccatcaccgaggacctgctcggcgaacagctggagcaggagctgcaggaggaagaggaagaggagcaacccgagggctgcccggaggaggaggagaaccgtgcggcagagggagatccagcagaggaggaggccgaggcgcagcgtgcgctagtggtcgccatgcactttgagtgcggggacttgttggatactctggagaatggccgtggggaggcgctaggaggcggcgggggctccctgggcccgggggccgggccgccgcctctgctgctgggcagcgcctccgacatgaaggctgagctgtcgcaacttattagcgacctgggcgagctcagcttcggcaacgacgtgcgcaccctgcaggccgacttgcgggtgacgcgcctgctgtcaggcgacagcacgggcagcgagagctccatcgagggcgggggccctgacgccacctccgccaccgccggggactcgtcccgccaggccgacggcgccagtgcagacgagccccactcgggctgagctcctccgcgcgtcgccggcgctccaccgtggctacccatccgtggtcccgacaacctccctgtcccttgcccgcccccaggaagggggaaatggggcatttggggcccagacctacacttggagcccaggtccagcgttcccccgaccgctttcccctacctcccggcccccgctcccgccccagcacttttggctctgttgcgcgtggggatgcggggagatttgagaggggaaaaccccgccaggagggagagagaggcacccctctgggatgcgggtgagggaaggttggctgaagttcctagtctcaggccgtaggtgcctggccagtttcctgtttgtggggcagctggggcctgaggaggaggggttcacttcctcctcccaccccctgggagcggccctgcgctgtcactgacatctcattaaaaaaaaaaaaaaatttgctctcaaggtgtttgaggctttaatgcaaccctttagcccttggttctttttggtgcaagaattctggctgtttacctcagactcagacccctgaaatgttgccaaattcttcaaataactgtttggggggtggggggagatgaaagagagtcgcgttttgtttacagttaaagacatccaatatcttaaaaaggagttttcctttagaaacacacacacccttcctcttgctcaaaagatctcactccatgatactgtgtaaaatatttttgcactgttgtgaagtatttttgacttttttctgtacataactgtgttctcagagctgaatgtttatatcttttgctgtgcaaaagaaacatgtaaaatgttgttcagttgtatatacagaaatgtgtataaaacattttgttattttttaaaagtagcactgttctggttctgtttgcacgccagtggggagagaataaagaggaaaatttaacagaa

SEQ ID NO: 132700 - DNA, 2572 bp, Homo sapiens
  Payload ID: 5925
  Gene Symbol: FAM43B
  Gene Name: family with sequence similarity 43, member B
  Uniprot ID: Q6ZT52
  ENST ID: ENST00000332947
  CDS Start-End: 536-1525
agcctgcgtggggggaggggagaagagggcaaggggaggggacaagagagctagcggtcccgcccggtgatgtaggcagcccggggaggtggagccgcgacgcctgaaggagtccccaccgcagccgcgctctcggtctgccccactaagcagccgccagcggctccggcgacccaaattgcggcggcagggaccgcggaaatcccaccgtttgggcttggtggacgtccagcccacctcacccccagccccggcccctcctcgcttcccagacggctggagacactcccgggaaaagcggtcctcagccactcggccgccgtccgcacctcggctgctggcccggctgggcaccgggcatctgcgaagctagccctgcctggcactgggcatctccaggcaacgactgtccccggccctgcccagcttctcgcgactccagggcggtggacttctgcgcgccttccctcccccggtctcccgacaggacgccggtgagctccctgcgcccccagcccctttcgccgccgccgcgatgctgccctggagacgtaacaaattcgtgctggtggaggacgaggccaagtgcaaggcgaagagcctgagtccggggctcgcctacacgtcgctgctctccagcttcctgcgctcctgcccggacctgctgcccgactggccgctggagcgcttgggccgtgtgttccgcagccggcgccagaaagtggagctcaacaaggaggacccgacctacaccgtgtggtacctgggcaacgccgtcaccctgcacgccaagggcgacggctgcaccgacgacgccgtgggcaagatctgggctcgctgcgggcctggcgggggcactaagatgaagctgacgctggggccgcacggcatccgcatgcagccgtgcgagcgcagcgccgccgggggttcggggggccgcaggccggcgcacgcctacctgctgccgcgcatcacctactgcacggcggacgggcgccacccgcgcgtcttcgcctgggtctaccgccaccaggcgcgccacaaggccgtggtgctgcgctgccacgctgtgctgctggcgcgggcgcacaaggcgcgcgccctggcccgcctgctccgccagaccgcgctggcggccttcagcgacttcaagcgcctgcagcgccagagcgacgcgcgccacgtgcgccagcagcatctccgcgctgggggcgccgccgcctcggtgccccgcgccccactgcgccgcctgctcaatgccaagtgcgcctaccggccgccgccgagcgagcgcagccgcggggcgccgcgcctcagcagcatccaggaggaggacgaggaggaggaggaggacgacgcggaggagcaagagggaggagtcccccagcgcgagcggccggaggtgctcagcctggcccgggagctgaggacgtgcagcctgcggggcgccccggcgcccccgccgcccgcgcagccccgccgctggaaggccggccccagggagcgggcgggccaggcgcgctgagagccgaaggacaggactcgcagccccaggcccgacccgccagactcacagcctccaaccccggccctgcccgcttcggctgccccggcccccggcccgtgtctcccccgtggtctccgtgttgtccgccccgccgcctcattttggctcagggtgatgcctgatacgcccttggttattggggggtgttcctctctccccacacccggagtttcccgggcctgccattgtggacccgccccctatgctttacacctagtctctttgcccacagacctcctcattccctcccaaaacatcctctcaagagaagggaggagaagtttcaagaaatcaggaggggtgggtttggaccctgggcagggtggaggcagtgaccttgcccttggtccctctagccttcttccctgtgcaaaaaaaaatgaccctggagaggcattcttgtaggagaagaatctagcggccggggagaattggggccgggccggcggtgggcagagtccgctgctatacacacagggaggaattctcacgcccaagccccgcctctctacgccttggaggactcctgtgacttcactgctctgcctctggagaacactgggagagtcctaccgacgttcaaacaacaggttaggccaggtaacagccctgcaccaggccgctgcccacgcctctgccctggcacccccaggggattccttgcccatcccatctctctgcagacggatgtgtgtggccccctcctaggtgccccacaaccaggaccaagatggggctcccaaaggaggtaaggagaacctttggcaggtgcttaggacactgactacctagaaagtagacgcagcagagttgctcccaagtcgaggctcctcagagcaggtgggtcctgacagcagtggattctcccagcaggatgaggaaggagggtgtgttaaccaaccaagggagtgggccccccacccaggtgtctccgcaagaccacaaaaagcccaaagatctatgtgtcactgatcattgtaaataaagtggacctgcttttacagc

SEQ ID NO: 132701 - DNA, 1648 bp, Homo sapiens
  Payload ID: 5926
  Gene Symbol: FAM45A
  Gene Name: family with sequence similarity 45, member A
  Uniprot ID: Q8TCE6
  ENST ID: ENST00000361432
  CDS Start-End: 27-1100
agagctgcgcgccgcggcggcggaagatggctgcggccgaggtggcggacactcagctgatgcttggagtcgggctgatcgaaaaggacacaaatggagaagttctgtgggtgtggtgttatccttccacgacagccacattaaggaacctgctgctgagaaaatgctgccttacagatgaaaacaaacttctccatccctttgtctttggtcagtacagaagaacatggttttatatcacaacaattgaagttccagattcttccattttgaaaaaggtgactcatttttctattgtcctgaccgccaaagattttaacccagagaagtatgctgccttcactaggatattgtgtagaatgtacctgaaacatgggagcccagttaaaatgatggagagttatattgcagttctcacaaaggggatatgccagagtgaagaaaacggctctttccttagtaaggattttgatgcccgaaaggcctacctggctggctccatcaaagacattgtatctcagtttggaatggaaactgttatcttacacacagcactgatgctaaagaaaagaattgtggtgtatcaccccaagatagaagcggtccaggagttcaccaggactctgcctgccctggtgtggcaccgacaggactggaccatccttcactcttacgtgcacctcaacgccgatgagctggaagccctgcagatgtgcacaggttacgtcgctggatttgtagacttggaggtgagcaacagaccagacctctatgatgtgtttgtgaatctggcagagagtgagattaccattgctccccttgcaaaagaggccatggcaatgggcaaactgcacaaagaaatgggtcagctaattgttcagtctgcagaagatccagagaaatcagagagccacgttatacaggatattgctctaaaaacaagagaaatctttaccaacctagcaccgttttcagaagtttcggctgatggagaaaagagagtccttaatttggaggcgctaaagcaaaaacgatttccaccagcaacagaaaacttcctttatcatctagcagcagccgaacaaatgctgaaaatctgactgtgtgacagaacgtatcactgatgactgatagaaagccctctttcactctgattacccactcactacatgaagtcctgaaaataacagagaaactgttatatctttttaatgatttatttgcaagtattgagatttgacctgaaaaacaatgaaacacatgaacacacttccgattttctcctcgctgattagcttcctgcctgctgtcagtgctggacgaagtgctataactactttatgtaacattacagaacagctagaggtcctggggtaagagaaaaaaagcacatcacaacaaatgtgaaagccttcattattacacgttccagtttgtctcgctgtgtaggcataagctaatggtttattttcagaaagctgcctgaaacgttgctttgtattcttctaggaagaactttaattcctcctgaggaactctactttctgagccaaactgctaattttctgcggaactgtctagaagatcattcaagagaccctgcagttgcactttctcgtaaaagttaaaaaaaaaaaaaaaaaaaaaa

SEQ ID NO: 132702 - DNA, 2172 bp, Homo sapiens
  Payload ID: 5926
  Gene Symbol: FAM45A
  Gene Name: family with sequence similarity 45, member A
  ENST ID: ENST00000535029
  CDS Start-End: 45-710
gtcctgcaggcggcagccagagctgcgcgccgcggcggcggaagatggctgcggccgaggtggcggacactcagctgatgcttggagtcgggctgatcgaaaaggacacaaatggagaagttctgtgggtgtggtgttatccttccacgacagccacattaaggaacctgctgctgagaaaatgctgccttacagatgaaaacaaacttctccatccctttgtctttggtcagtacagaagaacatggttttatatcacaacaattgaagttccagattcttccattttgaaaaaggtgactcatttttctattgtcctgaccgccaaagattttaacccagagaagtatgctgccttcactaggatattgtgtagaatgtacctgaaacatgggagcccagttaaaatgatggagagttatattgcagttctcacaaaggggatatgccagagtgaagaaaacggctctttccttagtaaggattttgatgcccgaaaggcctacctggctggctccatcaaagacattgtatctcagtttggaatgaactgttatcttacacacagcactgatgctaaagaaaagaattgtggtgtatcaccccaagatagaagcggtccaggagttcaccaggactctgcctgccctggtgtggcaccgacaggactggaccatccttcactcttacgtgcacctcaacgccgatgagctggaagccctgcagatgtgcacaggttacgtcgctggatttgtagacttggaggtgagcaacagaccagacctctatgatgtgtttgtgaatctggcagagagtgagattaccattgctccccttgcaaaagaggccatggcaatgggcaaactgcacaaagaaatgggtcagctaattgttcagtctgcagaagatccagagaaatcagagagccacgttatacaggatattgctctaaaaacaagagaaatctttaccaacctagcaccgttttcagaagtttcggctgatggagaaaagagagtccttaatttggaggcgctaaagcaaaaacgatttccaccagcaacagaaaacttcctttatcatctagcagcagccgaacaaatgctgaaaatctgactgtgtgacagaacgtatcactgatgactgatagaaagccctctttcactctgattacccactcactacatgaagtcctgaaaataacagagaaactgttatatctttttaatgatttatttgcaagtattgagatttgacctgaaaaacaatgaaacacatgaacacacttccgattttctcctcgctgattagcttcctgcctgctgtcagtgctggacgaagtgctataactactttatgtaacattacagaacagctagaggtcctggggtaagagaaaaaaagcacatcacaacaaatgtgaaagccttcattattacacgttccagtttgtctcgctgtgtaggcataagctaatggtttattttcagaaagctgcctgaaacgttgctttgtattcttctaggaagaactttaattcctcctgaggaactctactttctgagccaaactgctaattttctgcggaactgtctagaagatcattcaagagaccctgcagttgcactttctcgtaaaagttaaaaaaaaaaaaaaaaaaaaaaggtttttcccggcctttgaacattttgcctatgagagttttgcatatattttatacttgagtagacaactttaataatccatatttatactatcgcagaagtaagcatttggcaaacgttcagccattagcactcatttaaccctgttagcaatattcttttgaaaaaagtgccagtccttatgtgataaactaagaagcccattgaatataaaagtgtgtaggactgaaacagtgaccttatattattgctaagggaatatgagattaacttcctacaggggccaaaaccagagaaaggcttccagcaacttcgatgaaagtagtttggccacatgtcaagccaattgtttgtactatttatgtacctttttcataactggaattgccaaataagcatggagatctaaatgatgtacttgttagtgtattcattcatattgactgtaaaggattatttttcactcagtactgatgtccttggaaatcttacctggaaacatgtttgc

SEQ ID NO: 132703 - DNA, 5609 bp, Homo sapiens
  Payload ID: 5927
  Gene Symbol: FAM46A
  Gene Name: family with sequence similarity 46, member A
  Uniprot ID: Q96IP4
  ENST ID: ENST00000320172
  CDS Start-End: 316-1644
aaaaaaagtactgaagacattttccccgcacaactgctaaagctccagagacacgagcgtgtgtggcagcaagagccgccagttcgggaccaccgcagctggggtggcagcggcgcaggaggggtcgcggggagggagtggtgagcgcaggcggcaggggtctgggaaagacgaagtcgctatttgctgtctgagcgcgctcgcagctcctggaagtgttgccgcctctcggtttcgctctcgctcgctgcgctcctagaaggggcggccgcctccaggactgaccagggccaagtggcgctcggcgggcactacatggcggagggtgaagggtacttcgccatgtctgaggacgagctggcctgcagcccctacatccccctaggcggcgacttcggcggcggcgacttcggcggcggcgacttcggcggcggcgacttcggcggtggcggcagcttcggtgggcattgcttggactattgcgaaagccctacggcgcactgcaatgtgctgaactgggagcaagtgcagcggctggacggcatcctgagcgagaccattccgattcacgggcgcggcaacttccccacgctcgagctgcagccgagcctgatcgtgaaggtggtgcggcggcgcctggccgagaagcgcattggcgtccgcgacgtgcgcctcaacggctcggcagccagccatgtcctgcaccaggacagcggcctgggctacaaggacctggacctcatcttctgcgccgacctgcgcggggaaggggagtttcagactgtgaaggacgtcgtgctggactgcctgttggacttcttacccgagggggtgaacaaagagaagatcacaccactcacgctcaaggaagcttatgtgcagaaaatggttaaagtgtgcaatgactctgaccgatggagtcttatatccctgtcaaacaacagtggcaaaaatgtggaactgaaatttgtggattccctccggaggcagtttgaattcagtgtagattcttttcaaatcaaattagactctcttctgctcttttatgaatgttcagagaacccaatgactgagacatttcaccccacaataatcggggagagcgtctatggcgatttccaggaagcctttgatcacctttgtaacaagatcattgccaccaggaacccagaggaaatccgagggggaggcctgcttaagtactgcaacctcttggtgaggggctttaggcccgcctctgatgaaatcaagacccttcaaaggtatatgtgttccaggtttttcatcgacttctcagacattggagagcagcagagaaaactggagtcctatttgcagaaccactttgtgggattggaagaccgcaagtatgagtatctcatgacccttcatggagtggtaaatgagagcacagtgtgcctgatgggacatgaaagaagacagactttaaaccttatcaccatgctggctatccgggtgttagctgaccaaaatgtcattcctaatgtggctaatgtcacttgctattaccagccagccccctatgtagcagatgccaactttagcaattactacattgcacaggttcagccagtattcacgtgccagcaacagacctactccacttggctaccctgcaattaagaatcatttaaaaatgtcctgtggggaagccatttcagacaagacaggagagaaaaaaaaaaaaaagaaaaaaaaaagagtgatccagcccttattagggatgtgttttgtgcaatgatgatatgctcctggttttaagtttggcaaagcttatgtatcttttaatagatgtgggagcatgatctcgaaaggatccttttcccttctcttattctcctacccaattggattctatcctgcaaaaaaagagagacctgtcattagaagcaaccaggttctcctgatacaagagaagaaatgtgtgatgacaatatgggtttgctgtatctgctcccatagctttgccataggaaaaaaaaaagtggaaagtttcttttaagatggaattcataaaagggaaaatacggaggaaaaaaggtctcactccaacttgtgaatcagtttaggagttcagatattaatagtaacaatacaggaaaaaggggaactccaacgttgggattactgtctgaggcttgtagcaagtgctttctgtggaatgatcttgttttgctaacaaacggcttgctccaaatgaacagtagtaggttggtgcagttctcgtaacaatcagcagaacttatgatgacacaatccattaattccagctgcgtgcatagatcacatttttaaaatgtaaaaatgcaagcaaaaacagctgtaacaaagaaagtgtgctcaaggaccaaagatttaacagataaaaatacccaattagaagagatatagtagactatatgaagagagattatatttgttacacaccaatatacatcaaagtgcctgttgccttctgaaaatttgaagtggcaaaattattttatggtttaatgattattttattttatcagggactgcctcaagaagaaaataacataagcttgtgaatggtggagaaaatgccctattttttcttgcaaatacttgtataaagttaacatttgttgatctgatattatcataggtacatgtgtatgtgtgtataaattatatgtgtgtgtgtatatatacattttatatatacattttatatgtatatatacacagtagattgactatgatctagaataatgtctcaaataggaaatgtttaaatactgtgtgtttttatgttttcaacaggataacatgagacgtgggcatattgcaatgatgaattaaatccacatctaaaaaaattaaatgaaggagggaaccaagtaatatatttcataggaagagcagaaattatactgttttagtgggatttttttttctttttttttttttctttggtgagccataaaattccacaaatgggagaatatttgtttggcagagcactcttttttatattgaactgccattttgacagttggaacccatttattaaaaaaaaaattgcattcctctatgatgtttaatctagtggatcatggatcagtaataggctacttaaatccctgactgctaaaaaggatttccggtgatctaaacactacttgctaatgtttaaatgaattttaatgaatgcattctgcatttctggaccactagaatttagtaatgtgaaatgaccctttttacagaatatttgcacaattgcttaaaatttatatatgagatatatattatatataacattttataaatcatgtcaatatgaaacatctttgatctggttgtcacactgcatttaaatatttagtactgtactttaaatcgctttccattaaatcaaatccaactttattttctttcttacaaaaataccagttatacctttgtgaaatgaactggcattactatttcagttcaataacagctaatcctaaaaccaccctttctcctagccagtagttcctctagatactggtctctgaaaatgcatttgttaaaaacaaaacaaaactaacacataagaaccttccctttgtgttgtgaaacaaccacataatctccacaaccttagtggatgactgcttgctatgataattcctcgaagacccaattagaagattttcatcatcagttaaagagagaccacgggagaaaaaaatatcctcctgttggcagtataatttgtttgtttgtttatctagggatcctcagatgcttagtgctaggttaatccaggttaatccgtctggactaccttttgtgcatctttctttgaagccttaatgggaacctgatgggtttgctgtagcagcttccttgtgaattctgtcagagctgcaacagccgctgcactgccactcagttttctaaggaactcctcctactaccatcttggctcagtctccctcacttaagccctgggtttgaaaaattaattgcaacttcccaggaaacattgttcagtttgcagattaagcctggcactcacctatcagaaaccagagctccgcctgcttagttgtttcaaagttttctgaaagaaaactaggggagcacttgtgaacacaggagcagctggtgatctgctttcttaccctaactcttgacaaatgagtcgtctactattttaaagagtctggaggtctctgactctgccataacaataacctgctgttaatttataacacagatttttgtttggaagagccttatttgaaatacactttgatttattttcttaaatatttatattcttttcttgcttacttcagggttggtagcttagttggaagtgccagcacctggcacctattcatatagaacaggctgtactcaagacaacttctagcatttactttaagacttatataatttatttctattttgtgtgtactatagtcttgtgcatatgtagttgaacacacagtgaaatatatgtctctctttgtggatgtgcggcctaaaaatttgaatgtctggtgagagagagccatgtgtataggtcagagaaaagaacagctcccgactccctattagcgcctgtgatttgtttccttttgtgtttatctggcctagtgtgctgtttctttaaaccaggaagaagttttgtcttttggaggctcttctcacctgtccagcctggcatgtcagagaacacatagcctgtgacaatgccgtttttaaaggtttacttaatttgcagtaaatccagctgcctcaagaactcctacaccaagatggacatttcctttccagaaatgggatcaagtatctgctcactttggtattggatggactaataatgtagctccaaaaatgcaaggatggaagaatatgtgtaatccaaaccaaggaaggaaatgaaaagtgaacgtactgtttttaccacccctttctgtttgcttattgttggttgcttcactgtgcataaagttgttttcaatgcaacgcttgttaaataaatattgtgaactattttgtaaatgaaatgtattatgttgaaagctgtcagttcaaaaataagcttttttgttgttgttgaagatgaagtgtgttaggtgaaaccaaaaagccaaaaaaagtaatttcatatatagcatctatttgaatataatctttctttaaaatttcttttagcatagcattttcagtgctaagaaagaatctctatgttatattttgttaaaataatggctttctaacaaagcaaatggtaaagtacaaagttggaagatgtcaagttaacgagacttgctgcaaagccttgcagaacggaggaggctctgcctgctggctgtctctccctccaacctctctacaatcatgcctgctttgaggtgttctgttgcagcaagctgcaccttgggtcactcttttggaatattttgactataggctgcgtcacaggcagaaaaggagttgatggaaaatggactaaaaaactgacatgtttgaatcagtgctagagggaacagattgtgaattttgtttacagcatccaatatttggatttttttgtaaataaaaaagttatttttttctattga

SEQ ID NO: 132704 - DNA, 5664 bp, Homo sapiens
  Payload ID: 5927
  Gene Symbol: FAM46A
  Gene Name: family with sequence similarity 46, member A
  Uniprot ID: Q96IP4
  ENST ID: ENST00000369754
  CDS Start-End: 314-1699
aaaaaaagtactgaagacattttccccgcacaactgctaaagctccagagacacgagcgtgtgtggcagcaagagccgccagttcgggaccaccgcagctggggtggcagcggcgcaggaggggtcgcggggagggagtggtgagcgcaggcggcaggggtctgggaaagacgaagtcgctatttgctgtctgagcgcgctcgcagctcctggaagtgttgccgcctctcggtttcgctctcgctcgctgcgctcctagaaggggcggccgcctccaggtgacacagacgggactctcgcttgcgctttccagatgcatcagagatacttttggactgaccagggccaagtggcgctcggcgggcactacatggcggagggtgaagggtacttcgccatgtctgaggacgagctggcctgcagcccctacatccccctaggcggcgacttcggcggcggcgacttcggcggcggcgacttcggcggcggcgacttcggcggtggcggcagcttcggtgggcattgcttggactattgcgaaagccctacggcgcactgcaatgtgctgaactgggagcaagtgcagcggctggacggcatcctgagcgagaccattccgattcacgggcgcggcaacttccccacgctcgagctgcagccgagcctgatcgtgaaggtggtgcggcggcgcctggccgagaagcgcattggcgtccgcgacgtgcgcctcaacggctcggcagccagccatgtcctgcaccaggacagcggcctgggctacaaggacctggacctcatcttctgcgccgacctgcgcggggaaggggagtttcagactgtgaaggacgtcgtgctggactgcctgttggacttcttacccgagggggtgaacaaagagaagatcacaccactcacgctcaaggaagcttatgtgcagaaaatggttaaagtgtgcaatgactctgaccgatggagtcttatatccctgtcaaacaacagtggcaaaaatgtggaactgaaatttgtggattccctccggaggcagtttgaattcagtgtagattcttttcaaatcaaattagactctcttctgctcttttatgaatgttcagagaacccaatgactgagacatttcaccccacaataatcggggagagcgtctatggcgatttccaggaagcctttgatcacctttgtaacaagatcattgccaccaggaacccagaggaaatccgagggggaggcctgcttaagtactgcaacctcttggtgaggggctttaggcccgcctctgatgaaatcaagacccttcaaaggtatatgtgttccaggtttttcatcgacttctcagacattggagagcagcagagaaaactggagtcctatttgcagaaccactttgtgggattggaagaccgcaagtatgagtatctcatgacccttcatggagtggtaaatgagagcacagtgtgcctgatgggacatgaaagaagacagactttaaaccttatcaccatgctggctatccgggtgttagctgaccaaaatgtcattcctaatgtggctaatgtcacttgctattaccagccagccccctatgtagcagatgccaactttagcaattactacattgcacaggttcagccagtattcacgtgccagcaacagacctactccacttggctaccctgcaattaagaatcatttaaaaatgtcctgtggggaagccatttcagacaagacaggagagaaaaaaaaaaaaaagaaaaaaaaaagagtgatccagcccttattagggatgtgttttgtgcaatgatgatatgctcctggttttaagtttggcaaagcttatgtatcttttaatagatgtgggagcatgatctcgaaaggatccttttcccttctcttattctcctacccaattggattctatcctgcaaaaaaagagagacctgtcattagaagcaaccaggttctcctgatacaagagaagaaatgtgtgatgacaatatgggtttgctgtatctgctcccatagctttgccataggaaaaaaaaaagtggaaagtttcttttaagatggaattcataaaagggaaaatacggaggaaaaaaggtctcactccaacttgtgaatcagtttaggagttcagatattaatagtaacaatacaggaaaaaggggaactccaacgttgggattactgtctgaggcttgtagcaagtgctttctgtggaatgatcttgttttgctaacaaacggcttgctccaaatgaacagtagtaggttggtgcagttctcgtaacaatcagcagaacttatgatgacacaatccattaattccagctgcgtgcatagatcacatttttaaaatgtaaaaatgcaagcaaaaacagctgtaacaaagaaagtgtgctcaaggaccaaagatttaacagataaaaatacccaattagaagagatatagtagactatatgaagagagattatatttgttacacaccaatatacatcaaagtgcctgttgccttctgaaaatttgaagtggcaaaattattttatggtttaatgattattttattttatcagggactgcctcaagaagaaaataacataagcttgtgaatggtggagaaaatgccctattttttcttgcaaatacttgtataaagttaacatttgttgatctgatattatcataggtacatgtgtatgtgtgtataaattatatgtgtgtgtgtatatatacattttatatatacattttatatgtatatatacacagtagattgactatgatctagaataatgtctcaaataggaaatgtttaaatactgtgtgtttttatgttttcaacaggataacatgagacgtgggcatattgcaatgatgaattaaatccacatctaaaaaaattaaatgaaggagggaaccaagtaatatatttcataggaagagcagaaattatactgttttagtgggatttttttttctttttttttttttctttggtgagccataaaattccacaaatgggagaatatttgtttggcagagcactcttttttatattgaactgccattttgacagttggaacccatttattaaaaaaaaaattgcattcctctatgatgtttaatctagtggatcatggatcagtaataggctacttaaatccctgactgctaaaaaggatttccggtgatctaaacactacttgctaatgtttaaatgaattttaatgaatgcattctgcatttctggaccactagaatttagtaatgtgaaatgaccctttttacagaatatttgcacaattgcttaaaatttatatatgagatatatattatatataacattttataaatcatgtcaatatgaaacatctttgatctggttgtcacactgcatttaaatatttagtactgtactttaaatcgctttccattaaatcaaatccaactttattttctttcttacaaaaataccagttatacctttgtgaaatgaactggcattactatttcagttcaataacagctaatcctaaaaccaccctttctcctagccagtagttcctctagatactggtctctgaaaatgcatttgttaaaaacaaaacaaaactaacacataagaaccttccctttgtgttgtgaaacaaccacataatctccacaaccttagtggatgactgcttgctatgataattcctcgaagacccaattagaagattttcatcatcagttaaagagagaccacgggagaaaaaaatatcctcctgttggcagtataatttgtttgtttgtttatctagggatcctcagatgcttagtgctaggttaatccaggttaatccgtctggactaccttttgtgcatctttctttgaagccttaatgggaacctgatgggtttgctgtagcagcttccttgtgaattctgtcagagctgcaacagccgctgcactgccactcagttttctaaggaactcctcctactaccatcttggctcagtctccctcacttaagccctgggtttgaaaaattaattgcaacttcccaggaaacattgttcagtttgcagattaagcctggcactcacctatcagaaaccagagctccgcctgcttagttgtttcaaagttttctgaaagaaaactaggggagcacttgtgaacacaggagcagctggtgatctgctttcttaccctaactcttgacaaatgagtcgtctactattttaaagagtctggaggtctctgactctgccataacaataacctgctgttaatttataacacagatttttgtttggaagagccttatttgaaatacactttgatttattttcttaaatatttatattcttttcttgcttacttcagggttggtagcttagttggaagtgccagcacctggcacctattcatatagaacaggctgtactcaagacaacttctagcatttactttaagacttatataatttatttctattttgtgtgtactatagtcttgtgcatatgtagttgaacacacagtgaaatatatgtctctctttgtggatgtgcggcctaaaaatttgaatgtctggtgagagagagccatgtgtataggtcagagaaaagaacagctcccgactccctattagcgcctgtgatttgtttccttttgtgtttatctggcctagtgtgctgtttctttaaaccaggaagaagttttgtcttttggaggctcttctcacctgtccagcctggcatgtcagagaacacatagcctgtgacaatgccgtttttaaaggtttacttaatttgcagtaaatccagctgcctcaagaactcctacaccaagatggacatttcctttccagaaatgggatcaagtatctgctcactttggtattggatggactaataatgtagctccaaaaatgcaaggatggaagaatatgtgtaatccaaaccaaggaaggaaatgaaaagtgaacgtactgtttttaccacccctttctgtttgcttattgttggttgcttcactgtgcataaagttgttttcaatgcaacgcttgttaaataaatattgtgaactattttgtaaatgaaatgtattatgttgaaagctgtcagttcaaaaataagcttttttgttgttgttgaagatgaagtgtgttaggtgaaaccaaaaagccaaaaaaagtaatttcatatatagcatctatttgaatataatctttctttaaaatttcttttagcatagcattttcagtgctaagaaagaatctctatgttatattttgttaaaataatggctttctaacaaagcaaatggtaaagtacaaagttggaagatgtcaagttaacgagacttgctgcaaagccttgcagaacggaggaggctctgcctgctggctgtctctccctccaacctctctacaatcatgcctgctttgaggtgttctgttgcagcaagctgcaccttgggtcactcttttggaatattttgactataggctgcgtcacaggcagaaaaggagttgatggaaaatggactaaaaaactgacatgtttgaatcagtgctagagggaacagattgtgaattttgtttacagcatccaatatttggatttttttgtaaataaaaaagttatttttttctattga

SEQ ID NO: 132705 - DNA, 5537 bp, Homo sapiens
  Payload ID: 5927
  Gene Symbol: FAM46A
  Gene Name: family with sequence similarity 46, member A
  ENST ID: ENST00000369756
  CDS Start-End: 1-1572
atgcagatgaggagggtgtggcgaacgtgccgctctgggccccggaagcgcagagaagcccggtataaaaaaagtactgaagacattttccccgcacaactgctaaagctccagagacacgagcgtgtgtggcagcaagagccgccagttcgggaccaccgcagctggggtggcagcggcgcaggaggggtcgcggggagggagtggactgaccagggccaagtggcgctcggcgggcactacatggcggagggtgaagggtacttcgccatgtctgaggacgagctggcctgcagcccctacatccccctaggcggcgacttcggcggcggcgacttcggcggcggcgacttcggcggcggcgacttcggcggtggcggcagcttcggtgggcattgcttggactattgcgaaagccctacggcgcactgcaatgtgctgaactgggagcaagtgcagcggctggacggcatcctgagcgagaccattccgattcacgggcgcggcaacttccccacgctcgagctgcagccgagcctgatcgtgaaggtggtgcggcggcgcctggccgagaagcgcattggcgtccgcgacgtgcgcctcaacggctcggcagccagccatgtcctgcaccaggacagcggcctgggctacaaggacctggacctcatcttctgcgccgacctgcgcggggaaggggagtttcagactgtgaaggacgtcgtgctggactgcctgttggacttcttacccgagggggtgaacaaagagaagatcacaccactcacgctcaaggaagcttatgtgcagaaaatggttaaagtgtgcaatgactctgaccgatggagtcttatatccctgtcaaacaacagtggcaaaaatgtggaactgaaatttgtggattccctccggaggcagtttgaattcagtgtagattcttttcaaatcaaattagactctcttctgctcttttatgaatgttcagagaacccaatgactgagacatttcaccccacaataatcggggagagcgtctatggcgatttccaggaagcctttgatcacctttgtaacaagatcattgccaccaggaacccagaggaaatccgagggggaggcctgcttaagtactgcaacctcttggtgaggggctttaggcccgcctctgatgaaatcaagacccttcaaaggtatatgtgttccaggtttttcatcgacttctcagacattggagagcagcagagaaaactggagtcctatttgcagaaccactttgtgggattggaagaccgcaagtatgagtatctcatgacccttcatggagtggtaaatgagagcacagtgtgcctgatgggacatgaaagaagacagactttaaaccttatcaccatgctggctatccgggtgttagctgaccaaaatgtcattcctaatgtggctaatgtcacttgctattaccagccagccccctatgtagcagatgccaactttagcaattactacattgcacaggttcagccagtattcacgtgccagcaacagacctactccacttggctaccctgcaattaagaatcatttaaaaatgtcctgtggggaagccatttcagacaagacaggagagaaaaaaaaaaaaaagaaaaaaaaaagagtgatccagcccttattagggatgtgttttgtgcaatgatgatatgctcctggttttaagtttggcaaagcttatgtatcttttaatagatgtgggagcatgatctcgaaaggatccttttcccttctcttattctcctacccaattggattctatcctgcaaaaaaagagagacctgtcattagaagcaaccaggttctcctgatacaagagaagaaatgtgtgatgacaatatgggtttgctgtatctgctcccatagctttgccataggaaaaaaaaaagtggaaagtttcttttaagatggaattcataaaagggaaaatacggaggaaaaaaggtctcactccaacttgtgaatcagtttaggagttcagatattaatagtaacaatacaggaaaaaggggaactccaacgttgggattactgtctgaggcttgtagcaagtgctttctgtggaatgatcttgttttgctaacaaacggcttgctccaaatgaacagtagtaggttggtgcagttctcgtaacaatcagcagaacttatgatgacacaatccattaattccagctgcgtgcatagatcacatttttaaaatgtaaaaatgcaagcaaaaacagctgtaacaaagaaagtgtgctcaaggaccaaagatttaacagataaaaatacccaattagaagagatatagtagactatatgaagagagattatatttgttacacaccaatatacatcaaagtgcctgttgccttctgaaaatttgaagtggcaaaattattttatggtttaatgattattttattttatcagggactgcctcaagaagaaaataacataagcttgtgaatggtggagaaaatgccctattttttcttgcaaatacttgtataaagttaacatttgttgatctgatattatcataggtacatgtgtatgtgtgtataaattatatgtgtgtgtgtatatatacattttatatatacattttatatgtatatatacacagtagattgactatgatctagaataatgtctcaaataggaaatgtttaaatactgtgtgtttttatgttttcaacaggataacatgagacgtgggcatattgcaatgatgaattaaatccacatctaaaaaaattaaatgaaggagggaaccaagtaatatatttcataggaagagcagaaattatactgttttagtgggatttttttttctttttttttttttctttggtgagccataaaattccacaaatgggagaatatttgtttggcagagcactcttttttatattgaactgccattttgacagttggaacccatttattaaaaaaaaaattgcattcctctatgatgtttaatctagtggatcatggatcagtaataggctacttaaatccctgactgctaaaaaggatttccggtgatctaaacactacttgctaatgtttaaatgaattttaatgaatgcattctgcatttctggaccactagaatttagtaatgtgaaatgaccctttttacagaatatttgcacaattgcttaaaatttatatatgagatatatattatatataacattttataaatcatgtcaatatgaaacatctttgatctggttgtcacactgcatttaaatatttagtactgtactttaaatcgctttccattaaatcaaatccaactttattttctttcttacaaaaataccagttatacctttgtgaaatgaactggcattactatttcagttcaataacagctaatcctaaaaccaccctttctcctagccagtagttcctctagatactggtctctgaaaatgcatttgttaaaaacaaaacaaaactaacacataagaaccttccctttgtgttgtgaaacaaccacataatctccacaaccttagtggatgactgcttgctatgataattcctcgaagacccaattagaagattttcatcatcagttaaagagagaccacgggagaaaaaaatatcctcctgttggcagtataatttgtttgtttgtttatctagggatcctcagatgcttagtgctaggttaatccaggttaatccgtctggactaccttttgtgcatctttctttgaagccttaatgggaacctgatgggtttgctgtagcagcttccttgtgaattctgtcagagctgcaacagccgctgcactgccactcagttttctaaggaactcctcctactaccatcttggctcagtctccctcacttaagccctgggtttgaaaaattaattgcaacttcccaggaaacattgttcagtttgcagattaagcctggcactcacctatcagaaaccagagctccgcctgcttagttgtttcaaagttttctgaaagaaaactaggggagcacttgtgaacacaggagcagctggtgatctgctttcttaccctaactcttgacaaatgagtcgtctactattttaaagagtctggaggtctctgactctgccataacaataacctgctgttaatttataacacagatttttgtttggaagagccttatttgaaatacactttgatttattttcttaaatatttatattcttttcttgcttacttcagggttggtagcttagttggaagtgccagcacctggcacctattcatatagaacaggctgtactcaagacaacttctagcatttactttaagacttatataatttatttctattttgtgtgtactatagtcttgtgcatatgtagttgaacacacagtgaaatatatgtctctctttgtggatgtgcggcctaaaaatttgaatgtctggtgagagagagccatgtgtataggtcagagaaaagaacagctcccgactccctattagcgcctgtgatttgtttccttttgtgtttatctggcctagtgtgctgtttctttaaaccaggaagaagttttgtcttttggaggctcttctcacctgtccagcctggcatgtcagagaacacatagcctgtgacaatgccgtttttaaaggtttacttaatttgcagtaaatccagctgcctcaagaactcctacaccaagatggacatttcctttccagaaatgggatcaagtatctgctcactttggtattggatggactaataatgtagctccaaaaatgcaaggatggaagaatatgtgtaatccaaaccaaggaaggaaatgaaaagtgaacgtactgtttttaccacccctttctgtttgcttattgttggttgcttcactgtgcataaagttgttttcaatgcaacgcttgttaaataaatattgtgaactattttgtaaatgaaatgtattatgttgaaagctgtcagttcaaaaataagcttttttgttgttgttgaagatgaagtgtgttaggtgaaaccaaaaagccaaaaaaagtaatttcatatatagcatctatttgaatataatctttctttaaaatttcttttagcatagcattttcagtgctaagaaagaatctctatgttatattttgttaaaataatggctttctaacaaagcaaatggtaaagtacaaagttggaagatgtcaagttaacgagacttgctgcaaagccttgcagaacggaggaggctctgcctgctggctgtctctccctccaacctctctacaatcatgcctgctttgaggtgttctgttgcagcaagctgcaccttgggtcactcttttggaatattttgactataggctgcgtcacaggcagaaaaggagttgatggaaaatggactaaaaaactgacatgtttgaatcagtgctagagggaacagattgtgaattttgtttacagcatccaatatttggatttttttgtaaataaaaaagttatttttttctattga

SEQ ID NO: 132706 - DNA, 546 bp, Homo sapiens
  Payload ID: 5927
  Gene Symbol: FAM46A
  Gene Name: family with sequence similarity 46, member A
  ENST ID: ENST00000412306
  CDS Start-End: 1-265
gaagcgcattggcgtccgcgacgtgcgcctcaacggctcggcagccagccatgtcctgcaccaggacagcggcctgggctacaaggacctggacctcatcttctgcgccgacctgcgcggggaaggggagtttcagactgtgaaggacgtcgtgctggactgcctgttggacttcttacccgagggggtgaacaaagagaagatcacaccactcacgctcaaggaagaaagtcacacaaccacatattttctgaacataagctgaacttctacttccatggagtgagttacttcacctcattggcaaaagacaacagaagagtccaaagtctgaggggactgggcaagcttctgtcacatgctttcagaatgaagacaatctgcaagaattttaagttgtgacctctacagagaaaagaatgaaaagtagccaaatctccacatgagagattttggactattttgcagtgtaaaccccatctgatttatatgaagtaagcagactttctctccaagagttcaaaataaattaattctaatgctaaa

SEQ ID NO: 132707 - DNA, 356 bp, Homo sapiens
  Payload ID: 5927
  Gene Symbol: FAM46A
  Gene Name: family with sequence similarity 46, member A
  ENST ID: ENST00000423467
  CDS Start-End: 1-260
accaggacagcggcctgggctacaaggacctggacctcatcttctgcgccgacctgcgcggggaaggggagtttcagactgtgaaggacgtcgtgctggactgcctgttggacttcttacccgagggggtgaacaaagagaagatcacaccactcacgctcaaggtttttcatcgacttctcagacattggagagcagcagagaaaactggagtcctatttgcagaaccactttgtgggattggaagaccgcaagtatgagtatctcatgacccttcatggagtggtaaatgagagcacagtgtgcctgatgggacatgaaagaagacagactttaaaccttatcaccatgctggc

SEQ ID NO: 132708 - DNA, 2368 bp, Homo sapiens
  Payload ID: 5928
  Gene Symbol: FAM46B
  Gene Name: family with sequence similarity 46, member B
  Uniprot ID: Q96A09
  ENST ID: ENST00000289166
  CDS Start-End: 167-1444
gttagtcgtcgccgtctgaggtgttccctggctttgtctcgccgtcgttgccgccccgtccctgccttcgtgccccccgccttggcccctgcccagccgctctccctgtcctcctccccttaaccacccccacggtttctgccgtcggggcccgggggccgggcggatgatgccgtcggagagcggagctgagcgcagggaccgggcggctgctcaggtggggacggctgcggccacggcggtggccacggcagccccggcaggcggcggccccgacccggaggccttatcggccttccccggacggcacctgagtgggctgagctggccacaggtgaagcgactggacgctcttctgagcgagccgattcccattcacgggcgcggcaacttccccacgctgagcgtgcagccccggcagatcgtgcaggtggtccgcagcaccctggaggagcagggactacatgtgcacagtgtgcggctgcatggttcagctgccagccacgtgctgcaccctgagagtggcctgggctacaaggatctggacctggtgttccgggtggacctgcgcagtgaggcatccttccagctgaccaaggcagtggtgctggcctgcctactagacttcctgccggccggtgtgagccgggccaagatcacgccactgacactcaaggaggcatacgtgcagaagctggtgaaagtgtgcacagactcggaccgctggagcctcatctcactgtccaacaagagcggcaagaacgtggagctcaagtttgtggactcggtgagacgccagtttgaattcagcatagactccttccagatcatcctggactccctgttgctctttggccagtgctcgtccactcccatgtctgaggccttccacccaacggtcacaggcgaaagcctgtacggggacttcaccgaggccctggagcacctgcggcaccgtgtcatcgccacgcgcagtcccgaggagatccgaggtggtggcctcctcaagtactgccacctcctggtgcggggcttccggccccggcccagcaccgatgtgcgcgccctgcagcgctacatgtgctcccgcttcttcatcgactttccagacctggtggagcagcggcgcaccctagagcgctacctggaggcccacttcggtggggcagatgcagcccgccgttacgcctgcctggtgacactgcaccgggtggtcaacgagagcaccgtgtgcctcatgaaccacgagcgccgccagacgctggacctcattgccgcactggcgctgcaggcactggctgagcagggcccagctgccactgccgccctggcctggcgccctccaggcactgacggggttgtgccagccactgtcaattactacgtgacccccgtgcaacctctcctggctcacgcctatcccacctggctgccttgtaactgactcagaccctggccagaagggaagggactgggcctcacggggtggggtggggcctccaagagtgtgtggaggacatgaccagaggcgcagaatgtgccaggaggcccagcactgcagggttgggcctttgattgaacagaccagactttcccgagcacgaggcccctgtgggcttaatgccagcctggggctctcagcaggaggaccctttggttattgcatcacacttttggaccagcatgccggtggggtgcaggcgccatttgtcttggaagtcaatttccttcaggagacaaagcaagtttggggtggtagccttaatgcccagcaccttggattgattcccatggtctaagagggtctttttgactaaggccagcctgtggtgatcccagcagctttggagggcctgcagcccacacactgactgatacatggtatgttacagggacttgtcactttggatcaggctgggccactacagggcctgatgggccaacttgggtaatcactgggaggagggaaactgaggcccgaggcagatacctgggtttggggagggctgggtttagcccggttctctgaactacatacccccagctgtgaagccttcctcttgaggggttgaggtgggcagtatacaggagccaagcagcccagggtgggtcgcagcccaggccccttccagggtgccactcctttcccccttgtgttgcaaggagccctcctgcctgggagcttgttctttggaaggtgctgagcctgaatttgccacagtcaagtcaacgttcccaccccactggcttggttacagggctctcacatggggtaggggagccatactcccacccccttgcgtattcccctgggtttgttgatattttgcactcttaacacctgccaataaagacggtctacactgaa

SEQ ID NO: 132709 - DNA, 5751 bp, Homo sapiens
  Payload ID: 5929
  Gene Symbol: FAM46C
  Gene Name: family with sequence similarity 46, member C
  Uniprot ID: Q5VWP2
  ENST ID: ENST00000369448
  CDS Start-End: 248-1423
ccgaggggactggctccgccacgccccgcccctggctcccccgggagggcggctcaggggcggggacgggggcgtggtcccgccgtataagaacggagggggcggcggcgggacggctcactcggtgccgctgcctaggggctgtagaggtcgcgccgctcctgctggggcctgcccacgccaaggacctgcctctgtcgcctcctcttctattgcccagtttccccagccagaacatcccctgaagatggcagaggagagcagctgtaccagggattgcatgtccttcagcgtgctcaactgggatcaggttagccggctgcatgaggtcctcactgaagttgtacctatccacggacgaggcaactttccaaccttggagataactctgaaggacatcgtccagaccgtccgcagtcggctggaggaggcaggcatcaaagtgcacgacgtccggctgaatggctccgcagctggccacgttttggtcaaagacaatggcttgggctgcaaagacctggacctaatcttccatgtggctcttccaacagaggcagaatttcagctggttagagatgtggttctgtgttcccttctgaacttcctgccagagggtgtgaacaagctcaaaatcagtccagtcactctgaaggaggcatatgtgcagaagctagtgaaggtttgcacggacactgaccgctggagcctgatctccctctccaacaagaacgggaagaacgtggagctgaagtttgtcgactccattcggcgtcagtttgagttcagtgtggactctttccaaatcatcctggattctttgcttttcttctatgactgttccaataatcccatctctgagcacttccaccccaccgtgattggggagagcatgtacggggactttgaggaagcttttgaccatctgcagaacagactgatcgccaccaagaacccagaagaaatcagaggcgggggacttctcaagtacagcaaccttcttgtgcgggacttcaggcccacagaccaggaagaaatcaaaactctagagcgctacatgtgctccaggttcttcatcgacttcccggacatccttgaacagcagaggaagttggagacttaccttcaaaaccacttcgctgaagaagagagaagcaagtacgactacctcatgatccttcgcagggtggtgaacgagagcaccgtgtgtctcatggggcatgaacgcaggcagactctgaacctcatctccctcctggccttgcgtgtgctggcggaacaaaacatcatccccagtgccaccaacgtcacctgttactaccagccggccccttacgtcagtgatggcaacttcagcaactactacgttgcccatcctccagtcacctacagccagccttaccctacctggctgccctgtaactaaccttgagacctgagggtttccacagtgggaaccccaatagggctagggctctcaggtaggggagcctccttctagatgtaggcatttggcttttaaaggggaactcagctctgattctgcttttttttttttttttcctttgtgtacccattggaatgggtctacagtgtatcatgagccaaccctcaaaggacccgtattacagtgccacgttggaaaacgctacaggaagcatgacctatccacatctttccaagatagacactaacatgtcatgtcccaaacattagcacgtgggggttgagctctgtgcagtaatcgagattgggagaatttgggcagcgcgtgagaagtgctaagctacttgttttctcacttgagcccgggtaggctgtgttggccctcacttgggattctcagcagttacatgaaagttgtgctgataatctcttctcttgtaccaattttagtcaggcagaaaatggtaaacatgagggtgctcttgtgacttaatttttgttcaagggactaaattgcttatgtttattccctgtcagcggagtggagaatgtcattcatcaataaaccaaagccaatagctggagaattgagatctggttgaaagtggtttatggtttacatgctgtactatcctgaggaattgcgagatattgctgaggggaaaaaaaaatgaccttttcttgaaatgtaacttgaaaacaaaataaaatgtggaacataatgtttaattagaattgtggtggtggtagtggaaggggataattgtaaataggaaacatgaatgttcatttttttctttaaagaattcttattaaatggctccctgccttttttttcttttttcctcatcagctctttcatggctgaattttgttttattcttcctaagactgaggattgtgctgagtccagagtcattgtggtaactgacatgagggtcttcccatgttttaactggaaacccactttggtcacattccaagtatgacacagctgttcttctggagtactttagctattttttgtttttgttcttttcgttttttttttttccaaaaatagtgacttccttctccaggtgtgtttgacagcaactcaattcaggaatttcggtagaactgagtgacctgtggaactgctttagaatctaacctgctgtcttcgtgctctgtgtgaaggggaagctggggggttagcatgaagtctggccttgtgtgcattggagcttccaaggcactttgaaatcattccagtatatttgggaagaattgagtgaatgagaatgctcttccttattctggtagatttgacttgtttataattctgcactttagaagaaaaacagtgttaatctgtagttgaaagaaagcttagtagatgagagagttctaggctactgtggctttttccagtagatttagatgagattatgtgttttgaaatgttttgtgggatcccttagaaagcatcacttcagggcagagacactcaatattgccagccagcttgggttctaaagtgatttaatcaaattcatgctcctgatcttttttttcccccttcctttggctatgaaaacccaaagcccggagtgattgttttctccttgctttaagcagtgaagttatcctaatgcaaaagagcttagtagaaaatgagtggtttacctttttttctaaaagtatattttcaagtttattctggaatgtgatgtcttggtcctcttaaaagcagatcagccatgactgaaactcaaggcttagctggtatctatgttgtgctacattaggtgactagaagccacttcttagtgtaatcagctcctgtttccctgtgagccttagttatattttaattcagtggctttgagtcaaggccggttctaattgaggggacccagtgtgcttcagtgttaagagtggggcaatgaagagtgaaccccaatgaagagtgatcccaactttggaaactatctggtcattcatgaccttaaaaagctgccatggtggtcaaatggcatgtgtttgcacaaaaatgaccgatgtgtttaaccaaagctttgaaatgtgatgaagccaccaacataagcacttgcctaacagaaatcagtatttcttctacttagaaggcttggggcccagggtaatgaggcaccagatgaagataagatctgcatcaaggaattaaatttccagtttgtccttggggttctttctgcttatgttttttcccccccatctggtaatagtcctcttctgagaatgaaaggaggcacagaagttgcgagaaagacccagtccccagtctttgccaccattgcaccatggttgtctcggagtcccttcacctgacctttttagtcagctcagatctttttgtagtttgagaatagacctattcaagagctatcagggttaaaagctgcactgaccaaagctgtacttttaaaacacaacccctgggctagtgatgtctctacttgctctatgagccttttgccagcctcagaataggcgaggtaaccttgaatttcagggccctggaaactctagctgaaacctgcctttcctaatgctcacacaagcaccaggtaccctgagcttatactgagtccagtggttcctattttatgtgtgtgtgtatgtgtgtgtgttgagtaacatgaaacttggcagtagcagagagcactgaagttcacatgcaagttctaatctaaagttaagcagtctcttatttgtttcgggactctgatttgactctttttctgatgctttcggcatgtctgcagcctgttctcctagcctgctgcttggagtcaggttgagcatcagtgagatgaagacagtaccttttcctctcacattggcagaatagcacgcactagatgcctgaccttgagctctagtctcccctttaaatcttaccttggcagtaacacattattcctcattcaataatttcaatgctgaaactgaactctattactaatgccttccaatcagagttcctgatggggatgcctgtgggatggcccacacctgggggacctggcagatggggtgagttgggtaaggaagatgatgcttagttcctgatagatgctacagatgtagtttggcatttcagtttttgtccagtttgattttcactggggtttgagtcacagcaagctgtgtatgaacttgtgttttgtggtgacacattaataatcaaattgctaaaaccctgaatctgcttattcttcagcttcacctctgcactaaccccttacccttatggtacgtcaggattttaactagtactgctttgttgactttgggaaatggtgccactcaaaagcaacttcctaacttgaggaataactcctttgtagtttactttctggtactggttggtgccttgtattgggatacagctatattcttagctcaaatgtcctctttttgagagcaaagtagttatccaatggtgagacgagaccctgacgctcatagaggccattccttcctgggtgtcggaccagggctctgtgtcagggaaaaccttctgggtggactttgtaagaatccagtttccaaggttagattcacatccttaatcttgcagagactagaatttcacagctcgctttggaacatattccaattcaaccagttaaaatcagaggaccaagtcgtgggggaggggggcggtgttgaggagaggtatttttaaagatctggcaacttttcaggattatttgtggagaactctaaggttaagatcaggaaataaaagactgtgtgtgtgtgtgtgtgtgcgtgtgtgtgttcaagtgcctaaatcttgtttacctatcactttaaaaaaataattgaagtgtaagctaaataaaatgcttggagttttgcctgggctagtgagagttggtgcaaattcttgtgtgtgtttgcataggaaggtgagatgaccatctactaaagaggaagtagctaaatacagatctgtgggtgtttttaaaaaaactcaacctatctggtgttttattttaatggataaaaatgtaatttttctaaggtagcaacttatttccaaattaatatagatgaaaaatagataccaattagactaaattgaaagctttttgttctatatttgcatagcctttgaaatatttcttagtgcctaggaggtctggggattcctctttcgtggtggtcactaaccttacttgatgcagataaaatcacttgtcaatgcaaaatgtgttagaacttgataaagctttgagtttgagaaataaaggtatatttaaaatttaaataaaa

SEQ ID NO: 132710 - DNA, 3011 bp, Homo sapiens
  Payload ID: 5930
  Gene Symbol: FAM46D
  Gene Name: family with sequence similarity 46, member D
  Uniprot ID: Q8NEK8
  ENST ID: ENST00000308293
  CDS Start-End: 240-1409
gaatgtgtggagatcaggtgatgcagaactctggtaaaggatgttagtcttcagagtaagactgttaaattcagcaaagtctactatcagaagacacgtttttctggttggtgtattactttattcagtgataatatgaaaattactatcttcactgaaggatctactgaataatcattttaactcaactatattgcattcttgaaagcaatcctttcaattgatctactgacttcacaatgtctgaaatcagattcaccaatctcacttgggatcaagttataacactggatcaagtgttagatgaagtaattccaattcatggaaaggggaatttccccacaatggaggtaaaaccaaaagacatcattcatgttgtgaaagatcaactcatagggcaaggaattattgttaaagatgccagattgaatggttccgtagcaagttacatacttgcaagccacaatggaatcagctataaggatctggacgttatttttggtgttgagcttccaggtaacgaagaatttcaggttgttaaagatgcagttctagactgtctacttgactttttaccaaaagatgtaaagaaggaaaagctctccccagatatcatgaaagacgcttacgtacagaaattggtcaaggtttgcaatgggcatgattgttggagtcttatctccctttcaaataacactgggaagaatttagaactaaaatttgtgagttcactcagacggcagtttgaatttagtgtagattcctttcaaattgttttggatcccatgttagacttctacagtgacaaaaatgccaagctaaccaaagaatcctatcctgttgtggtagctgaaagcatgtatggagacttccaggaagcaatgacacatttgcaacacaagctcatatgtaccaggaaacctgaagagattagaggtggtggccttctgaagtactgcagcttgctggttcatggcttcaagccagcctgtatgtcagaaatcaaaaacctagaacgttatatgtgctctagattctttattgattttcctcatatagaagaacagcaaaagaaaattgaatcatacctccacaaccatttcataggtgaaggaatgaccaagtatgactaccttatgaccttgcatggagttgtgaatgaaagcactgtttgcctcatgagttatgaaagaagacagattctccacctgatcaccatgatggctttgaaagtacttggagaactaaatattctacccaatacacaaaaggtaacttgcttttatcagcctgctccgtactttgcagctgaggcaaggtaccctatttatgtaatacctgagccaccccccgttagcttccagccataccacccactgcactttcgtggatcaaatggtatgagttaaaaaatacacatgcaaccatagaaactttgatttaattaaacaccatttaaaagcaagtttccaaatgtaaaattcaagatctgtttttatttttgtacagttaccaattattttcaattacagttgatggaatagtagttaccaactatttttgatcaattaagccatcatagtaaatacaatatctataaaccaaccactttaaatgtttttcaaacgttattgactagctataataactttcaaatgttgtgttccccttgaagtgattttcaaatcttttgactacttgtgactttcaaatttactgtgacaaatatattagagatgcctgcatctttgactataacataaaaggacagattcatgttttaaaattaagatgtacagtgaagtatcaaattttttatattcagtcagttcctttgttacatttagttctttttttctattgaacaataccatcaataaatgttcagtacttaacagaaatgcctaatttcaaaagcaacagattcagaagacattaaaaccctggacttttcaagcatttttttttgacaattaaattgggttggatacaaaaatcctactatagtttaaaggaatactggaaaaaaatggttctggaaagccctggacattagtaatttgtcatctatataataaaacatttagttaatttgtggatttgaataacaataccatacagctgtgcaactactactgagatcagatacagggttttttgcccctcaaaataagttaaaacgaatgaaaatgaccagctctgaatgtgaaagctttctatcatcatctactacaaagagactctaaatggcaaacaggaaaaaaacaggcagaggtttatagccatagcatttaccattttatggcttatttgaaaaacatctttatgttgagaaacattccatttcagtaagttaaaatattttcattgtaactaaatgaagcaggtttttcattttgcctttaccaaagatcattttctaacatgccactcaagtgcctcttcgtgtgaatttttgcgtaacactataatttattcaacaactgtatacctttacagtatatctaaatatatacttactacatcgagtatactgctagaaaaatctaccagtgggattaaaaatgtattttcttcccataatgaaaataattcatgaccaatattacctgaagtgtcagaagaggagctgtcttaaattaatatggatcaggccattggaaaacttcagtatttccacttggttatgattttttgtgagtttccatttcagtttttattgaccatcacgttttctatcacaacatgacctgacagttgtatcccgataatttgccagttatagactgtgcttatcttcactgtattacaatattggacagaagtacaccaaatacggcattttcaaataaccaatatttctgagatgttttataccacagcacaagtggccatcagtatatttttaaagaattatatatcacagaaccctgaggctttaaaacactatggacttaccactttcttgacaaagaatttgtaattacaataaaatatttagaaatgaaagg

SEQ ID NO: 132711 - DNA, 3106 bp, Homo sapiens
  Payload ID: 5930
  Gene Symbol: FAM46D
  Gene Name: family with sequence similarity 46, member D
  Uniprot ID: Q8NEK8
  ENST ID: ENST00000538312
  CDS Start-End: 335-1504
acgcgccccagctcccaccttgggtccttcgcctgcacccagtctaacctggcacctaaagatttcactctgtccttggcccctcaccattgtctcagagtttaagccttaacggatgaaggaaaaagattatttgtgaaaagaaattatctaacacttctcatctatctaactggagtttcactagctggagtttttctggttggtgtattactttattcagtgataatatgaaaattactatcttcactgaaggatctactgaataatcattttaactcaactatattgcattcttgaaagcaatcctttcaattgatctactgacttcacaatgtctgaaatcagattcaccaatctcacttgggatcaagttataacactggatcaagtgttagatgaagtaattccaattcatggaaaggggaatttccccacaatggaggtaaaaccaaaagacatcattcatgttgtgaaagatcaactcatagggcaaggaattattgttaaagatgccagattgaatggttccgtagcaagttacatacttgcaagccacaatggaatcagctataaggatctggacgttatttttggtgttgagcttccaggtaacgaagaatttcaggttgttaaagatgcagttctagactgtctacttgactttttaccaaaagatgtaaagaaggaaaagctctccccagatatcatgaaagacgcttacgtacagaaattggtcaaggtttgcaatgggcatgattgttggagtcttatctccctttcaaataacactgggaagaatttagaactaaaatttgtgagttcactcagacggcagtttgaatttagtgtagattcctttcaaattgttttggatcccatgttagacttctacagtgacaaaaatgccaagctaaccaaagaatcctatcctgttgtggtagctgaaagcatgtatggagacttccaggaagcaatgacacatttgcaacacaagctcatatgtaccaggaaacctgaagagattagaggtggtggccttctgaagtactgcagcttgctggttcatggcttcaagccagcctgtatgtcagaaatcaaaaacctagaacgttatatgtgctctagattctttattgattttcctcatatagaagaacagcaaaagaaaattgaatcatacctccacaaccatttcataggtgaaggaatgaccaagtatgactaccttatgaccttgcatggagttgtgaatgaaagcactgtttgcctcatgagttatgaaagaagacagattctccacctgatcaccatgatggctttgaaagtacttggagaactaaatattctacccaatacacaaaaggtaacttgcttttatcagcctgctccgtactttgcagctgaggcaaggtaccctatttatgtaatacctgagccaccccccgttagcttccagccataccacccactgcactttcgtggatcaaatggtatgagttaaaaaatacacatgcaaccatagaaactttgatttaattaaacaccatttaaaagcaagtttccaaatgtaaaattcaagatctgtttttatttttgtacagttaccaattattttcaattacagttgatggaatagtagttaccaactatttttgatcaattaagccatcatagtaaatacaatatctataaaccaaccactttaaatgtttttcaaacgttattgactagctataataactttcaaatgttgtgttccccttgaagtgattttcaaatcttttgactacttgtgactttcaaatttactgtgacaaatatattagagatgcctgcatctttgactataacataaaaggacagattcatgttttaaaattaagatgtacagtgaagtatcaaattttttatattcagtcagttcctttgttacatttagttctttttttctattgaacaataccatcaataaatgttcagtacttaacagaaatgcctaatttcaaaagcaacagattcagaagacattaaaaccctggacttttcaagcatttttttttgacaattaaattgggttggatacaaaaatcctactatagtttaaaggaatactggaaaaaaatggttctggaaagccctggacattagtaatttgtcatctatataataaaacatttagttaatttgtggatttgaataacaataccatacagctgtgcaactactactgagatcagatacagggttttttgcccctcaaaataagttaaaacgaatgaaaatgaccagctctgaatgtgaaagctttctatcatcatctactacaaagagactctaaatggcaaacaggaaaaaaacaggcagaggtttatagccatagcatttaccattttatggcttatttgaaaaacatctttatgttgagaaacattccatttcagtaagttaaaatattttcattgtaactaaatgaagcaggtttttcattttgcctttaccaaagatcattttctaacatgccactcaagtgcctcttcgtgtgaatttttgcgtaacactataatttattcaacaactgtatacctttacagtatatctaaatatatacttactacatcgagtatactgctagaaaaatctaccagtgggattaaaaatgtattttcttcccataatgaaaataattcatgaccaatattacctgaagtgtcagaagaggagctgtcttaaattaatatggatcaggccattggaaaacttcagtatttccacttggttatgattttttgtgagtttccatttcagtttttattgaccatcacgttttctatcacaacatgacctgacagttgtatcccgataatttgccagttatagactgtgcttatcttcactgtattacaatattggacagaagtacaccaaatacggcattttcaaataaccaatatttctgagatgttttataccacagcacaagtggccatcagtatatttttaaagaattatatatcacagaaccctgaggctttaaaacactatggacttaccactttcttgacaaagaatttgtaattacaataaaatatttagaaatgaaagg

SEQ ID NO: 132712 - DNA, 2556 bp, Homo sapiens
  Payload ID: 5931
  Gene Symbol: FAM47A
  Gene Name: family with sequence similarity 47, member A
  Uniprot ID: Q5JRC9
  ENST ID: ENST00000346193
  CDS Start-End: 34-2409
agctggagacgtggcaccacagcgagggccaccatgggggaccagaggctgcaggactggctgaggtccccgggcatggactccaagccctggtactgtaacaaacggccttccaagtgcttcgcgaagtgcaagcacaggcgcctgaggttcccacccatggacacccagaactgggtatttgtgaaggagggcatggacgacttccgctacggctgtccgtctcccgaagatactctcgtttgtcgccgtgacgagtttttactccccaaaatatctctcagaggtccccaagctgaccccaaaagcgggcagaaaaagctgctcaagaaagcggccctattttccaagctctctccagcccagctagcacggaaggcgttcgtagagcaagtggaagcccagctaatggccaagcatcccttggccatgtaccccaatctgggagaagatatgcctccagatctcctactacaggtgctgaaacacctggatcctgagagggagctggaggacgcttgggcttgttgtgagacccaggagaagacaacagaggtacccactgagcctggtaaacatccctgtggggaattctgcctgaagcctcccgagactccggtgtcccatctcctcccagagcctcccgagactggagtgtcccatctaagcccggagcctcccaagactccggtgtccagtctccgcccggagcctcctgagactggagtgtcccatctccgcccggagcctccagagactggagtgtcccatatccgcccggggcctcccatcactcgtcggagatccagtctcctacgacagctgctgaaactggattctgagaggaagctggaagacgcacgggctccttgtgagggccgggagaagacaactgacgaacccacagagcctggtaaatacccttgtgggaaattctgtcctcggcctttcgagactccactgtcccatctccgccaggagcctcccaagactccggtgtccagtctccgcccggagcctccggagactggagagtcccatctccgcctagagcattccaagactcgtcgggggtccagtctccgctcggagccttccgagactggagtgtcccgtctccgcctagcgcctcccaagactcgtcgggggtccagtctccacgcggagccttccaagactggagtgtcccatctcagcccggagcctcccaagactgaagtgtctcatctccacccagtgcctcccaagactggagtgtgccatctccgcctggaacctcccgacactagtcaggtgtccaatctcctactatacatactgaaagtgctggattctgggaggacgctgaaggacgtatgggatcgttgtgaggcccgggtgaagaaaactaaggaacccaccgagcctcataaatccccttgtggggaaccctgcctgcagcctcccgagactcaggtgtcccatccccacccggaacatcccaagacacgtcggaggtccagtctccactcgcagcctcccaagactcgtcggacgtccagtctccgctcggagcctcccaagactcgtcggacgtccagtctccgctcggagcctcccaagactcgtcggacgtccagtctcggtccggagcctcccaagactcgtcgagtgtccagtctccgcccggagcttcccaagagtcgtcgggtgtccagtctccacccggagcctcccaaagctccagagtcccatcaattctcggagcctcccaagattcgagcatcctacataaaagaactgcttcaggaagatacaccaagcacaaaagagtgcgtttctgactctcttcaatatagatacacatcggaaaaactccgtgaattcttcaagtgggctggagacctgggagctgatgaagaatccatcaggaatctgtttgactttacccccaagtacagagcaacccatgaggaccaaaagtttaagaaagtaaaggagtgttcctcagagctgaagtacagcatggagctagatgaaaaggatgaggacaaattcttctcacaggaaaaatactggggcaggaaattccacacgccatcgaattcttataccgcacagcgtgtgaagatgaagtatggagcatggtacctcaagcctaagttgtggaaaaagctaagaagtgatgaacctttgattgaccccaagctcttacttaaaaagcctgatgaacctgacgttcttgacgatctttatggaccaattgcctttaaggatttcattctaagcaagggctatgaaatgcctggcatcattcaaaggctgtttgccaggaggggatggacttatgactctgttaagactcctattcaacgtgcaatgatattttacaagtacaaagaaatcgtagaggcatcggaagaagattaggcagttttcaatttactactcaattgggtatttcttgctctcattttaatcatcaatcataatttatgatgactggccccgtggatgcacaactttggcaacatctgtaaattcaatacctaatgtttatcaatatttcttaatgaa

SEQ ID NO: 132713 - DNA, 2518 bp, Homo sapiens
  Payload ID: 5931
  Gene Symbol: FAM47A
  Gene Name: family with sequence similarity 47, member A
  ENST ID: ENST00000613251
  CDS Start-End: 37-2373
agaagctggagacgtggcaccacagcgagggccaccatgggggaccagaggctgcaggactggctgaggtccccgggcatggactccaagccctggtactgtaacaaacggccttccaagtgcttcgcgaagtgcaagcacaggcgcctgaggttcccacccatggacacccagaactgggtatttgtgaaggagggcatggacgacttccgctacggctgtccgtctcccgaagatactctcgtttgtcgccgtgacgagtttttactccccaaaatatctctcagaggtccccaagctgaccccaaaagcgggcagaaaaagctgctcaagaaagcggccctattttccaagctctctccagcccagctagcacggaaggcgttcgtagagcaagtggaagcccagctaatggccaagcatcccttggccatgtaccccaatctgggagaagatatgcctccagatctcctactacaggtgctgaaacacctggatcctgagagggagctggaggacgcttgggcttgttgtgagacccaggagaagacaacagaggtacccactgagcctggtaaacatccctgtggggaattctgcctgaagcctcccgagactccggtgtcccatctcctcccagagcctcccgagactggagtgtcccatctaagcccggagcctcccaagactccggtgtccagtctccgcccggagcctcctgagactggagtgtcccatctccgcccggagcctccagagactggagtgtcccatatccgcccggggcctcccatcactcgtcggagatccagtctcctacgacagctgctgaaactggattctgagaggaagctggaagacgcacgggctccttgtgagggccgggagaagacaactgacgaacccacagagcctggtaaatacccttgtgggaaattctgtcctcggcctttcgagactccactgtcccatctccgccaggagcctcccaagactccggtgtccagtctccgcccggagcctccggagactggagagtcccatctccgcctagagcattccaagactcgtcgggggtccagtctccgctcggagccttccgagactggagtgtcccgtctccgcctagcgcctcccaagactcgtcgggggtccagtctccacgcggagccttccaagactggagtgtcccatctcagcccggagcctcccaagactgaagtgtctcatctccacccagtgcctcccaagactggagtgtgccatctccgcctggaacctcccgacactagtcaggtgtccaatctcctactatacatactgaaagtgctggattctgggaggacgctgaaggacgtatgggatcgttgtgaggcccgggtgaagaaaactaaggaacccaccgagcctcataaatccccttgtggggaaccctgcctgcagcctcccgagactcaggtgtcccatccccacccggaacatcccaagacacgtcggaggtccagtctccactcgcagcctcccaagactcgtcggacgtccagtctccgctcggagcctcccaagactcgtcggacgtccagtctcggtccggagcctcccaagactcgtcgagtgtccagtctccgcccggagcttcccaagagtcgtcgggtgtccagtctccacccggagcctcccaaagctccagagtcccatcaattctcggagcctcccaagattcgagcatcctacataaaagaactgcttcaggaagatacaccaagcacaaaagagtgcgtttctgactctcttcaatatagatacacatcggaaaaactccgtgaattcttcaagtgggctggagacctgggagctgatgaagaatccatcaggaatctgtttgactttacccccaagtacagagcaacccatgaggaccaaaagtttaagaaagtaaaggagtgttcctcagagctgaagtacagcatggagctagatgaaaaggatgaggacaaattcttctcacaggaaaaatactggggcaggaaattccacacgccatcgaattcttataccgcacagcgtgtgaagatgaagtatggagcatggtacctcaagcctaagttgtggaaaaagctaagaagtgatgaacctttgattgaccccaagctcttacttaaaaagcctgatgaacctgacgttcttgacgatctttatggaccaattgcctttaaggatttcattctaagcaagggctatgaaatgcctggcatcattcaaaggctgtttgccaggaggggatggacttatgactctgttaagactcctattcaacgtgcaatgatattttacaagtacaaagaaatcgtagaggcatcggaagaagattaggcagttttcaatttactactcaattgggtatttcttgctctcattttaatcatcaatcataatttatgatgactggccccgtggatgcacaactttggcaacatctgtaaattcaatacctaatgtttatcaatatttcttaatg

SEQ ID NO: 132714 - DNA, 2120 bp, Homo sapiens
  Payload ID: 5932
  Gene Symbol: FAM47B
  Gene Name: family with sequence similarity 47, member B
  Uniprot ID: Q8NA70
  ENST ID: ENST00000329357
  CDS Start-End: 37-1974
agaagctggagaggtggcacaacagagagggccaccatgggggaccggaggccacaggaccggccaaggtcccaaggcatggactccaagccctggtactgtgacaaaccgccttccaagtacttcgcgaagcgcaagcacaggcgcctgaggttcccgcctgtggacacccagaactgggtatttgtgacggagggcatggacgacttccgctacgcctgtcagtctcctgaagatacgcttgtttgtcgccgtgacgagtttttactccccaaaatatctctcagaggtccccaagctgaccgcaaaagcaggaagaaaaagctgctcaagaaagcggccctattttccgagctctcgccagtacagccagcacggaaggcgttcgtagaggaagtggaagcccagctgatgaccaagcatcccttggccatgtaccccaatctgggaaaagatatgcctccagatctcctactacaggtgctgaaacagctggatcccgagaggaagctggaggacgcttgggctcgttgtgaggcccgggagaagacaaccgaggtacccaccgagtctggtaaatatccctgtggggaatcctgcccgcggcctcccgagactccggtgtcccgtctccgtcctcagcttcccaagactccggtgtccagtcgccgcccagagcctcccaagactcgggtgtccagtctccgcccagagcctcccaagactcgggtgtccagtctccacccggaacctccagagactcgcgcatctcatctccgcgtggatcctcccgagactggagtgtcccatctctgcccagagcctcccaagactctggtgtccagtgtccacccagagcctcctgatactggagcgtcccatctctgcccggagcctcccgagactcgcgtatctcatctccacccggagcctcctgagactggagtgtcccatctccgcccagagccttccaagactcaggtgtccagtctctgcccggagcctcccgaggctggagtgtcccatctctgcctggaacctcccaacactcatcgggtgtccagtttcctactacaggtgctgaaactggattctgagaagaagctggaagacgcacgggctcgttgtgagggccaggagatgacaaccgaggaactcaccaagcctggtaaataccatttttgggaatcctgtccgcggccttttgagagtcggatgccccatctccgcctggtgcttcccataactcgtcgaatggccagtctctgcctgaagcctcccaagactcgtcgggtgtccagtctctgcccggagcctaccaagaccggagcgtcccatctaaaagaactgtttcaggaagatacaccaagcacaatggagtgtgtttctgactctcttcaacgtagacacacatcgagaaaactccgtgacttcaagtgggctggagacctaggagttaatgaagaatccatcagcagtctgtttgactttacccctgagtgcagaacaaccgatcaagaccaaaagattaagaaggcaaacgagtgtgcttcaaggctgatgtacggcatggagctagacgacatggatgaggtcgaattcttacggataaaatactgggacaggagacgccgggcggcaccgcattcttatagtgcacagcgtgggaggataaggtatggaccatggtacttcgagcctaagttggggaaaaagctaagaagtgatgaacctttgattgaccccaagcccgtacttgaaaagcctgatgaacccgacattcttgacggtctttatggaccaattgcctttaaggatttcattctaagcaagggctacagaatgcctggcgtcattgaaaagctgtttgccaagaagggatggacttacgactctgttaagactcctattcaacgtgcagtgcaagtttacaagtacaaagaagacgtcacagatgcatcaaaagaagattagatggttttcaatttactgcttaattgggtatttcttgctctcattctaaacatcaatcagaatttatgatgactggccccgtgaatgtacaactttggcaacatctgtaaattcaatacccaatgcttataaatatgtcttaatga

SEQ ID NO: 132715 - DNA, 3270 bp, Homo sapiens
  Payload ID: 5933
  Gene Symbol: FAM47C
  Gene Name: family with sequence similarity 47, member C
  Uniprot ID: Q5HY64
  ENST ID: ENST00000358047
  CDS Start-End: 15-3122
cagcgagggccaccatgggggaccagaggccgcaggaccggcccagttccccgggcatggactccacgccctggtactgtgacaaaccgccttccaagtacttcgcgaagcgcaagcacaggcgcctgaggttcccgcctgtggacacccagaactgggtatttgtgacggagggcatggacgacttccgctacggctgtcagtctcctgaagatacgcttgtttgtcgccgtgacgagtttttactccccaaaatatctctcagaggtccccaagctgaccccaaaagcaggaagaaaaagctgctcaagaaagcggccctgttttccaagctctcgccagcacagccagcacggaaggcgttcgtagaggaagtggaagcccagctgatgaccaagcatcccttggccatgtaccccaatctgggagaagatatgcctccagatctcctactacaggtactgaaaccgctggaccctgagaggaagctggaggacgcaggctcttgtgagggccaggagaagacaactgacgaacccacggagcctggtaaatacccctgtggggaattctcccctcggcctcccgagactcgggtgtcctgtctccccccggagcctcccaagactccggtgtccagtctccgcccggagcctccagagactggagtgtcccatctccgcccacagcctcccaagactcaggtgtccagtctccacctggagcctccagagactggagtgtcccatctccgcccagagcctcccaagactcaggtgtccagtctccacctggagcctcccgagactggagtgtcccatctctacctggagcctcctgggactggagtgtctcatctctgcccagagcctcccaagactcgcgtatctcatctccatcgggagcctcctgagactggagtgcctgatctctgcctggagcctcccaagtcacgcgtatctcatctccgcccagagccttctgagactggagtgtcccatctccacccagagcctcccaagactctggtgtccagtctccacccagagcctcccgagactggagtgtcccatctctgcccggaacctccagagactcgcgtatctcctctccgccagctgcctcccgaggctggagtgtcccatctctgcccggaacctcccaagactcgcgtacctcctctccgcccagagacccccaagaatggagtgtctcctctcttcccggagcctcccaagactcgcatatctaatctccgctcggagcctcccaagattggagtgtcccatctctgcctggagcctcccaagactcgcggatctcatctccgcccggaacctcctgagactggagtgtcccatctccgcccagagcctcccaagactcgggtgtccagtctccacctggagcctcctgagactggagtgtcccatctctgcccggagcctccagagaaggacgtatctcatctccgcccagagcctcccgacactggagtgtcccatctctgcccagagccccccaagacacgcgtatctcatctccgcccagagccttctgagactggagtgtcccatctccgcccagagcctcccaagattctggtgtccagtctccaccaggcacctcctgagagtagcgtatctcatctccgcccagagcctcctgagactggagtgtcccatctccgcccagagcctcccaagactcggatgtacagtctccgcccggagcctcccgatactggagtgtcccatctctgcccagagcctcccaagactcgggtgtccagtctccccccggagccccccgagactggagtgtcccatctctgcccggagcctccagagactcgcgtatctcatctccgcccagagcctcctgagactggagtgtcccatctccgcccagagcctcccaagactcggatgtacagtctccgcccggagcctcccaatactggagtgtcccatctctgcccagagcctcccaagactcgggtgtccagtctccccccggagccccccgagactggagtgtcccatctctgcccggagcctccagagactcgcgtatctcatctccgcccagagcctcctgagactggagtgtcccgtctccacccagagcctcccaagactcgggtgtccagtctccacgcggagcctcctgagagtcgcgtatctcatctctgcccggagcctcctgagactggagtgtcccatctccgcccagagcctcccaagcctcgggtttccagtctccgcccagagcctcttgagactcgcgtatctcatctccgcccggagcctcctgagactggagtgtcccatctccacccagagcttcccaagcctcgggtatccagtctccacctggagcctcccaagactcgtcgagtgtccagtctccgcctggagcctcccaagactggtcgggtgtccagtctctgcccggagcctaccaagaccggagcgtcccatctaaaagaactgtttcaggaaggtacatcaagcacaatggagtgtgtttctgactctcttcaacgtagacacacatcgagaaaactccgtgacttcaagtgggctggagacctaggagttaatgaagaatccatcagcagtctgtttgactttacccctgagtgcagagcaacctatcaagaccaaaagaataagaaggcaaacgagtgttcctcagggctgaagtacagcatggagctagacgaaatggatgaggtcaaattcttctcacaggaaaaagacttggacgggaaaatccagaatgcaccaaattctcatagtgcacagcatgtgaagatggggtatggagcatggtacctcaagcctaagttggggaaaaagctaagaagtgatgaacctttgattgaccccaagctcgtacttgaaaagcctgatgaacccgacattcttgacggtctttatggaccaatcgcctttaaggatttcattctaagcaagggctatgaaatgcctggcatcattcaaaggctgtttgccaggaggggatggacttatgactctgttaagactcctattcaacgtgcaatgcaagtttacaagtacaaagaagacgtcacagatgcatcggaagaagattagatggttttgaatttactagttaattgggtatttcttgctctcattttaaacatcagtcagaatttatgatgactggccccaggaatgtacaacgttggcaacatctgtaaattcaatacctaatgtttataaatatttcttaatgacc

SEQ ID NO: 132716 - DNA, 1484 bp, Homo sapiens
  Payload ID: 5934
  Gene Symbol: FAM47E
  Gene Name: family with sequence similarity 47, member E
  Uniprot ID: Q6ZV65
  ENST ID: ENST00000424749
  CDS Start-End: 7-1188
gccaccatggcggaccgcaggcggcggctccggccggggacgttggccccggtgcgcgagggcgtgaactgcaggtccagatgtttcacaaagcacaagaacgggctgaagttccccacctctctgcacagccggcagttggtatttccaagaaaggggctggacgacttcaggaagggctgcccgccttgcactggtctggtgactcaggtccctgtggagggctttctgccccagatttatcacagagctccccaactggccccaaagaagaggcagatcaagctgctcaaggaagcagacgtgctttccaagctctcgccagcccagcaggctcggaaggcattcctggaggacgtggaggcccacctgaccccacatcccttagcgctctacctgaatctggaagaagctatgcccatagagctcttatcaaaggtgctggaagtgcttgatcctgaccggaagctggaggacacatgggcttattgtcaggacaccaggaaaggaatgaaggaacccacgaagcttttaaaaaaacattctacccaagtctacctgggaccttccaagaagacgtctgtgtcaaacgcaggccaatggctttatgaagaaaagccacataaaatggatttgctccatgaaaatggtcctcgtcctggtcttcatgaaaatggaatttcggacatcgatgaagagttcatcttgaaacagtttgacattgactatgagaccaaaccaagccatgatgcgctccacacgatgaagctaaatcaggttcctctggagctaaagcgtagtgtggggctcagtaaactgcaggagacagagttcttccagaaactaggctatgagaggaaactccagaaaccacagaatccttataagccaaagtgggtgaagatgaggtatggagcatggtatttgaaccccaagttgtggaaaaagcaaagagtagacgagcctctggttgaccctgaggtctcacataaggctcaagaggagaattttaaaaaggagctgcaggaacaggaggagttacttgcagaccttcacggaacagttgcctttaaggatttcattctaagcaggggctacaggacgccacgtttccttgagaatatgtatatcgggaaggaatgtaaacgtgcatgtaataagactcctataaaacgaactcaagcatagaagaatcgtaggagaatgattaggcagattttattactacgtacttggctatttctctgtctccttttaaagattaaacagagtttatgatgagtgtcccactgtggatgttcaactttgacttggcaacatctgtaaatgtaatacctgatggttataagcatttctcaatggatttctgcttcagttaatcaacattttgtatactttatcacccatgagatcaatattcacatgtaatcttctcatatttttgtggcacgtgaatattatataggtatatcaactattggtaa

SEQ ID NO: 132717 - DNA, 1624 bp, Homo sapiens
  Payload ID: 5934
  Gene Symbol: FAM47E
  Gene Name: family with sequence similarity 47, member E
  Uniprot ID: Q6ZV65
  ENST ID: ENST00000510197
  CDS Start-End: 415-1302
agcgccctgcaccgcaggcccagcgctcgccccaccgaaattgccgaacctggttcacacactcatttactcattccgcagataggtctgagggcctcccatgggccacgcgctggggattcaaggtggctgggacattcccctgctctagaggcgctcgcaagttagcggggacaccgttaccgcaattacaacacaatgtagcaagtgcttctaccaggtgcctgctgagatcatgccagcaagcatgttctgcctggatgacctagggccccacattgaactggggcctgggggatgcataagtttgtcacgtaaggggcatgtgcaagaatggaagatgtgcaaaaaagggaggaggaggcatttcacggagaaggaaacggagtggaagcagcctgaggccctcatccaatgcagatgtctgtgccgtgcgtcttgtccagcctgcagaaccatgagccaaataaacctcttttcactacccaatctcagctcttatcaaaggtgctggaagtgcttgatcctgaccggaagctggaggacacatgggcttattgtcaggacaccaggaaaggaatgaaggaacccacgaagcttttaaaaaaacattctacccaagtctacctgggaccttccaagaagacgtctgtgtcaaacgcaggccaatggctttatgaagaaaagccacataaaatggatttgctccatgaaaatggtcctcgtcctggtcttcatgaaaatgtatgcaaagcagttagtgacttctgcaagtgggttactacttttggaatttcggacatcgatgaagagttcatcttgaaacagtttgacattgactatgagaccaaaccaagccatgatgcgctccacacgatgaagctaaatcaggttcctctggagctaaagcgtagtgtggggctcagtaaactgcaggagacagagttcttccagaaactaggctatgagaggaaactccagaaaccacagaatccttataagccaaagtgggtgaagatgaggtatggagcatggtatttgaaccccaagttgtggaaaaagcaaagagtagacgagcctctggttgaccctgaggtctcacataaggctcaagaggagaattttaaaaaggagctgcaggaacaggaggagttacttgcagaccttcacggaacagttgcctttaaggatttcattctaagcaggggctacaggacgccacgtttccttgagaatatgtatatcgggaaggaatgtaaacgtgcatgtaataagactcctataaaacgaactcaagcatagaagaatcgtaggagaatgattaggcagattttattactacgtacttggctatttctctgtctccttttaaagattaaacagagtttatgatgagtgtcccactgtggatgttcaactttgacttggcaacatctgtaaatgtaatacctgatggttataagcatttctcaatggatttctgcttcagttaatcaacattttgtatactttatcacccatgagatcaatattcacatgtaatcttctcatatttttgtggcacgtgaatattatataggtatatcaactattggtaaaaataaataaaggcataaataaaaac

SEQ ID NO: 132718 - DNA, 571 bp, Homo sapiens
  Payload ID: 5934
  Gene Symbol: FAM47E
  Gene Name: family with sequence similarity 47, member E
  ENST ID: ENST00000512895
  CDS Start-End: 172-571
atttactcattccgcagataggtctgagggcctcccatgggccacgcgctggggattcaaggtggctgggacattcccctgctctagaggcgctcgcaagttagcggggacaccgttaccgcaattacaacacaatgtagcaagtgcttctaccaggtgcctgctgagatcatgccagcaagcatgttctgcctggatgacctagggccccacattgaactggggcctgggggatgcataagtttgtcacgtaaggggcatgtgcaagaatggaagatgtgcaaaaaagggaggaggaggcatttcacggagaaggaaacgctcttatcaaaggtgctggaagtgcttgatcctgaccggaagctggaggacacatgggcttattgtcaggacaccaggaaaggaatgaaggaacccacgaagcttttaaaaaaacattctacccaagtctacctgggaccttccaagaagacgtctgtgtcaaacgcaggccaatggctttatgaagaaaagccacataaaatggatttgctccatgaaaatggtcctcgtcctggtcttcatgaaaatg

SEQ ID NO: 132719 - DNA, 463 bp, Homo sapiens
  Payload ID: 5934
  Gene Symbol: FAM47E
  Gene Name: family with sequence similarity 47, member E
  ENST ID: ENST00000606246
  CDS Start-End: 1-374
acgtggaggcccacctgaccccacatcccttagcgctctacctgaatctggaagaagctatgcccatagagctcttatcaaaggtgctggaagtgcttgatcctgaccggaagctggaggacacatgggcttattgtcaggacaccaggaaaggaatgaaggaacccacgaagcttttaaaaaaacattctacccaagtctacctgggaccttccaagaagacgtctgtgtcaaacgcaggccaatggctttatgaagaaaagccacataaaatggatttgctccatgaaaatggtcctcgtcctggtcttcatgaaaatgtatgcaaagcagttagtgacttctgcaagtgggttactacttttgtaagttagtggtaatatttaaacctacttttaaatgtcaagctcaaagttgcttttattaaaaaacagtattggataaaatctaagtcaaatcctca

SEQ ID NO: 132720 - DNA, 4670 bp, Homo sapiens
  Payload ID: 5935
  Gene Symbol: FAM49A
  Gene Name: family with sequence similarity 49, member A
  Uniprot ID: Q9H0Q0
  ENST ID: ENST00000381323
  CDS Start-End: 222-1193
agaggcgtactcggcggcggcggagcgggcggcagagcagggcggcggcgactcgcagggtaccaccatcttaaggacagaaaagctacaggactctaggaggccaccgtcctgatttgggaagtccaacttactttggccagacagcagctaagctggttcatcccatcagcctggattggtgaaactgaatcacaggagatatttccaggtttgctgggatgggaaacctgctcaaagtccttaccagggaaattgaaaactatccacactttttcctggattttgaaaatgctcagcctacagaaggagagagagaaatctggaaccagatcagcgccgtccttcaggattctgagagcatccttgcagacctgcaggcttacaaaggcgcaggcccagagatccgagatgcaattcaaaatcccaatgacattcagcttcaagaaaaagcttggaatgcggtgtgccctcttgttgtgaggctaaagagattttacgagttttccattagactagaaaaagctcttcagagtttattggaatctctgacttgtccaccctacacaccaacccaacacctggaaagggaacaggccctggcaaaggagtttgccgaaattttacattttacccttcgattcgatgagctgaagatgaggaacccggctattcagaatgacttcagctactacagaagaacaatcagtcgcaaccgcatcaacaacatgcacctagacattgagaatgaagtcaataatgagatggccaatcgaatgtccctcttctatgcagaagccacgccaatgctgaaaacccttagcaatgccacaatgcactttgtctctgaaaacaaaactctgccaatagagaacaccacagactgcctcagcacaatgacaagtgtctgtaaagtcatgctggaaactccggagtacagaagtaggtttacgagtgaagagaccctgatgttctgcatgagggtgatggtgggagtcatcatcctctatgaccatgtccaccctgtgggagctttctgcaagacatccaagatcgatatgaaaggctgcataaaagttttgaaggagcaggccccagacagtgtggaggggctgctaaatgccctcaggttcactacaaagcacttgaacgatgaatcaacttccaaacagattcgagcaatgcttcagtagagctctgctcaaagaagaggatctatgtgctgacctcagaagatgtatatgtttacataatttaatacagattgatgttaatacttgtgtatttacataaccgtttccttcttgtcactgaaatatatggaccttaatttgtatcctgactgactcaacccagcagagcataaattgacttgagagccttacctttgatgtctgaaatgaaacccccttctccaaaggcaaaattcggagactttgatctttgctactggagtcctttaacaacatctataacgataaaaaattcctaattgtttgtggtagtattttaattctagatgtgttatctctctgggaagtatagtttatagaaacacaaaatatttgatttcctgtgtcggctcagctacaagaaacacaactgttatcttgacagaggaagagaggaatccaagaaaaatgcatgtggagaattaaacccaagtgtttcgaattcagcacaccccctctctgtcctcagactgcagtccacacgtgcaacttttctgtttgcacgtgttttattaatcagcatactccttttctgtttggatttatatccctctaatgttctcctttaatttcacatgaaaaaaaaatctcctgtatttttttcagttagtgggagagcagcagaaatagatagatgtgctgttgccactggactgatgaaggtggctgtcttggaactgggagacaggtcctcagaggtgcactcaggcaacaggacagccatctctctgcttcagccctctgcctacagggattagggaaatggagctctggctttgaagttatttgtgagtttagcaaccttccagttacctgcagagttctgggtgcacagccacccctcataagagccctgttctctgaagaccattcatatgagaacaaaggtctaggatactgcattagttaccagaaaactaggggaatttagagggaaaaaaaatccatgttttctatttcccaggtttttaaaaagtagctcttccccaaccccgttgctagcttgttgcaatataaaagccctggtgcacctgaatttactcctggccttactaatgattcataatgtgatcttgagaaatgtgtttaagctttctgagtcttaacctccttgtctctaaaatgggcaattaaaacaatcttcaagagccctgtaaggttaatgccgataaaatgactgactccgcccttcttccttagtacgtagtatccagcaagcatttgccccaccttgtcttgttgatgaacaatattatgaagcctgcagtcattctctctgtacatcagagcttagttcgaatggaatcatgaaaatctctgattctgacctcctaaggaaaaatgaaacccagaggatgtggtcatacaggatggctcccatgtgggcctagaacccaggatgcttcactcttgactccatgctcttccttttataccatgtggctgtgaatacatactatgggatgggattcaacccttctaagtaaatcctcagtctggtctatattgttacttgcctgtttccactagaaggagtcacccaggcatttagtgaatgataatcctagaagttgagtctgagtacatcagagtttggcattatttgcaacatcccaggaatgagctataagactccattgctttctggactttagtgaccagctgatcttcccttggatcctccaataaaggggaaaaaatacttgtcttatgttgttttagcaagggagttcagccaagtgacaggaaagattccctggtctgcatctaaacattagtcaacagaaggaaaaggctcttttccttggagattttcaagttgaaaaagtacagctgcttggatggagtttctctcatcagaatagaaatatgctaggtggtcttcaagacctttttgaacctacagattctaaaccttagaggaagccagaatatgtgatcataccaggtgaggaaagttaggagatattcatcttaagagatatcctatttggcagtcacatgttacacttgagcaacaattgtctaggctagaaatatagaaccacacaatatttatcatcattgggtcaatttctccccctctatcaagtgaggagattaaggcttaaagaaaggaaaggacttgccagccaccacagggctcatgaggggcttgaacccatgtcgtgtgtctctaccacagctgactctcagctggctaatggagaaaatgtgaggaattacctgtcaaattagattgagctcagagtaaatagatgagcacatttataactctaaattagactttctatcaaatgggaccaaacatatggaaggggctgctgtcctgcctcaatttagccaagacttgtcttgtctcaaagccaagactcagcagtacatggattctgagaagtccagggtctgaattgttgtctctgattactggaaggacaggttaactgaatgtctgtgatcactaacaggtgatgggctttgtgcccactccagagatattgtgggagacaaattcttttaacagcctgtcctcccggcatcaggagtcattgaacaatcatggattgttgtgtttgggatttttttttttttggctttgtttttggtttttgtgtgtgtgtgtgtgtgctgcatgcacatgcgtccaagacttacgggtggtttaggggaaagtgctagcaacagtgtcaatgtcattgttaactatatttcatatttgaggtctcattgttttcaaataaacagtgttttccatgactgagatatttatttttgggaaagcaacgaggtaaaaattatgtttctcagatgcactgctactttggcgttattactgtgttctcagaaactcgttgtgcaccactaggaattagtagtagaaaaaaaaaaacaataacaaaaaaaaaaaacaactggaaatggatgtcttcacattaggggtggagtattaacaaccagaaagaaagtttggatattaccttttaactactagttaacatcatgcttgatcaacatttgctcctagttatcaccattaaattaagaccttaatggtaaactgaggttactgatgcatcatcacatttaagtaaaaataatttcatgttttccccaaagaaaaattaagcctcccaatcttaggatccaattgtgcagtagaattcagagacttctcattcaatcttgtatcctatgcagctacaaatattttttaaatgttagtaataaacattggaattttgtcttaaagagttcaaaaccttggaacccagttttctcactacgtctataaaggccattacagacccaaggctgttttgcagttttcatatgttgtttgctgaagtcattgtaattttttttgcctgctttgcctttttttctacaggagttttgagtgtgaaatgaaaattaaagtttggtacatatatttaaaaa

SEQ ID NO: 132721 - DNA, 1386 bp, Homo sapiens
  Payload ID: 5935
  Gene Symbol: FAM49A
  Gene Name: family with sequence similarity 49, member A
  Uniprot ID: Q9H0Q0
  ENST ID: ENST00000406434
  CDS Start-End: 415-1386
gtactcggcggcggcggagcgggcggcagagcagggcggcggcgactcgcagggtaccaccatcttaaggacagaaaagctacaggactctaggaggccaccgtcctgatttgggaagtccaacttactttggccagacagcagctaagctggttcatcccatcagcctggattggtgaaactgaatcacaggagatatttccaggcccagtgtaaggaatcatggtcaggagtcatgaaaaaaatgccaacacactgagatggccacacatcttcactcttgcactagtttttggtgttatcttctgctatcctgtcttgaagctctttttcagctagataccttgacttttctgaaaaactaaaaccagaagcatttcacgaagctaagcacaggacagaaggtttgctgggatgggaaacctgctcaaagtccttaccagggaaattgaaaactatccacactttttcctggattttgaaaatgctcagcctacagaaggagagagagaaatctggaaccagatcagcgccgtccttcaggattctgagagcatccttgcagacctgcaggcttacaaaggcgcaggcccagagatccgagatgcaattcaaaatcccaatgacattcagcttcaagaaaaagcttggaatgcggtgtgccctcttgttgtgaggctaaagagattttacgagttttccattagactagaaaaagctcttcagagtttattggaatctctgacttgtccaccctacacaccaacccaacacctggaaagggaacaggccctggcaaaggagtttgccgaaattttacattttacccttcgattcgatgagctgaagatgaggaacccggctattcagaatgacttcagctactacagaagaacaatcagtcgcaaccgcatcaacaacatgcacctagacattgagaatgaagtcaataatgagatggccaatcgaatgtccctcttctatgcagaagccacgccaatgctgaaaacccttagcaatgccacaatgcactttgtctctgaaaacaaaactctgccaatagagaacaccacagactgcctcagcacaatgacaagtgtctgtaaagtcatgctggaaactccggagtacagaagtaggtttacgagtgaagagaccctgatgttctgcatgagggtgatggtgggagtcatcatcctctatgaccatgtccaccctgtgggagctttctgcaagacatccaagatcgatatgaaaggctgcataaaagttttgaaggagcaggccccagacagtgtggaggggctgctaaatgccctcaggttcactacaaagcacttgaacgatgaatcaacttccaaacagattcgagcaatgcttcagtag

SEQ ID NO: 132722 - DNA, 579 bp, Homo sapiens
  Payload ID: 5935
  Gene Symbol: FAM49A
  Gene Name: family with sequence similarity 49, member A
  ENST ID: ENST00000451689
  CDS Start-End: 317-579
ttaatagggtgggcagaaagggactgggagcgagactgggttcagaatctcaagtaatttggagtgtgcctagggattgggatgatttggctgggcattaatttgaagatccttttgtgacacgcctggcccctcagccacagtcaaaagcagggtaccaccatcttaaggacagaaaagctacaggactctaggaggccaccgtcctgatttgggaagtccaacttactttggccagacagcagctaagctggttcatcccatcagcctggattggtgaaactgaatcacaggagatatttccaggtttgctgggatgggaaacctgctcaaagtccttaccagggaaattgaaaactatccacactttttcctggattttgaaaatgctcagcctacagaaggagagagagaaatctggaaccagatcagcgccgtccttcaggattctgagagcatccttgcagacctgcaggcttacaaaggcgcaggcccagagatccgagatgcaattcaaaatcccaatgacattcagcttcaagaaaaagcttggaatgcggtgtgccctcttgttgtgag

SEQ ID NO: 132723 - DNA, 544 bp, Homo sapiens
  Payload ID: 5935
  Gene Symbol: FAM49A
  Gene Name: family with sequence similarity 49, member A
  ENST ID: ENST00000445605
  CDS Start-End: 263-544
agaaggggcaggggcgaccgtgctggggcgggtccgcaccagctcctgggagcagagagcagagccgggcaaagagatggggttgtccaggctaggcagggtaccaccatcttaaggacagaaaagctacaggactctaggaggccaccgtcctgatttgggaagtccaacttactttggccagacagcagctaagctggttcatcccatcagcctggattggtgaaactgaatcacaggagatatttccaggtttgctgggatgggaaacctgctcaaagtccttaccagggaaattgaaaactatccacactttttcctggattttgaaaatgctcagcctacagaaggagagagagaaatctggaaccagatcagcgccgtccttcaggattctgagagcatccttgcagacctgcaggcttacaaaggcgcaggcccagagatccgagatgcaattcaaaatcccaatgacattcagcttcaagaaaaagcttggaatgcggtgtgccctcttgttgtgaggctaaagagattttacgag

SEQ ID NO: 132724 - DNA, 2024 bp, Homo sapiens
  Payload ID: 5936
  Gene Symbol: FAM49B
  Gene Name: family with sequence similarity 49, member B
  Uniprot ID: Q9NUQ9
  ENST ID: ENST00000401979
  CDS Start-End: 378-1352
aaacggcggcggcggcggcaccggaggctccgaggctcctgcgctcccgcgccgcgctcccctcgcccgcccgggccgccaggagaagaaactgaggcctggaatttgattaactcattcaaggttacccagttggtaattcatttgcacacctgttagcaagaaacagaagttgaaggactggaacaagtgaactaggaaagagggaacgccaatccaaggatagaaggacaaggacagaatcaccagcactggctgaaggcctcctgtttcctgcgctttctccttttcctgtgaaatctccgaggagaagaaagaatgatggacagtttatcctttcactgccacaaggcctgtttacttggcagtaccttaacatggggaatcttcttaaagttttgacatgcacagaccttgagcaggggccaaattttttccttgattttgaaaatgcccagcctacagagtctgagaaggaaatttataatcaggtgaatgtagtattaaaagatgcagaaggcatcttggaggacttgcagtcatacagaggagctggccacgaaatacgagaggcaatccagcatccagcagatgagaagttgcaagagaaggcatggggtgcagttgttccactagtaggcaaattaaagaaattttacgaattttctcagaggttagaagcagcattaagaggtcttctgggagccttaacaagtaccccatattctcccacccagcatctagagcgagagcaggctcttgctaaacagtttgcagaaattcttcatttcacactccggtttgatgaactcaagatgacaaatcctgccatacagaatgatttcagctattatagaagaacattgagtcgtatgaggattaacaatgtaccggcagaaggagaaaatgaagtaaataatgaattggcaaatcgaatgtctttgttttatgctgaggcaactccaatgctgaaaaccttgagtgatgccacaacaaaatttgtatcagagaataaaaatttaccaatagaaaataccacagattgtttaagcacaatggctagtgtatgcagagtcatgctggaaacaccggaatacagaagcagatttacaaatgaagagacagtgtcattctgcttgagggtaatggtgggtgtcataatactctatgaccacgtacatccagtgggagcatttgctaaaacttccaaaattgatatgaaaggttgtatcaaagttcttaaggaccaacctcctaatagtgtggaaggtcttctaaatgctctcaggtacacaacaaaacatttgaatgatgagactacctccaagcaaattaaatccatgctgcaataacaattctggaataagcacctgctgtagacagaagacagtattctgcaatgactgagaatgcagttttttagtgattgcaattactatctcatttattcttgcttttatttctttcctctgttcctcttccctcttttttaatcatgttcttaagacttcttttctgtgccaaaatcagtaaagttacactctgaagggatatcatcctttcaaacgggccatctaaggcagctaattatgcattgcattggggtctctactgagaaaaattctgtgacttgaactaaatatttttaaatgtggattttttttgaaactaatatttaatattgcttctcctgcatggcaaaactgcctattctgctatttaaaaaccctcaatgactttattttctactgccgcctttttcatgtgcaaccaaaatgaaaatgtttaaattaactgtgttgtacaaatggtacccaacacaaactttttttaaattagtaatacttttgtttaaagttttaagtttgcattttgactttttttgtaaggatgtatgttgtgtgtttaacctttattaactaacgttaaaagctgtgatgtgtgcgtagaatattacgtatgcatgttcatgtctaaagaatggctgttgatgataaaataaaaatcagctttcatttttctaa

SEQ ID NO: 132725 - DNA, 421 bp, Homo sapiens
  Payload ID: 5936
  Gene Symbol: FAM49B
  Gene Name: family with sequence similarity 49, member B
  ENST ID: ENST00000518167
  CDS Start-End: 227-421
ccgccaacccggaaacggcggcggcggcggcaccggaggctccgaggctcctgcgctcccgcgccgcgctcccctcgcccgcccgggccgccagatagaaggacaaggacagaatcaccagcactggctgaaggtttgctggcatgggtaatctcattaaggtgctaaccagggacatagaccacaatgcagcacattttttcttggactttgaaagtaccttaacatggggaatcttcttaaagttttgacatgcacagaccttgagcaggggccaaattttttccttgattttgaaaatgcccagcctacagagtctgagaaggaaatttataatcaggtgaatgtagtattaaaagatgcagaaggcatcttggaggacttgcagtcatacagaggagctggccacgaaatacgagag

SEQ ID NO: 132726 - DNA, 2196 bp, Homo sapiens
  Payload ID: 5936
  Gene Symbol: FAM49B
  Gene Name: family with sequence similarity 49, member B
  Uniprot ID: Q9NUQ9
  ENST ID: ENST00000522746
  CDS Start-End: 550-1524
ggcaggtgttgaggggctcccggtccggctgccgccgctcccccgctccggacccggggctccccctagcgccgctgaggagccgcctctgcggctccaggagggcgcaggagcgggactgagagcgcctggaggctcgagcggagggtaattcatttgcacacctgttagcaagaaacagaagttgaaggactggaacaagtgaactaggaaagagggaacgccaatccaaggatagaaggacaaggacagaatcaccagcactggctgaaggcctcctgtttcctgcgctttctccttttcctgtgaaatctccgaggagaagaaagaatgatggacagtttatcctttcactgccacaaggcctgtttacttggcagtaggtccttaagttccttgcttttttgctgctgtttggtgactggaagaggcaccagagactctcactctggggaggtttgctggcatgggtaatctcattaaggtgctaaccagggacatagaccacaatgcagcacattttttcttggactttgaaagtaccttaacatggggaatcttcttaaagttttgacatgcacagaccttgagcaggggccaaattttttccttgattttgaaaatgcccagcctacagagtctgagaaggaaatttataatcaggtgaatgtagtattaaaagatgcagaaggcatcttggaggacttgcagtcatacagaggagctggccacgaaatacgagaggcaatccagcatccagcagatgagaagttgcaagagaaggcatggggtgcagttgttccactagtaggcaaattaaagaaattttacgaattttctcagaggttagaagcagcattaagaggtcttctgggagccttaacaagtaccccatattctcccacccagcatctagagcgagagcaggctcttgctaaacagtttgcagaaattcttcatttcacactccggtttgatgaactcaagatgacaaatcctgccatacagaatgatttcagctattatagaagaacattgagtcgtatgaggattaacaatgtaccggcagaaggagaaaatgaagtaaataatgaattggcaaatcgaatgtctttgttttatgctgaggcaactccaatgctgaaaaccttgagtgatgccacaacaaaatttgtatcagagaataaaaatttaccaatagaaaataccacagattgtttaagcacaatggctagtgtatgcagagtcatgctggaaacaccggaatacagaagcagatttacaaatgaagagacagtgtcattctgcttgagggtaatggtgggtgtcataatactctatgaccacgtacatccagtgggagcatttgctaaaacttccaaaattgatatgaaaggttgtatcaaagttcttaaggaccaacctcctaatagtgtggaaggtcttctaaatgctctcaggtacacaacaaaacatttgaatgatgagactacctccaagcaaattaaatccatgctgcaataacaattctggaataagcacctgctgtagacagaagacagtattctgcaatgactgagaatgcagttttttagtgattgcaattactatctcatttattcttgcttttatttctttcctctgttcctcttccctcttttttaatcatgttcttaagacttcttttctgtgccaaaatcagtaaagttacactctgaagggatatcatcctttcaaacgggccatctaaggcagctaattatgcattgcattggggtctctactgagaaaaattctgtgacttgaactaaatatttttaaatgtggattttttttgaaactaatatttaatattgcttctcctgcatggcaaaactgcctattctgctatttaaaaaccctcaatgactttattttctactgccgcctttttcatgtgcaaccaaaatgaaaatgtttaaattaactgtgttgtacaaatggtacccaacacaaactttttttaaattagtaatacttttgtttaaagttttaagtttgcattttgactttttttgtaaggatgtatgttgtgtgtttaacctttattaactaacgttaaaagctgtgatgtgtgcgtagaatattacgtatgcatgttcatgtctaaagaatggctgttgatgataaaataaaaatcagctttcatttttctaa

SEQ ID NO: 132727 - DNA, 699 bp, Homo sapiens
  Payload ID: 5936
  Gene Symbol: FAM49B
  Gene Name: family with sequence similarity 49, member B
  ENST ID: ENST00000520204
  CDS Start-End: 399-699
tgccacaggggcaggtgttgaggggctcccggtccggctgccgccgctcccccgctccggacccggggctccccctagcgccgctgaggagccgcctctgcggctccaggagggcgcaggagcgggactgagagcgcctggaggctcgagcggaggatagaaggacaaggacagaatcaccagcactggctgaagaatattagcactattggaatacttaaagaatttttcattataaggccattaatgaaacttgtcttgggagaattttgagaagaattagagcaacagttgtgccattgtgtacaggaaaaccacatttcacctctaggtcctacatatcaacaccttgagaacccgttttgctgtctgccagagcacagtctgggtaccttaacatggggaatcttcttaaagttttgacatgcacagaccttgagcaggggccaaattttttccttgattttgaaaatgcccagcctacagagtctgagaaggaaatttataatcaggtgaatgtagtattaaaagatgcagaaggcatcttggaggacttgcagtcatacagaggagctggccacgaaatacgagaggcaatccagcatccagcagatgagaagttgcaagagaaggcatggggtgcagttgttccactagtaggcaaattaaagaaattttacgaattttctcagaggttag

SEQ ID NO: 132728 - DNA, 581 bp, Homo sapiens
  Payload ID: 5936
  Gene Symbol: FAM49B
  Gene Name: family with sequence similarity 49, member B
  ENST ID: ENST00000523993
  CDS Start-End: 302-581
aggcccagtaagtatctgcgggagggctgaatgggtgcgtggacagcattcctctcactgaccccgctgcgaggtgagccaggcaggggctgtcaccattcctgaagtccaggagaagaaactgaggcctggaatttgattaactcattcaaggttacccagttggtaattcatttgcacacctgttagcaagaaacagaagttgaaggactggaacaagtgaactaggaaagagggaacgccaatccaaggatagaaggacaaggacagaatcaccagcactggctgaaggtaccttaacatggggaatcttcttaaagttttgacatgcacagaccttgagcaggggccaaattttttccttgattttgaaaatgcccagcctacagagtctgagaaggaaatttataatcaggtgaatgtagtattaaaagatgcagaaggcatcttggaggacttgcagtcatacagaggagctggccacgaaatacgagaggcaatccagcatccagcagatgagaagttgcaagagaaggcatggggtgcagttgttccactagtaggcaaattaaagaaatttt

SEQ ID NO: 132729 - DNA, 1902 bp, Homo sapiens
  Payload ID: 5936
  Gene Symbol: FAM49B
  Gene Name: family with sequence similarity 49, member B
  Uniprot ID: Q9NUQ9
  ENST ID: ENST00000519110
  CDS Start-End: 256-1230
ggggaggcgcgtcgcgaggcgagcgtcctccttttgtgcgagcgccggcggctcggcttctcgaaggagaagaaactgaggcctggaatttgattaactcattcaaggttacccagttggtaattcatttgcacacctgttagcaagaaacagaagttgaaggactggaacaagtgaactaggaaagagggaacgccaatccaaggatagaaggacaaggacagaatcaccagcactggctgaaggtaccttaacatggggaatcttcttaaagttttgacatgcacagaccttgagcaggggccaaattttttccttgattttgaaaatgcccagcctacagagtctgagaaggaaatttataatcaggtgaatgtagtattaaaagatgcagaaggcatcttggaggacttgcagtcatacagaggagctggccacgaaatacgagaggcaatccagcatccagcagatgagaagttgcaagagaaggcatggggtgcagttgttccactagtaggcaaattaaagaaattttacgaattttctcagaggttagaagcagcattaagaggtcttctgggagccttaacaagtaccccatattctcccacccagcatctagagcgagagcaggctcttgctaaacagtttgcagaaattcttcatttcacactccggtttgatgaactcaagatgacaaatcctgccatacagaatgatttcagctattatagaagaacattgagtcgtatgaggattaacaatgtaccggcagaaggagaaaatgaagtaaataatgaattggcaaatcgaatgtctttgttttatgctgaggcaactccaatgctgaaaaccttgagtgatgccacaacaaaatttgtatcagagaataaaaatttaccaatagaaaataccacagattgtttaagcacaatggctagtgtatgcagagtcatgctggaaacaccggaatacagaagcagatttacaaatgaagagacagtgtcattctgcttgagggtaatggtgggtgtcataatactctatgaccacgtacatccagtgggagcatttgctaaaacttccaaaattgatatgaaaggttgtatcaaagttcttaaggaccaacctcctaatagtgtggaaggtcttctaaatgctctcaggtacacaacaaaacatttgaatgatgagactacctccaagcaaattaaatccatgctgcaataacaattctggaataagcacctgctgtagacagaagacagtattctgcaatgactgagaatgcagttttttagtgattgcaattactatctcatttattcttgcttttatttctttcctctgttcctcttccctcttttttaatcatgttcttaagacttcttttctgtgccaaaatcagtaaagttacactctgaagggatatcatcctttcaaacgggccatctaaggcagctaattatgcattgcattggggtctctactgagaaaaattctgtgacttgaactaaatatttttaaatgtggattttttttgaaactaatatttaatattgcttctcctgcatggcaaaactgcctattctgctatttaaaaaccctcaatgactttattttctactgccgcctttttcatgtgcaaccaaaatgaaaatgtttaaattaactgtgttgtacaaatggtacccaacacaaactttttttaaattagtaatacttttgtttaaagttttaagtttgcattttgactttttttgtaaggatgtatgttgtgtgtttaacctttattaactaacgttaaaagctgtgatgtgtgcgtagaatattacgtatgcatgttcatgtctaaagaatggctgttgatgataaaataaaaatcagctttcatttttctaa

SEQ ID NO: 132730 - DNA, 3798 bp, Homo sapiens
  Payload ID: 5936
  Gene Symbol: FAM49B
  Gene Name: family with sequence similarity 49, member B
  Uniprot ID: Q9NUQ9
  ENST ID: ENST00000519824
  CDS Start-End: 275-1249
gtcgttaccctgtacatccgggtcacttgccctccccgctcggagctgccgcctggcttgtcgcggctctgccacaggggcaggtgttgaggggctcccggtccggctgccgccgctcccccgctccggacccggggctccccctagcgccgctgaggagccgcctctgcggctccaggagggcgcaggagcgggactgagagcgcctggaggctcgagcggaggatagaaggacaaggacagaatcaccagcactggctgaaggtaccttaacatggggaatcttcttaaagttttgacatgcacagaccttgagcaggggccaaattttttccttgattttgaaaatgcccagcctacagagtctgagaaggaaatttataatcaggtgaatgtagtattaaaagatgcagaaggcatcttggaggacttgcagtcatacagaggagctggccacgaaatacgagaggcaatccagcatccagcagatgagaagttgcaagagaaggcatggggtgcagttgttccactagtaggcaaattaaagaaattttacgaattttctcagaggttagaagcagcattaagaggtcttctgggagccttaacaagtaccccatattctcccacccagcatctagagcgagagcaggctcttgctaaacagtttgcagaaattcttcatttcacactccggtttgatgaactcaagatgacaaatcctgccatacagaatgatttcagctattatagaagaacattgagtcgtatgaggattaacaatgtaccggcagaaggagaaaatgaagtaaataatgaattggcaaatcgaatgtctttgttttatgctgaggcaactccaatgctgaaaaccttgagtgatgccacaacaaaatttgtatcagagaataaaaatttaccaatagaaaataccacagattgtttaagcacaatggctagtgtatgcagagtcatgctggaaacaccggaatacagaagcagatttacaaatgaagagacagtgtcattctgcttgagggtaatggtgggtgtcataatactctatgaccacgtacatccagtgggagcatttgctaaaacttccaaaattgatatgaaaggttgtatcaaagttcttaaggaccaacctcctaatagtgtggaaggtcttctaaatgctctcaggtacacaacaaaacatttgaatgatgagactacctccaagcaaattaaatccatgctgcaataacaattctggaataagcacctgctgtagacagaagacagtattctgcaatgactgagaatgcagttttttagtgattgcaattactatctcatttattcttgcttttatttctttcctctgttcctcttccctcttttttaatcatgttcttaagacttcttttctgtgccaaaatcagtaaagttacactctgaagggatatcatcctttcaaacgggccatctaaggcagctaattatgcattgcattggggtctctactgagaaaaattctgtgacttgaactaaatatttttaaatgtggattttttttgaaactaatatttaatattgcttctcctgcatggcaaaactgcctattctgctatttaaaaaccctcaatgactttattttctactgccgcctttttcatgtgcaaccaaaatgaaaatgtttaaattaactgtgttgtacaaatggtacccaacacaaactttttttaaattagtaatacttttgtttaaagttttaagtttgcattttgactttttttgtaaggatgtatgttgtgtgtttaacctttattaactaacgttaaaagctgtgatgtgtgcgtagaatattacgtatgcatgttcatgtctaaagaatggctgttgatgataaaataaaaatcagctttcatttttctaagtgtggcttggtttactgatgttttgtttttaggcttctgaagttttccccatgtatgtttttatggaatgcatatatacattacatgattttttcttcttttaggggagagccgggtcttttcattagaattttgatcattgtctatgtatatacttttaattgcctttaaaattttgctaagtatattaagaccagtgatcttttcattaactggacttttattcttgatttactcttgtatggatgtagtaatggaaggaaaaccgcatccttgcttgattctccatttccaggggagcgggtagcaacatgaaggcagagtagccctttaatcatgggaagagagtgattataagagggacttcccaggagaaaagcagaggccatgatctcactagtggtagaaaactaacaggtttcagtttaagatcataaaacctaaatcatgaaatctaaatctcatggttggaacaaactacttaaaggttgtctagttcaaccatgccagtgttttaaatatttaggaatatccgaggtataatacaattaaaatgtttaaccatggaagagaatcacagaggcttccatcagacccttctggattaatagggccagatcatggcacacacagcttctcaagatcacatccctgctgatctctctggccctcctgatcactgctcccccacttcacaccctgtcctgcagccaggccctactgcttgctgttcacaaattgttccatgtgatgtcacttccttagctctggtctggctggtccctgaacctgacattcccttcctccccttgtgaccctctaatgaacgccaactttcatctttgaagggttagcttctattacctccttcatgaagccttctggataacattggccatatccttctaggcatcttctaagaatagtgtaataggctgaatagtggcccccaggagatacattcactgggaatctccacgtgtgacattatttggaaaaagtttttgcagatgaaatcaaggacctggaaatgagatcaacctgtagtagggtgggccctaaattcaatgactagctcttagaaaagaaggggaaatagacacacagagctgaaggccatgggaagatggaggcagagattagagcaatgcatctatgagccaaagaaccctaagaattggaggaagtcactagaagctaggaaaacaggcatgtcacagattctccctcagagtctcgagaaggaaccaaccctaccaatatcttgatttcagacatctggcctccaggattgtgagggaataaatttctgttgttttaagccatgcagtttgtggtattttggtacagcagccttaagaatctgatacatgtatctcgtaaaacacctctgatacttacctgcgcttgtggctgtgttttctgatactatgagagccgtagtatctggataccggagagtctgcgaacttgagagaagggccgtgtctgattttccttcagtgtcccaaggaaggatcttgcacagtacccagatttggagaggtgccaagtgaatgcttcggtggactgaatgaatacaaatcaaaaataatgatgcagcgggaatggatgcagtaagattgctgtggcctatgcagttcacacagttcacactctgcatgttgaggagtaagtggacagatctcttaagcccaggggctagcaaaccggtctgtgggccaatttactcaccgtctgtttttgtacagcttgtgagctaaaaatggtttttaaaaaggttgaatacaatcaaaagaataatattttgtggcatgagaaaagcatatgaaattcaaattttagtgttcataaataaaattttattggaacctaa

SEQ ID NO: 132731 - DNA, 2021 bp, Homo sapiens
  Payload ID: 5936
  Gene Symbol: FAM49B
  Gene Name: family with sequence similarity 49, member B
  Uniprot ID: Q9NUQ9
  ENST ID: ENST00000519540
  CDS Start-End: 402-1376
cggcgccctcacttcctggcattccctcctccccctccccgtcgttaccctgtacatccgggtcacttgccctccccgctcggagctgccgcctggcttgtcgcggctctgccacaggggcaggtgttgaggggctcccggtccggctgccgccgctcccccgctccggacccggggctccccctagcgccgctgaggagccgcctctgcggctccaggagggcgcaggagcgggactgagagcgcctggaggctcgagcggagggtaattcatttgcacacctgttagcaagaaacagaagttgaaggactggaacaagtgaactaggaaagagggaacgccaatccaaggatagaaggacaaggacagaatcaccagcactggctgaaggtaccttaacatggggaatcttcttaaagttttgacatgcacagaccttgagcaggggccaaattttttccttgattttgaaaatgcccagcctacagagtctgagaaggaaatttataatcaggtgaatgtagtattaaaagatgcagaaggcatcttggaggacttgcagtcatacagaggagctggccacgaaatacgagaggcaatccagcatccagcagatgagaagttgcaagagaaggcatggggtgcagttgttccactagtaggcaaattaaagaaattttacgaattttctcagaggttagaagcagcattaagaggtcttctgggagccttaacaagtaccccatattctcccacccagcatctagagcgagagcaggctcttgctaaacagtttgcagaaattcttcatttcacactccggtttgatgaactcaagatgacaaatcctgccatacagaatgatttcagctattatagaagaacattgagtcgtatgaggattaacaatgtaccggcagaaggagaaaatgaagtaaataatgaattggcaaatcgaatgtctttgttttatgctgaggcaactccaatgctgaaaaccttgagtgatgccacaacaaaatttgtatcagagaataaaaatttaccaatagaaaataccacagattgtttaagcacaatggctagtgtatgcagagtcatgctggaaacaccggaatacagaagcagatttacaaatgaagagacagtgtcattctgcttgagggtaatggtgggtgtcataatactctatgaccacgtacatccagtgggagcatttgctaaaacttccaaaattgatatgaaaggttgtatcaaagttcttaaggaccaacctcctaatagtgtggaaggtcttctaaatgctctcaggtacacaacaaaacatttgaatgatgagactacctccaagcaaattaaatccatgctgcaataacaattctggaataagcacctgctgtagacagaagacagtattctgcaatgactgagaatgcagttttttagtgattgcaattactatctcatttattcttgcttttatttctttcctctgttcctcttccctcttttttaatcatgttcttaagacttcttttctgtgccaaaatcagtaaagttacactctgaagggatatcatcctttcaaacgggccatctaaggcagctaattatgcattgcattggggtctctactgagaaaaattctgtgacttgaactaaatatttttaaatgtggattttttttgaaactaatatttaatattgcttctcctgcatggcaaaactgcctattctgctatttaaaaaccctcaatgactttattttctactgccgcctttttcatgtgcaaccaaaatgaaaatgtttaaattaactgtgttgtacaaatggtacccaacacaaactttttttaaattagtaatacttttgtttaaagttttaagtttgcattttgactttttttgtaaggatgtatgttgtgtgtttaacctttattaactaacgttaaaagctgtgatgtgtgcgtagaatattacgtatgcatgttcatgtctaaagaatggctgttgatgataa

SEQ ID NO: 132732 - DNA, 573 bp, Homo sapiens
  Payload ID: 5936
  Gene Symbol: FAM49B
  Gene Name: family with sequence similarity 49, member B
  ENST ID: ENST00000519020
  CDS Start-End: 370-573
ttatttctcgcctggcactcgcccgggctgctgctgctgctgctgctgccgccgcggcgggggcagctcgcaaacctgtggcggtgacgtgagccccgccaacccggaaacggcggcggcggcggcaccggaggctccgaggctcctgcgctcccgcgccgcgctcccctcgcccgcccgggccgccaggagaagaaactgaggcctggaatttgattaactcattcaaggttacccagttgatagaaggacaaggacagaatcaccagcactggctgaagttcctcctaacaggaacccagctggcaaagatgtctgggaaatgtcatttgcattctcagccccagcagtgcagaaaggtaccttaacatggggaatcttcttaaagttttgacatgcacagaccttgagcaggggccaaattttttccttgattttgaaaatgcccagcctacagagtctgagaaggaaatttataatcaggtgaatgtagtattaaaagatgcagaaggcatcttggaggacttgcagtcatacagaggagctggccacgaaatacgagaggcaatccag

SEQ ID NO: 132733 - DNA, 1968 bp, Homo sapiens
  Payload ID: 5936
  Gene Symbol: FAM49B
  Gene Name: family with sequence similarity 49, member B
  Uniprot ID: Q9NUQ9
  ENST ID: ENST00000523509
  CDS Start-End: 322-1296
ccgcgccgcgctcccctcgcccgcccgggccgccaggagaagaaactgaggcctggaatttgattaactcattcaaggttacccagttgatagaaggacaaggacagaatcaccagcactggctgaaggcctcctgtttcctgcgctttctccttttcctgtgaaatctccgaggagaagaaagaatgatggacagtttatcctttcactgccacaaggcctgtttacttggcagtaggtccttaagttccttgcttttttgctgctgtttggtgactggaagaggcaccagagactctcactctggggaggtaccttaacatggggaatcttcttaaagttttgacatgcacagaccttgagcaggggccaaattttttccttgattttgaaaatgcccagcctacagagtctgagaaggaaatttataatcaggtgaatgtagtattaaaagatgcagaaggcatcttggaggacttgcagtcatacagaggagctggccacgaaatacgagaggcaatccagcatccagcagatgagaagttgcaagagaaggcatggggtgcagttgttccactagtaggcaaattaaagaaattttacgaattttctcagaggttagaagcagcattaagaggtcttctgggagccttaacaagtaccccatattctcccacccagcatctagagcgagagcaggctcttgctaaacagtttgcagaaattcttcatttcacactccggtttgatgaactcaagatgacaaatcctgccatacagaatgatttcagctattatagaagaacattgagtcgtatgaggattaacaatgtaccggcagaaggagaaaatgaagtaaataatgaattggcaaatcgaatgtctttgttttatgctgaggcaactccaatgctgaaaaccttgagtgatgccacaacaaaatttgtatcagagaataaaaatttaccaatagaaaataccacagattgtttaagcacaatggctagtgtatgcagagtcatgctggaaacaccggaatacagaagcagatttacaaatgaagagacagtgtcattctgcttgagggtaatggtgggtgtcataatactctatgaccacgtacatccagtgggagcatttgctaaaacttccaaaattgatatgaaaggttgtatcaaagttcttaaggaccaacctcctaatagtgtggaaggtcttctaaatgctctcaggtacacaacaaaacatttgaatgatgagactacctccaagcaaattaaatccatgctgcaataacaattctggaataagcacctgctgtagacagaagacagtattctgcaatgactgagaatgcagttttttagtgattgcaattactatctcatttattcttgcttttatttctttcctctgttcctcttccctcttttttaatcatgttcttaagacttcttttctgtgccaaaatcagtaaagttacactctgaagggatatcatcctttcaaacgggccatctaaggcagctaattatgcattgcattggggtctctactgagaaaaattctgtgacttgaactaaatatttttaaatgtggattttttttgaaactaatatttaatattgcttctcctgcatggcaaaactgcctattctgctatttaaaaaccctcaatgactttattttctactgccgcctttttcatgtgcaaccaaaatgaaaatgtttaaattaactgtgttgtacaaatggtacccaacacaaactttttttaaattagtaatacttttgtttaaagttttaagtttgcattttgactttttttgtaaggatgtatgttgtgtgtttaacctttattaactaacgttaaaagctgtgatgtgtgcgtagaatattacgtatgcatgttcatgtctaaagaatggctgttgatgataaaataaaaatcagctttcatttttctaa

SEQ ID NO: 132734 - DNA, 561 bp, Homo sapiens
  Payload ID: 5936
  Gene Symbol: FAM49B
  Gene Name: family with sequence similarity 49, member B
  ENST ID: ENST00000519070
  CDS Start-End: 419-561
ttgccctccccgctcggagctgccgcctggcttgtcgcggctctgccacaggggcaggtgttgaggggctcccggtccggctgccgccgctcccccgctccggacccggggctccccctagcgccgctgaggagccgcctctgcggctccaggagggcgcaggagcgggactgagagcgcctggaggctcgagcggagggtaattcatttgcacacctgttagcaagaaacagaagttgaaggactggaacaagtgaactaggaaagagggaacgccaatccaaggatagaaggacaaggacagaatcaccagcactggctgaaggtttgctggcatgggtaatctcattaaggtgctaaccagggacatagaccacaatgcagcacattttttcttggactttgaaagtaccttaacatggggaatcttcttaaagttttgacatgcacagaccttgagcaggggccaaattttttccttgattttgaaaatgcccagcctacagagtctgagaaggaaatttataatcaggtgaatgtagtattaaaagatgcagaagg

SEQ ID NO: 132735 - DNA, 1647 bp, Homo sapiens
  Payload ID: 5936
  Gene Symbol: FAM49B
  Gene Name: family with sequence similarity 49, member B
  Uniprot ID: Q9NUQ9
  ENST ID: ENST00000522250
  CDS Start-End: 453-989
tccccctagcgccgctgaggagccgcctctgcggctccaggagggcgcaggagcgggactgagagcgcctggaggctcgagcggaggatgcccagcctacagagtctgagaaggaaatttataatcaggtgaatgtagtattaaaagatgcagaaggcatcttggaggacttgcagtcatacagaggagctggccacgaaatacgagaggcaatccagcatccagcagatgagaagttgcaagagaaggcatggggtgcagttgttccactagtaggcaaattaaagaaattttacgaattttctcagaggttagaagcagcattaagaggtcttctgggagccttaacaagtaccccatattctcccacccagcatctagagcgagagcaggctcttgctaaacagtttgcagaaattcttcatttcacactccggtttgatgaactcaagatgacaaatcctgccatacagaatgatttcagctattatagaagaacattgagtcgtatgaggattaacaatgtaccggcagaaggagaaaatgaagtaaataatgaattggcaaatcgaatgtctttgttttatgctgaggcaactccaatgctgaaaaccttgagtgatgccacaacaaaatttgtatcagagaataaaaatttaccaatagaaaataccacagattgtttaagcacaatggctagtgtatgcagagtcatgctggaaacaccggaatacagaagcagatttacaaatgaagagacagtgtcattctgcttgagggtaatggtgggtgtcataatactctatgaccacgtacatccagtgggagcatttgctaaaacttccaaaattgatatgaaaggttgtatcaaagttcttaaggaccaacctcctaatagtgtggaaggtcttctaaatgctctcaggtacacaacaaaacatttgaatgatgagactacctccaagcaaattaaatccatgctgcaataacaattctggaataagcacctgctgtagacagaagacagtattctgcaatgactgagaatgcagttttttagtgattgcaattactatctcatttattcttgcttttatttctttcctctgttcctcttccctcttttttaatcatgttcttaagacttcttttctgtgccaaaatcagtaaagttacactctgaagggatatcatcctttcaaacgggccatctaaggcagctaattatgcattgcattggggtctctactgagaaaaattctgtgacttgaactaaatatttttaaatgtggattttttttgaaactaatatttaatattgcttctcctgcatggcaaaactgcctattctgctatttaaaaaccctcaatgactttattttctactgccgcctttttcatgtgcaaccaaaatgaaaatgtttaaattaactgtgttgtacaaatggtacccaacacaaactttttttaaattagtaatacttttgtttaaagttttaagtttgcattttgactttttttgtaaggatgtatgttgtgtgtttaacctttattaactaacgttaaaagctgtgatgtgtgcgtagaatattacgtatgcatgttcatgtctaaagaatggctgttgatgataaaataaaaatcagc

SEQ ID NO: 132736 - DNA, 579 bp, Homo sapiens
  Payload ID: 5936
  Gene Symbol: FAM49B
  Gene Name: family with sequence similarity 49, member B
  ENST ID: ENST00000520254
  CDS Start-End: 344-579
catccgggtcacttgccctccccgctcggagctgccgcctggcttgtcgcggctctgccacaggggcaggtgttgaggggctcccggtccggctgccgccgctcccccgctccggacccggggctccccctagcgccgctgaggagccgcctctgcggctccaggagggcgcaggagcgggactgagagcgcctggaggctcgagcggaggatagaaggacaaggacagaatcaccagcactggctgaaggtttgctggcatgggtaatctcattaaggtgctaaccagggacatagaccacaatgcagcacattttttcttggactttgaaagtaccttaacatggggaatcttcttaaagttttgacatgcacagaccttgagcaggggccaaattttttccttgattttgaaaatgcccagcctacagagtctgagaaggaaatttataatcaggtgaatgtagtattaaaagatgcagaaggcatcttggaggacttgcagtcatacagaggagctggccacgaaatacgagaggcaatccagcatccagcagatgagaagttgcaagagaaggc

SEQ ID NO: 132737 - DNA, 367 bp, Homo sapiens
  Payload ID: 5936
  Gene Symbol: FAM49B
  Gene Name: family with sequence similarity 49, member B
  ENST ID: ENST00000522361
  CDS Start-End: 231-367
aaacggcggcggcggcggcaccggaggctccgaggctcctgcgctcccgcgccgcgctcccctcgcccgcccgggccgccaggagaagaaactgaggcctggaatttgattaactcattcaaggttacccagttgggtggtgaaaacagtaggtattctgaaccaaccttgcacttctcagatagaaggacaaggacagaatcaccagcactggctgaaggtaccttaacatggggaatcttcttaaagttttgacatgcacagaccttgagcaggggccaaattttttccttgattttgaaaatgcccagcctacagagtctgagaaggaaatttataatcaggtgaatgtagtattaaaagatgc

SEQ ID NO: 132738 - DNA, 1700 bp, Homo sapiens
  Payload ID: 5936
  Gene Symbol: FAM49B
  Gene Name: family with sequence similarity 49, member B
  Uniprot ID: Q9NUQ9
  ENST ID: ENST00000522941
  CDS Start-End: 525-1061
ttgaggggctcccggtccggctgccgccgctcccccgctccggacccggggctccccctagcgccgctgaggagccgcctctgcggctccaggagggcgcaggagcgggactgagagcgcctggaggctcgagcggagggtaattcatttgcacacctgttagcaagaaacagaagttgaaggactggaacaagtgaactaggaaagagggaacgccaatccaaggatagaaggacaaggacagaatcaccagcactggctgaagatgcccagcctacagagtctgagaaggaaatttataatcaggtgaatgtagtattaaaagatgcagaaggcatcttggaggacttgcagtcatacagaggagctggccacgaaatacgagagaagcagcattaagaggtcttctgggagccttaacaagtaccccatattctcccacccagcatctagagcgagagcaggctcttgctaaacagtttgcagaaattcttcatttcacactccggtttgatgaactcaagatgacaaatcctgccatacagaatgatttcagctattatagaagaacattgagtcgtatgaggattaacaatgtaccggcagaaggagaaaatgaagtaaataatgaattggcaaatcgaatgtctttgttttatgctgaggcaactccaatgctgaaaaccttgagtgatgccacaacaaaatttgtatcagagaataaaaatttaccaatagaaaataccacagattgtttaagcacaatggctagtgtatgcagagtcatgctggaaacaccggaatacagaagcagatttacaaatgaagagacagtgtcattctgcttgagggtaatggtgggtgtcataatactctatgaccacgtacatccagtgggagcatttgctaaaacttccaaaattgatatgaaaggttgtatcaaagttcttaaggaccaacctcctaatagtgtggaaggtcttctaaatgctctcaggtacacaacaaaacatttgaatgatgagactacctccaagcaaattaaatccatgctgcaataacaattctggaataagcacctgctgtagacagaagacagtattctgcaatgactgagaatgcagttttttagtgattgcaattactatctcatttattcttgcttttatttctttcctctgttcctcttccctcttttttaatcatgttcttaagacttcttttctgtgccaaaatcagtaaagttacactctgaagggatatcatcctttcaaacgggccatctaaggcagctaattatgcattgcattggggtctctactgagaaaaattctgtgacttgaactaaatatttttaaatgtggattttttttgaaactaatatttaatattgcttctcctgcatggcaaaactgcctattctgctatttaaaaaccctcaatgactttattttctactgccgcctttttcatgtgcaaccaaaatgaaaatgtttaaattaactgtgttgtacaaatggtacccaacacaaactttttttaaattagtaatacttttgtttaaagttttaagtttgcattttgactttttttgtaaggatgtatgttgtgtgtttaacctttattaactaacgttaaaagctgtgatgtgtgcgtagaatattacgtatgcatgttcatgtctaaagaatggctgttga

SEQ ID NO: 132739 - DNA, 548 bp, Homo sapiens
  Payload ID: 5936
  Gene Symbol: FAM49B
  Gene Name: family with sequence similarity 49, member B
  ENST ID: ENST00000517672
  CDS Start-End: 360-548
ttgattaactcattcaaggttacccagttggtaattcatttgcacacctgttagcaagaaacagaagttgaaggactggaacaagtgaactaggaaagagggaacgccaatccaaggatagaaggacaaggacagaatcaccagcactggctgaagaatattagcactattggaatacttaaagaatttttcattataaggccattaatgaaacttgtcttgggagaattttgagaagaattagagcaacagttgtgccattgtgtacaggaaaaccacatttcacctctaggtcctacatatcaacaccttgagaacccgttttgctgtctgccagagcacagtctgggtaccttaacatggggaatcttcttaaagttttgacatgcacagaccttgagcaggggccaaattttttccttgattttgaaaatgcccagcctacagagtctgagaaggaaatttataatcaggtgaatgtagtattaaaagatgcagaaggcatcttggaggacttgcagtcatacagaggagctggccacgaaata

SEQ ID NO: 132740 - DNA, 1817 bp, Homo sapiens
  Payload ID: 5936
  Gene Symbol: FAM49B
  Gene Name: family with sequence similarity 49, member B
  Uniprot ID: Q9NUQ9
  ENST ID: ENST00000517654
  CDS Start-End: 185-1159
aaacggcggcggcggcggcaccggaggctccgaggctcctgcgctcccgcgccgcgctcccctcgcccgcccgggccgccaggagaagaaactgaggcctggaatttgattaactcattcaaggttacccagttgatagaaggacaaggacagaatcaccagcactggctgaaggtaccttaacatggggaatcttcttaaagttttgacatgcacagaccttgagcaggggccaaattttttccttgattttgaaaatgcccagcctacagagtctgagaaggaaatttataatcaggtgaatgtagtattaaaagatgcagaaggcatcttggaggacttgcagtcatacagaggagctggccacgaaatacgagaggcaatccagcatccagcagatgagaagttgcaagagaaggcatggggtgcagttgttccactagtaggcaaattaaagaaattttacgaattttctcagaggttagaagcagcattaagaggtcttctgggagccttaacaagtaccccatattctcccacccagcatctagagcgagagcaggctcttgctaaacagtttgcagaaattcttcatttcacactccggtttgatgaactcaagatgacaaatcctgccatacagaatgatttcagctattatagaagaacattgagtcgtatgaggattaacaatgtaccggcagaaggagaaaatgaagtaaataatgaattggcaaatcgaatgtctttgttttatgctgaggcaactccaatgctgaaaaccttgagtgatgccacaacaaaatttgtatcagagaataaaaatttaccaatagaaaataccacagattgtttaagcacaatggctagtgtatgcagagtcatgctggaaacaccggaatacagaagcagatttacaaatgaagagacagtgtcattctgcttgagggtaatggtgggtgtcataatactctatgaccacgtacatccagtgggagcatttgctaaaacttccaaaattgatatgaaaggttgtatcaaagttcttaaggaccaacctcctaatagtgtggaaggtcttctaaatgctctcaggtacacaacaaaacatttgaatgatgagactacctccaagcaaattaaatccatgctgcaataacaattctggaataagcacctgctgtagacagaagacagtattctgcaatgactgagaatgcagttttttagtgattgcaattactatctcatttattcttgcttttatttctttcctctgttcctcttccctcttttttaatcatgttcttaagacttcttttctgtgccaaaatcagtaaagttacactctgaagggatatcatcctttcaaacgggccatctaaggcagctaattatgcattgcattggggtctctactgagaaaaattctgtgacttgaactaaatatttttaaatgtggattttttttgaaactaatatttaatattgcttctcctgcatggcaaaactgcctattctgctatttaaaaaccctcaatgactttattttctactgccgcctttttcatgtgcaaccaaaatgaaaatgtttaaattaactgtgttgtacaaatggtacccaacacaaactttttttaaattagtaatacttttgtttaaagttttaagtttgcattttgactttttttgtaaggatgtatgttgtgtgtttaacctttattaactaacgttaaaagctgtgatgtgtgcgtagaatattacgtatgcatgttcatgtctaaagaatggctgttgatgataaaataaaaatcagc

SEQ ID NO: 132741 - DNA, 574 bp, Homo sapiens
  Payload ID: 5936
  Gene Symbol: FAM49B
  Gene Name: family with sequence similarity 49, member B
  ENST ID: ENST00000518283
  CDS Start-End: 279-574
gtgcgagcgccggcggctcggcttctcgaaggagaagaaactgaggcctggaatttgattaactcattcaaggttacccagttgataactgcagcattggactagaggtggagagagtggtactgggggagtggtgaagcaggtaattcatttgcacacctgttagcaagaaacagaagttgaaggactggaacaagtgaactaggaaagagggaacgccaatccaaggatagaaggacaaggacagaatcaccagcactggctgaaggtaccttaacatggggaatcttcttaaagttttgacatgcacagaccttgagcaggggccaaattttttccttgattttgaaaatgcccagcctacagagtctgagaaggaaatttataatcaggtgaatgtagtattaaaagatgcagaaggcatcttggaggacttgcagtcatacagaggagctggccacgaaatacgagaggcaatccagcatccagcagatgagaagttgcaagagaaggcatggggtgcagttgttccactagtaggcaaattaaagaaattttacgaattttctcagag

SEQ ID NO: 132742 - DNA, 696 bp, Homo sapiens
  Payload ID: 5936
  Gene Symbol: FAM49B
  Gene Name: family with sequence similarity 49, member B
  ENST ID: ENST00000519142
  CDS Start-End: 231-696
gaaactgaggcctggaatttgattaactcattcaaggttacccagttgggtggtgaaaacagtaggtattctgaaccaaccttgcacttctcaggtaattcatttgcacacctgttagcaagaaacagaagttgaaggactggaacaagtgaactaggaaagagggaacgccaatccaaggatagaaggacaaggacagaatcaccagcactggctgaaggtaccttaacatggggaatcttcttaaagttttgacatgcacagaccttgagcaggggccaaattttttccttgattttgaaaatgcccagcctacagagtctgagaaggaaatttataatcaggtgaatgtagtattaaaagatgcagaaggcatcttggaggacttgcagtcatacagaggagctggccacgaaatacgagaggcaatccagcatccagcagatgagaagttgcaagagaaggcatggggtgcagttgttccactagtaggcaaattaaagaaattttacgaattttctcagaggttagaagcagcattaagaggtcttctgggagccttaacaagtaccccatattctcccacccagcatctagagcgagagcaggctcttgctaaacagtttgcagaaattcttcatttcacactccggtttgatgaactcaaggtagaattatctattggccctgattgtt

SEQ ID NO: 132743 - DNA, 750 bp, Homo sapiens
  Payload ID: 5936
  Gene Symbol: FAM49B
  Gene Name: family with sequence similarity 49, member B
  ENST ID: ENST00000615041
  CDS Start-End: 1-654
atgcagaaggcatcttggaggacttgcagtcatacagaggagctggccacgaaatacgagagggcaatccagcatccagcagatgagaagttgcaagagaaggcatggggtgcagttgttccactagtaggcaaagaaattttacgaattttctcagaggttagaagcagcattaagaggtcttctgggagccttaacaagtaccccatattctcccacccagcatctagagcgagacaggctcttgctaaacagtttgcagaaattcttcatttcacactccggtttgatgaactcaagatgacaaatcctgccatacagaatgatttcagctattatagaagaacattgagtcgtatgaggattacaatgtaccgggcagaaggagaaaatgaagtaaataatgaattggcaaatcgaatgtctttgttttatgctgaggcaactccaatgctgaaaaccttgagtgatgccacaacaaaatttgtatcagagaataaaaatttaccaatagaaaataccacagattgtttaagcacaatggctagtgtatgcagagtcatgctggaaacaccggaatacagaagcagatttacaaatgaagagacagtgtcattccttgagggtaatggtgggtgtcataatactctatgaccacgtacatccagtgggagcatttgctaaaacttccaaaattgatatgaaaggttgtatcaaagttcttaaggaccaacctcctaatagtgtgga

SEQ ID NO: 132744 - DNA, 1240 bp, Homo sapiens
  Payload ID: 5937
  Gene Symbol: FAM50A
  Gene Name: family with sequence similarity 50, member A
  ENST ID: ENST00000158526
  CDS Start-End: 461-1240
ccggggcaggcccctggctcgctgacttccagcagggcacacagaagcaagccagcgacagtctcatctgtgaaatgggcctggagccgggcgttctccgaggctgaggccactagctgatgaccggcctccggcaggagggagccgagccagtgtttctgttgggaggcacggcggggacgggcctctcgtcgcctcgcctgggcacccagcgtcctggctctggcccctcggccctcagagccaggcctctgccccctcggccctcagagccaggcctctgccctggtcctatggacaccgggcagggcggttcgtctccccctggagaggcggggaggcctgagccagacctggcaagtccactggccaggaggctccttccagaaccccttgcacctgtgaggcaggcacgaccctcccgggtgccagcggttcacccactgcttccgagaacatcatgaaatccaacattgacaagaagttctctgcgcactacgacgcggtggaggcagagctcaagtccagcaccgtgggtctcgtgaccctgaatgacatgaaggccaagcaggaggctctggtgaaggagcgggagaagcagctggccaagaaggagcagtccaaggagctgcagatgaagctggagaagcttcgagagaaggagcgtaagaaggaagccaagcggaagatctccagcctgtccttcaccctggaggaggaagaagagggaggcgaggaggaagaggaggcggccatgtatgaggaggagatggaaagggaagagatcaccacgaagaagagaaaactggggaagaacccagacgttgacacaagcttcttgcctgatcgagaccgtgaggaggaggagaatcggcttcgggaagagctgcggcaggagtgggaagccaagcaggagaagatcaagagtgaggagatcgagatcaccttcagctactgggatggctctgggcaccggcggacagtcaagatgagaaagggcaacaccatgcagcagttcctgcagaaggcgctcgagatccttcggaaagacttcagtgagctgaggtccgcaggggtggagcagctcatgtacatcaaggaggacttgatcatccctcaccatcacagcttctacgacttcatcgtcaccaaggcacgggggaagagtggaccactcttcaactttgatgttcatgacgatgtgcggttgctcagtgacgccactgtggagaaggatgag

SEQ ID NO: 132745 - DNA, 1352 bp, Homo sapiens
  Payload ID: 5937
  Gene Symbol: FAM50A
  Gene Name: family with sequence similarity 50, member A
  Uniprot ID: Q14320
  ENST ID: ENST00000393600
  CDS Start-End: 111-1130
cacggcgcgggcgtcagctgactgttcggccgccaccgccgctgccgctgccgctgtcgctgtcgccgccgccgccgcccgccgccgccgccgccgccgccgccgctgccatggctcaatacaagggcgccgcgagcgaggccggccgcgccatgcacctgatgaagaagcgggagaagcagcgcgagcagatggagcagatgaagcagcgcatcgcggaggagaacatcatgaaatccaacattgacaagaagttctctgcgcactacgacgcggtggaggcagagctcaagtccagcaccgtgggtctcgtgaccctgaatgacatgaaggccaagcaggaggctctggtgaaggagcgggagaagcagctggccaagaaggagcagtccaaggagctgcagatgaagctggagaagcttcgagagaaggagcgtaagaaggaagccaagcggaagatctccagcctgtccttcaccctggaggaggaagaagagggaggcgaggaggaagaggaggcggccatgtatgaggaggagatggaaagggaagagatcaccacgaagaagagaaaactggggaagaacccagacgttgacacaagcttcttgcctgatcgagaccgtgaggaggaggagaatcggcttcgggaagagctgcggcaggagtgggaagccaagcaggagaagatcaagagtgaggagatcgagatcaccttcagctactgggatggctctgggcaccggcggacagtcaagatgagaaagggcaacaccatgcagcagttcctgcagaaggcgctcgagatccttcggaaagacttcagtgagctgaggtccgcaggggtggagcagctcatgtacatcaaggaggacttgatcatccctcaccatcacagcttctacgacttcatcgtcaccaaggcacgggggaagagtggaccactcttcaactttgatgttcatgacgatgtgcggttgctcagtgacgccactgtggagaaggatgagtcccatgcaggcaaggtggtgctgaggagctggtacgagaagaacaagcacatctttcccgccagccgctgggaaccctacgaccctgaaaagaagtgggacaagtacacgatccgctgagcatccaggaggctgcgcggccccggctcctcagctccctcagtgtgccccgtggtgtcaccgggactccaggcacccgctcccctgcgaccatgccaggcacgctgggaggaggacggcagctgctcgtgtcctgcccctgccacatcagtgactgctttattcttttccaataaagaagtgcacgtgtcagagctggagcgcctgcattgtgagaaacca

SEQ ID NO: 132746 - DNA, 1628 bp, Homo sapiens
  Payload ID: 5938
  Gene Symbol: FAM50B
  Gene Name: family with sequence similarity 50, member B
  Uniprot ID: Q9Y247
  ENST ID: ENST00000380272
  CDS Start-End: 123-1100
ggctgtcgcgagagcccggggcgagtgggcctctgctcgtgggtggttctcgtggaggtcagctcccgcgtgtctccgctcgacagggtgcttgggcagagcccatcgggtaggcgcgggccatggcgcagtacaagggcaccatgcgcgaggcaggccgtgccatgcacctcctcaagaagcgcgaaaggcagcgggagcagatggaggtgctgaagcagcgcatcgccgaggagaccatcctcaagtcgcaggtggacaagaggttctcggcgcattacgacgccgtggaggccgagctgaagtccagcacggtgggcctggtgaccctgaacgacatgaaggcccggcaggaggccctggtcagggagcgcgagcggcagctggccaagcgccagcacctggaggagcagcggctgcagcaggagcggcagcgggagcaggagcagcggcgcgagcgcaagcgtaagatctcctgcctgtcctttgcactagacgacctcgatgaccaggccgacgcggccgaggccaggcgcgccggaaacctgggcaagaaccccgacgtggacaccagcttcctgccagaccgcgaccgcgaggaggaggagaaccggctccgagaggagctgcgccaagagtgggaggcgcagcgcgagaaagtgaaggacgaggagatggaggtcaccttcagctactgggacggctcgggccaccggcgcacggtgcgggtgcgcaagggcaacacggtgcagcagttcctgaagaaggcgctgcaggggctgcgcaaggacttcctggagctgcgctccgccggcgtggagcagctcatgttcatcaaggaggacctcatcctgccgcactaccacaccttctacgacttcatcatcgccagggcgaggggcaagagcgggccgctcttcagcttcgatgtgcacgatgacgtgcgcctgctcagcgacgccaccatggagaaggacgagtcgcacgcgggcaaggtggtgctgcgcagctggtacgagaagaacaagcacatcttccccgccagccgctgggaggcctatgaccccgagaagaagtgggacaagtacaccatccgctaacacccgcctgccagagcggaaaccgggggtggggggagacactcatttctaggccccatcaccagtcacttgatttcgtgaccttgatttcttcccccaaatttaataaagacagagggttctcatgattcacattggttgtgctattgctgatgttatgctttggttgcttggttggtcttttctgagtattttagtgttgccacctggatttgctgcattgctctgctgagctgtattgaaaccatgactgggcccactgtcagacagaaattagaataggaggcacattttttacctggtggttatgagcatggacttgggggccacagtgactgagtttgattcccgacacagcctcctccttgctgtgtagttttgggtaagcttattaaacccccatgcctcagtttggtcacctgtaaaaggaaataacaagagcacttactttataagattgatgtgagtattaagtgaattaatatttgtaaaacgcttagctcttaataaatgtttctgttgttatta

SEQ ID NO: 132747 - DNA, 1932 bp, Homo sapiens
  Payload ID: 5938
  Gene Symbol: FAM50B
  Gene Name: family with sequence similarity 50, member B
  Uniprot ID: Q9Y247
  ENST ID: ENST00000380274
  CDS Start-End: 427-1404
acggctgtcgcgagagcccggggcgagtgggcctctgctcgtgggtggttctcgtggaggtcagctcccgcgtgtctccgctcgacagggtgcttgggcaggtaagggtccgctcagtagcccaaccctctctgtatgcagctccccaaattcagcgctgcgctcaggcatggcagccacccgttacgtggggccgttcgcatttgcatttattgaggtcaaataaaatgctggaaattggtgcctggtgacactgtcaggttggtggttaccctagcaggtcggcccagcccctgaacgcttccatcactgccgaaagccctgtgaggaggcgcagagctgagcattccccgccgttgcgtgggcccccctctacctgccgcgtttttcctctttgctgcagagcccatcgggtaggcgcgggccatggcgcagtacaagggcaccatgcgcgaggcaggccgtgccatgcacctcctcaagaagcgcgaaaggcagcgggagcagatggaggtgctgaagcagcgcatcgccgaggagaccatcctcaagtcgcaggtggacaagaggttctcggcgcattacgacgccgtggaggccgagctgaagtccagcacggtgggcctggtgaccctgaacgacatgaaggcccggcaggaggccctggtcagggagcgcgagcggcagctggccaagcgccagcacctggaggagcagcggctgcagcaggagcggcagcgggagcaggagcagcggcgcgagcgcaagcgtaagatctcctgcctgtcctttgcactagacgacctcgatgaccaggccgacgcggccgaggccaggcgcgccggaaacctgggcaagaaccccgacgtggacaccagcttcctgccagaccgcgaccgcgaggaggaggagaaccggctccgagaggagctgcgccaagagtgggaggcgcagcgcgagaaagtgaaggacgaggagatggaggtcaccttcagctactgggacggctcgggccaccggcgcacggtgcgggtgcgcaagggcaacacggtgcagcagttcctgaagaaggcgctgcaggggctgcgcaaggacttcctggagctgcgctccgccggcgtggagcagctcatgttcatcaaggaggacctcatcctgccgcactaccacaccttctacgacttcatcatcgccagggcgaggggcaagagcgggccgctcttcagcttcgatgtgcacgatgacgtgcgcctgctcagcgacgccaccatggagaaggacgagtcgcacgcgggcaaggtggtgctgcgcagctggtacgagaagaacaagcacatcttccccgccagccgctgggaggcctatgaccccgagaagaagtgggacaagtacaccatccgctaacacccgcctgccagagcggaaaccgggggtggggggagacactcatttctaggccccatcaccagtcacttgatttcgtgaccttgatttcttcccccaaatttaataaagacagagggttctcatgattcacattggttgtgctattgctgatgttatgctttggttgcttggttggtcttttctgagtattttagtgttgccacctggatttgctgcattgctctgctgagctgtattgaaaccatgactgggcccactgtcagacagaaattagaataggaggcacattttttacctggtggttatgagcatggacttgggggccacagtgactgagtttgattcccgacacagcctcctccttgctgtgtagttttgggtaagcttattaaacccccatgcctcagtttggtcacctgtaaaaggaaataacaagagcacttactttataagattgatgtgagtattaagtgaattaatatttgtaaaacgcttagctcttaataaatgtttctgttgttatta

SEQ ID NO: 132748 - DNA, 2802 bp, Homo sapiens
  Payload ID: 5939
  Gene Symbol: FAM53A
  Gene Name: family with sequence similarity 53, member A
  Uniprot ID: Q6NSI3
  ENST ID: ENST00000308132
  CDS Start-End: 194-1390
tcgctccgcacccccgcggccgcgctcaggcacaaatcctgaagagcccgtgggcgtggactgctcatctgtaaagaaagtggagacatgaccttgagatttggctgacccagcaatgctggggccttcgcaagtctgatgttccaggactccagtgcctgttggtgtggacggaggacacggggccccgaccatggtcacactcatcactgagaagctgcagagccagagcctggacgacctcacctgcaaggcggaggctggcccgttgcagtattctgcggaaaccctgaacaagagcggtcgtctgttccctttggagctcaacgaccagagtccctggaaggtcttcagtggaggaccgcccgtcagaagccaggcagccacgggccctgatttctccttcctgccgggcctgtctgctgccgctcacaccatgggtcttcagtggcagccacagtccccgcgcccaggcgcaggcctgggtgcagccagcaccgtggaccccagtgaaagcacaggctcgtccacggccccaccgaccaagcggcattgccggtccttgtcagaacccgaggagcttgtgcgctgccggtccccctggcgccccggcagctccaaggtctggactccagtctccaagaggcggtgcgacagcggcgggagtgccacgcggcagggaagccccggcgccgtcctgccgaggagtgctgtgtggtcgaccggtcccacctcgcccgccacgccccggccgtcctccgccagcggcggcttcgtggacagcagcgagggcagtgcgggctcaggcccgctctggtgttccgcggagtcctgcttgccctccacgaggcgccgcccgtccctctcacaggagcgactcgcgggtgcgggcactcccctgccctgggccagcagcagccccacgtccacgcctgcgctgggcgggcgccgtgggctgctccggtgccgctcacagccttgcgtgctcagtgggaagaggagccggcgcaaacggaggcgtgaggaggacgccaggtggacacgcccatccttggacttcctgaaaatgacccagactttaaaaaattcaaaaagcctttgctccctcaattacgaagatgacgatgaggatgacaccccagtgaagacggttctgtcctccccatgtgactcccggggcctccctggcatcaccatgcctggctgcagccagaggggcctcaggaccagccctgtccaccccaacctgtgggcctctagggagtcggtgaccagtgatggctcccgcaggagcagcggggacccccgtgatggggacagtgtcggggaggagggcgtcttcccccgggcccgctgggagctggacctggagcagatcgagaacaactgaggctggtgggggctggtcggggccatggctgccgcctgcacctgccctggggcacagagtaggtttcctgtgagctggtcggggccacggcccggcacctgccctggggcacagagtaggtttcctgtgagctggtcggggccacggctgccgccggcacctgccctggggcacagagtaggtttcctgtgagctggtcggggccacggctgccgccggcacctgccctggggcacagagtaggtttcctgtgagctggtcggggccacggctgccaccggcacctgccctggggcacagagtaggtttcctgtgagctggtcggggccacggctgccgcctgcactgccctggggcacagactaggtttcctgtgagctggtcggggccatggctgctgcctgcacctgccccagggcacagagtaggtttcctgtgagctggtcggggccatggctgccgcctgcacctgccccggggcacagagtaggtttcctgtgagctggtcggggccatggctgccaccggcacctgccctggggcacagagtaggtttcctgtgagttggtcggggccacggctgccgcctgcactgccctggggcacagactaggtttcatgtgagctggtcggggccatggctgctgccggcacctgccctggggcacagagtaggtttcgtgttgcttggaacattaaggcgtaattttgattcagtttttcctaaagaagcattttgcatttttatggcttttgcagttcgggagaaagcttctctattttggatgcatttcagaagggcgttctattaaacatgaatctgcaaacagattaacatgcgtctgtgttccccacgaaaggcctgctgtgcagggcgccttgtgtgctttagttgctaggaaaccccgggcgttggtggtcagagtcccactggccccgtgtgtccccccctcccgacgggtcacggtgcttggggcttgcgcatgggcatctgtgcccatgaaccttgtcacccacgtgccagtgaaccgccagcttgtggccgcctggttttccaccggtggcagtgatggcctttggggcagaccaaggtgccatgagtccctgcttcccgtggcctgggagggcccttgcaccttcaggtggggtgtagtgccagacctctgggaaggctgtcctgccggcagcacccgtcagcacccactctgtgaatttaatacaaggcctttgctttgtgcatacgacttctgattaattttcgtttccaccatctgaagtgggcctggctgcgcctcaggcctctggtctctggctcagaaccagacaaggcaagggatttcctgtttttcattcttgcacttttaataaaatcgtaggggtttcgagtttgcgatagcaaaagaaaacattaa

SEQ ID NO: 132749 - DNA, 558 bp, Homo sapiens
  Payload ID: 5939
  Gene Symbol: FAM53A
  Gene Name: family with sequence similarity 53, member A
  ENST ID: ENST00000463238
  CDS Start-End: 235-558
gtcgccctgagcgagcggggcctgggcggccggcagtcttctcgctccgcacccccgcggccgcgctcaggcacaaatcctgaagagcccgtgggcgtggactgctcatctgtaaagaaagtggagacatgaccttgagatttggctgacccagcaatgctggggccttcgcaagtctgatgttccaggactccagtgcctgttggtgtggacggaggacacggggccccgaccatggtcacactcatcactgagaagctgcagagccagagcctggacgacctcacctgcaaggcggaggctggcccgttgcagtattctgcggaaaccctgaacaagagcggtcgtctgttccctttggagctcaacgaccagagtccctggaaggtcttcagtggaggaccgcccgtcagaagccaggcagccacgggccctgatttctccttcctgccgggcctgtctgctgccgctcacaccatgggtcttcagtggcagccacagtccccgcgcccaggcgcaggcctgggtgcagccagcaccgtggaccccagtgaaagc

SEQ ID NO: 132750 - DNA, 2159 bp, Homo sapiens
  Payload ID: 5939
  Gene Symbol: FAM53A
  Gene Name: family with sequence similarity 53, member A
  Uniprot ID: Q6NSI3
  ENST ID: ENST00000461064
  CDS Start-End: 165-1361
gcacaaatcctgaagagcccgtgggcgtggactgctcatctgtaaagaaagtggagacatgaccttgagatttggctgacccagcaatgctggggccttcgcaagtctgatgttccaggactccagtgcctgttggtgtggacggaggacacggggccccgaccatggtcacactcatcactgagaagctgcagagccagagcctggacgacctcacctgcaaggcggaggctggcccgttgcagtattctgcggaaaccctgaacaagagcggtcgtctgttccctttggagctcaacgaccagagtccctggaaggtcttcagtggaggaccgcccgtcagaagccaggcagccacgggccctgatttctccttcctgccgggcctgtctgctgccgctcacaccatgggtcttcagtggcagccacagtccccgcgcccaggcgcaggcctgggtgcagccagcaccgtggaccccagtgaaagcacaggctcgtccacggccccaccgaccaagcggcattgccggtccttgtcagaacccgaggagcttgtgcgctgccggtccccctggcgccccggcagctccaaggtctggactccagtctccaagaggcggtgcgacagcggcgggagtgccacgcggcagggaagccccggcgccgtcctgccgaggagtgctgtgtggtcgaccggtcccacctcgcccgccacgccccggccgtcctccgccagcggcggcttcgtggacagcagcgagggcagtgcgggctcaggcccgctctggtgttccgcggagtcctgcttgccctccacgaggcgccgcccgtccctctcacaggagcgactcgcgggtgcgggcactcccctgccctgggccagcagcagccccacgtccacgcctgcgctgggcgggcgccgtgggctgctccggtgccgctcacagccttgcgtgctcagtgggaagaggagccggcgcaaacggaggcgtgaggaggacgccaggtggacacgcccatccttggacttcctgaaaatgacccagactttaaaaaattcaaaaagcctttgctccctcaattacgaagatgacgatgaggatgacaccccagtgaagacggttctgtcctccccatgtgactcccggggcctccctggcatcaccatgcctggctgcagccagaggggcctcaggaccagccctgtccaccccaacctgtgggcctctagggagtcggtgaccagtgatggctcccgcaggagcagcggggacccccgtgatggggacagtgtcggggaggagggcgtcttcccccgggcccgctgggagctggacctggagcagatcgagaacaactgaggctggtgggggctggtcggggccatggctgccgcctgcacctgccctggggcacagagtaggtttcctgtgagctggtcggggccacggcccggcacctgccctggggcacagagtaggtttcctgtgagctggtcggggccacggctgccgccggcacctgccctggggcacagagtaggtttcctgtgagctggtcggggccacggctgccgccggcacctgccctggggcacagagtaggtttcctgtgagctggtcggggccacggctgccaccggcacctgccctggggcacagagtaggtttcctgtgagctggtcggggccacggctgccgcctgcactgccctggggcacagactaggtttcctgtgagctggtcggggccatggctgctgcctgcacctgccccagggcacagagtaggtttcctgtgagctggtcggggccatggctgccgcctgcacctgccccggggcacagagtaggtttcctgtgagctggtcggggccatggctgccaccggcacctgccctggggcacagagtaggtttcctgtgagttggtcggggccacggctgccgcctgcactgccctggggcacagactaggtttcatgtgagctggtcggggccatggctgctgccggcacctgccctggggcacagagtaggtttcgtgttgcttggaacattaaggcgtaattttgattcagtttttcctaaagaagcattttgcatttttatggcttttgcagttcgggagaaagcttctctattttggatgcatttcagaa

SEQ ID NO: 132751 - DNA, 2776 bp, Homo sapiens
  Payload ID: 5939
  Gene Symbol: FAM53A
  Gene Name: family with sequence similarity 53, member A
  ENST ID: ENST00000489363
  CDS Start-End: 599-1681
cgggcggtcgtgggcgcggggccctgcgctccgagctgggcgcgtggactacgtccccctgcctccgccgtctgcgccgcccgtcgaggcgacttttccgcacgaggcgaggcccgccctggtggccccgcgccgtggttcggtggcgcgagaggcggggagtcgccgtggtaaacggggccttggggcgtcccgaaggggacccagacgcgggaggccagacttccccggcgacccgaggaggggacttgcggcggattccgaagccgctttttctgcgtagcctgggggtgtaaatcgccgagattctcctgtgtggagaaggcgccggtgcccgcccgctgctgccggactctagaggggtgtctttttccgttaatctgagcgcagtcgcggagcccctgtttcccacgcagcctgtgttaagtggcctcgcacaaatcctgaagagcccgtgggcgtggactgctcatctgtaaagaaagtggagacatgaccttgagatttggctgacccagcaatgctggggccttcgcaagtctgatgttccaggactccagtgcctgttggtgtggacggaggacacggggccccgaccatggtcacactcatcactgagaagctgcagagccagagcctggacgacctcacctgcaaggcggaggctggcccgttgcagtattctgcggaaaccctgaacaagagcggtcgtctgttccctttggagctcaacgaccagagtccctggaaggtcttcagtggaggaccgcccgtcagaagccaggcagccacgggccctgatttctccttcctgccgggcctgtctgctgccgctcacaccatgggtcttcagtggcagccacagtccccgcgcccaggcgcaggcctgggtgcagccagcaccgtggaccccagtgaaagcacaggctcgtccacggccccaccgaccaagcggcattgccggtccttgtcagaacccgaggagcttgtgcgctgccggtccccctggcgccccggcagctccaaggtctggactccagtctccaagaggcggtgcgacagcggcgggagtgccacgcggcagggaagccccggcgccgtcctgccgaggagtgctgtgtggtcgaccggtcccacctcgcccgccacgccccggccgtcctccgccagcggcggcttcgtggacagcagcgagggcagtgcgggctcaggcccgctctggtgttccgcggagtcctgcttgccctccacgaggcgccgcccgtccctctcacaggagcgactcgcgggtgcgggcactcccctgccctgggccagcagcagccccacgtccacgcctgcgctgggcgggcgccgtgggctgctccggtgccgctcacagccttgcgtgctcagtgggaagaggagccggcgcaaacggaggcgtgaggaggacgccaggtggacacgcccatccttggacttcctgaaaatgacccagccgcacagctgtgcccgcgagtgcgagtcccgcgtccgaggcctcggcgtgagcttacagcatctgtcgggtccgagcagtcagtccagagggtcgactctgaatgaaaacaaaacgccgtggtttgaaatggaaggaaacctggcccctgaagactttaaaaaattcaaaaagcctttgctccctcaattacgaagatgacgatgaggatgacaccccagtgaagacggttctgtcctccccatgtgactcccggggcctccctggcatcaccatgcctggctgcagccagaggggcctcaggaccagccctgtccaccccaacctgtgggcctctagggagtcggtgaccagtgatggctcccgcaggagcagcggggacccccgtgatggggacagtgtcggggaggagggcgtcttcccccgggcccgctgggagctggacctggagcagatcgagaacaactgaggctggtgggggctggtcggggccatggctgccgcctgcacctgccctggggcacagagtaggtttcctgtgagctggtcggggccacggcccggcacctgccctggggcacagagtaggtttcctgtgagctggtcggggccacggctgccgccggcacctgccctggggcacagagtaggtttcctgtgagctggtcggggccacggctgccgccggcacctgccctggggcacagagtaggtttcctgtgagctggtcggggccacggctgccaccggcacctgccctggggcacagagtaggtttcctgtgagctggtcggggccacggctgccgcctgcactgccctggggcacagactaggtttcctgtgagctggtcggggccatggctgctgcctgcacctgccccagggcacagagtaggtttcctgtgagctggtcggggccatggctgccgcctgcacctgccccggggcacagagtaggtttcctgtgagctggtcggggccatggctgccaccggcacctgccctggggcacagagtaggtttcctgtgagttggtcggggccacggctgccgcctgcactgccctggggcacagactaggtttcatgtgagctggtcggggccatggctgctgccggcacctgccctggggcacagagtaggtttcgtgttgcttggaacattaaggcgtaattttgattcagtttttcctaaagaagcattttgcatttttatggcttttgcagttcgggagaaagcttctctattttggatgcatttcagaagggcgttctattaaacatgaatctgcaaa

SEQ ID NO: 132752 - DNA, 628 bp, Homo sapiens
  Payload ID: 5939
  Gene Symbol: FAM53A
  Gene Name: family with sequence similarity 53, member A
  ENST ID: ENST00000489029
  CDS Start-End: 1-470
ggcggtgcgacagcggcgggagtgccacgcggcagggaagccccggcgccgtcctgccgaggagtgctgtgtggtcgaccggtcccacctcgcccgccacgccccggccgtcctccgccagcggcggcttcgtggacagcagcgagggcagtgcgggctcaggcccgctctggtgttccgcggagtcctgcttgccctccacgaggcgccgcccgtccctctcacaggagcgactcgcgggtgcgggcactcccctgccctgggccagcagcagccccacgtccacgcctgcgctgggcgggcgccgtgggctgctccggtgccgctcacagccttgcgtgctcagtgggaagaggagccggcgcaaacggaggcgtgaggaggacgccaggtggacacgcccatccttggacttcctgaaaatgacccaggttgcctcacggactgtttcaccaagtatgttgccatgacatagcacggccctccatcttcccatcttcacggcatctgacagccgtctcctcactggtcggctctatgccaagcattcgtgacacacgtcagttctgttgtggtggcaccatcgcagcgacttctctcttggtgaaggagttgctgctgctcacca

SEQ ID NO: 132753 - DNA, 2086 bp, Homo sapiens
  Payload ID: 5939
  Gene Symbol: FAM53A
  Gene Name: family with sequence similarity 53, member A
  Uniprot ID: Q6NSI3
  ENST ID: ENST00000472884
  CDS Start-End: 199-1395
ggttcggtggcgcgagaggcggggagtcgccgtggcacaaatcctgaagagcccgtgggcgtggactgctcatctgtaaagaaagtggagacatgaccttgagatttggctgacccagcaatgctggggccttcgcaagtctgatgttccaggactccagtgcctgttggtgtggacggaggacacggggccccgaccatggtcacactcatcactgagaagctgcagagccagagcctggacgacctcacctgcaaggcggaggctggcccgttgcagtattctgcggaaaccctgaacaagagcggtcgtctgttccctttggagctcaacgaccagagtccctggaaggtcttcagtggaggaccgcccgtcagaagccaggcagccacgggccctgatttctccttcctgccgggcctgtctgctgccgctcacaccatgggtcttcagtggcagccacagtccccgcgcccaggcgcaggcctgggtgcagccagcaccgtggaccccagtgaaagcacaggctcgtccacggccccaccgaccaagcggcattgccggtccttgtcagaacccgaggagcttgtgcgctgccggtccccctggcgccccggcagctccaaggtctggactccagtctccaagaggcggtgcgacagcggcgggagtgccacgcggcagggaagccccggcgccgtcctgccgaggagtgctgtgtggtcgaccggtcccacctcgcccgccacgccccggccgtcctccgccagcggcggcttcgtggacagcagcgagggcagtgcgggctcaggcccgctctggtgttccgcggagtcctgcttgccctccacgaggcgccgcccgtccctctcacaggagcgactcgcgggtgcgggcactcccctgccctgggccagcagcagccccacgtccacgcctgcgctgggcgggcgccgtgggctgctccggtgccgctcacagccttgcgtgctcagtgggaagaggagccggcgcaaacggaggcgtgaggaggacgccaggtggacacgcccatccttggacttcctgaaaatgacccagactttaaaaaattcaaaaagcctttgctccctcaattacgaagatgacgatgaggatgacaccccagtgaagacggttctgtcctccccatgtgactcccggggcctccctggcatcaccatgcctggctgcagccagaggggcctcaggaccagccctgtccaccccaacctgtgggcctctagggagtcggtgaccagtgatggctcccgcaggagcagcggggacccccgtgatggggacagtgtcggggaggagggcgtcttcccccgggcccgctgggagctggacctggagcagatcgagaacaactgaggctggtgggggctggtcggggccatggctgccgcctgcacctgccctggggcacagagtaggtttcctgtgagctggtcggggccacggcccggcacctgccctggggcacagagtaggtttcctgtgagctggtcggggccacggctgccgccggcacctgccctggggcacagagtaggtttcctgtgagctggtcggggccacggctgccgccggcacctgccctggggcacagagtaggtttcctgtgagctggtcggggccacggctgccaccggcacctgccctggggcacagagtaggtttcctgtgagctggtcggggccacggctgccgcctgcactgccctggggcacagactaggtttcctgtgagctggtcggggccatggctgctgcctgcacctgccccagggcacagagtaggtttcctgtgagctggtcggggccatggctgccgcctgcacctgccccggggcacagagtaggtttcctgtgagctggtcggggccatggctgccaccggcacctgccctggggcacagagtaggtttcctgtgagttggtcggggccacggctgccgcctgcactgccctggggcacagactaggtttcatgtgagctggtcggggccatggctgctgccggcacctgccctggggcacagagtaggtttcgtgttgcttgg

SEQ ID NO: 132754 - DNA, 1568 bp, Homo sapiens
  Payload ID: 5940
  Gene Symbol: FAM53B
  Gene Name: family with sequence similarity 53, member B
  Uniprot ID: Q14153
  ENST ID: ENST00000280780
  CDS Start-End: 432-1349
cacgcagccgcggtctggcggctccgcggcggcggcgggtgcgggcggcctggccggtgccggttaaagggacgagttgcaaacacttcaggaagtgacaagtcgatttcctcctccccgggagtcgctcgtacaaagcgctcggcgccggcaggcgagcgtgcgcgcggcggacgcgcggcgggcaccccggacgacttggcgagcgctggcggtgacggcgcggggtccgcgcccggagcgccccgccgcgcacaggagttgaccacatttggccatttcccagaagggccccaccccaagggtgagtggccaatggggagctgtttctgctgacatcaattccccaggaggtactcaccccaagtctgcccaagtgaagatggctgatacccaccctgggatggagcccagcgcctgaggcccttatcatggtgatggtcctaagtgaaagcctcagcacccggggagctgactccattgcatgtgggaccttcagccgtgaactgcacacgccaaagaagatgagtcaaggacctacacttttctcttgtggaattatggaaaatgacagatggcgagacctggacaggaaatgccctcttcagattgaccaaccgagcaccagcatctgggaatgcctgcctgaaaaggacagctcactatggcaccgggaggcagtgaccgcctgcgctgtgaccagtctgatcaaagacctcagcatcagcgaccacaacgggaacccctcagcaccccctagcaagcgccagtgccgctcactgtccttctccgatgagatgtccagttgccggacatcatggaggcccttgggctccaaagtctggactcccgtggaaaagagacgctgctacagcgggggcagcgtccagcgctattccaacggcttcagcaccatgcagaggagttccagcttcagcctcccttcccgggccaacgtgctctcctcaccctgcgaccaggcaggactccaccaccgatttggagggcagccctgccaaggggtgccaggctcagccccgtgtggacaggcaggtgacacctggagccctgacctgcaccccgtgggaggaggccggctggacctgcagcggtccctctcttgctcacatgagcagttttcctttgtggaatactgtcctccctcagccaacagcacacctgcctcaacaccagagctggcgagacgctccagcggcctttcccgcagccgctcccagccgtgtgtccttaacgacaagaaggtcggtgttaaaaggcggcgccctgaagaagtgcaagagcagaggccttctctagaccttgccaagatggcacagatagccccatgaggaaggcacatcgttatccattttacaggcggtggctgagtcttagaggaagcagtccagtgaaaccagaactcaagccacatatataatttaaaattcctagtagccagttattaagagaagaaagtgaaatgactttgaatagtatatttaacccagtatttccaaaatactatcatttccacatgtcatcgatgtaagtaaatcatgaatgcacta

SEQ ID NO: 132755 - DNA, 5431 bp, Homo sapiens
  Payload ID: 5940
  Gene Symbol: FAM53B
  Gene Name: family with sequence similarity 53, member B
  Uniprot ID: Q14153
  ENST ID: ENST00000337318
  CDS Start-End: 213-1481
ggcgcggggtccgcgcccggagcgccccgccgcgcacaggagttgaccacatttggccatttcccagaagggccccaccccaagggtgagtggccaatggggagctgtttctgctgacatcaattccccaggaggtactcaccccaagtctgcccaagtgaagatggctgatacccaccctgggatggagcccagcgcctgaggcccttatcatggtgatggtcctaagtgaaagcctcagcacccggggagctgactccattgcatgtgggaccttcagccgtgaactgcacacgccaaagaagatgagtcaaggacctacacttttctcttgtggaattatggaaaatgacagatggcgagacctggacaggaaatgccctcttcagattgaccaaccgagcaccagcatctgggaatgcctgcctgaaaaggacagctcactatggcaccgggaggcagtgaccgcctgcgctgtgaccagtctgatcaaagacctcagcatcagcgaccacaacgggaacccctcagcaccccctagcaagcgccagtgccgctcactgtccttctccgatgagatgtccagttgccggacatcatggaggcccttgggctccaaagtctggactcccgtggaaaagagacgctgctacagcgggggcagcgtccagcgctattccaacggcttcagcaccatgcagaggagttccagcttcagcctcccttcccgggccaacgtgctctcctcaccctgcgaccaggcaggactccaccaccgatttggagggcagccctgccaaggggtgccaggctcagccccgtgtggacaggcaggtgacacctggagccctgacctgcaccccgtgggaggaggccggctggacctgcagcggtccctctcttgctcacatgagcagttttcctttgtggaatactgtcctccctcagccaacagcacacctgcctcaacaccagagctggcgagacgctccagcggcctttcccgcagccgctcccagccgtgtgtccttaacgacaagaaggtcggtgttaaaaggcggcgccctgaagaagtgcaagagcagaggccttctctagaccttgccaagatggcacagaactgtcagaccttcagcagcctcagctgcctgagcgcagggacagaggactgcggtccccagagccccttcgcccgccacgtcagcaacaccagggcctggaccgccctgctctcagcctccggcccagggggcaggacccccgctgggaccccggtccctgagcctcttcccccttccttcgacgaccacctcgcctgccaggaggacctgtcctgtgaggagtcagacagctgcgccctggacgaggattgtggcaggagagcggagccggctgcagcctggcgggaccgcggggcccctgggaacagcctctgctccctggacggcgagttggacattgagcagatagagaagaactgagggggtgtgggcccaggcagggctggggtgtgctggcatcgacagcccccactctgggcactaggtgggcccttgaaggggagcccaactcgtgggcctgatgaaagcttcctgagtggtgtcgggtcccagagagggagcccacctgctgcctgggggagagcctggcctggccgcgtcatacagcgggtgtgtcagcctctcaccggctccccgagcgtggcagccaccaggtccacagaactactgcagcccagaggacagctttgaagtttgcgtcttttctgcctctttccctgtgggatgttgggcagtctctgttgtccccggcagagctgggcaccgctctgtatccccctggtggtgggggctgtcagggagggcctggggtgggggccaggggccatctgctatgtcagggcccttcttggcctcactcaggttcacttctggggagtcggccccgcagcttctttcactcagttttactccgtgccttctctcccaggtctccctgcttcaggcttgggaaggttcgggagatgcttccttctgtaacaccagaaccatttggccttaattccaatgtgagagacagaatccctggggtgctggactggccctccagagggtaagccatgtccggagtctcgggcccaaggaacgatttggagggtgcttgttagggcctcccgtgttgggtagaaatttggtggatctgttggctgaaaagacggacttgcttgcctctcctacagcatggagaggctgaccccatggctctgccaccgttggggcagggttagcagatggcagcccttctctgtggctgacaggtcactgagtgataagcatggttggttccggtgagtgtagggatggcacgataccagggcagcctcttgaaaacggcctcgggagacgggagctgcgagcaggtgggcagatgagggccctatgcgcactcaggggtgaagggcgtccgctggccactctgcaggggcccctgcaggattccaggcacctcccgtttgtccttgaggactgctggctgtaaccagggcacatcacccacctcaagacaagcccacgcccttgtcagcttagggggagcccagtcctgagggctgcatctctgttgtaggcccagccaccggcacaaagctggattcatgctccctgcccctaccccaccctggctcctcaccctggggcatccgaggagcctagccccctgagggtttgctctcctctcaaggtttgtagctcctctccggctgccttgcagacaccaccacatgggctctgctctatgggaatctggcttttagcgaatgtggcgtcttctgcaaacaatagcaattgggctggcttaggagcaagtggctcattttcccataaggctaaaaataactggtgcgctcccttgtgttggctgacacgcgcgttcaaagcacttttgtagtcactttgcttttgctcgtcttcatggacgagtgaacgcctcgcttctgcaggttgagtccagatgcttctcaccttctttctcctcaagaaagatgctttttgggaaacgttgtttaaatcttatttttttactacatcaaaaggatggtggttcaagttcccaatatgtgggtggcacttcttaaaaatcagctttaaggagctggcagaaagcccccagccccacagccctgagagatggtgttgctagctcaggtggctgacacatggggtatgccgggcactgggcaggtcccagagccggggaaccagctcacctctggttgctgtagctcctgccggaggcatgtctacttgtgatcccggacagccgaacccaagagctggtggctctgagcagacagagacatcttggcctgtccctgcctgggggtcatggagaccatgtcttcttagagcaaatgtggaggcggccagggcagttgttgggtgaatgtggagagcacatggccatgtcttgcccccggagtaccactgggcgtggggggtcctggcaccacatgcccggtgtggccgagggcacacagcctctatagcaggccttcctgtggaaggcagaggcagtgagggaggtggacggtgccagctgaggctgaggcatgcagcagcccccagctacctttgcttagggctggggtgggaggcacatggtgacaggtatatgtcgtgggactggggtgtgggtgacctgccctcaaaccttgcctgccacctccccattcaggcctggtggcaggaagggacaagctgtggagctggctgagtcacagccacctccccacctccccgcaagctggtcccatcgaccagcaagcccagccccagggcgcttagggagaaatgacccagcctcctcagaccccgcctgcctgtcctgtgcccaccacgcagcagtcaggggagaaaatggtggctatcccttctgcttagagaaagaaatggcctttagctggtttcatgtttgtgttttgactggagggagtagaccctatctataaggtgccaccccatcatccaagctgccacactgcccggagcagcctgttcctgcactccaccctgctggccccaggacttctgatctcagtcctctgggagggaggttcgcctaggaggtgccccccacattggtgtccccatgggcagcaggcagacagctcacccccaccagcatgatggccccagctgggggcagtggcaggagccttacttttgtcacagccttgcccacaaaccctgcctctgaggggagactgaggaagggcagagccagaagcaagccgtgccaggccatctgcctgctcatggggtcctaaagcgcgggctaagcctgcaggaaagccggggcggtggggggggcttagtgccacatgcaccccactcattccaaagccaccaaactgccaggggctgccgtccacccgtggggcccaggggctggggccacagccttgccattttcgttgccataccctcttgccttactcgcggtggaggccggatttgcacgggcagacgtgcacctgggcccgtggggagcttgttctgaccagacgtacagattttcattctcagaaagccttacttttcaaccaaatttttgtagccagttttgtgaatttgtacactgaaagaaaatttaaataaaggggaagtccacattaaaaagaaaacaaaacaaaccctaactaacttccaaatgggtctcctggtgcgggggcgtgagtggccgtgccctgggtgtgctgcctgtctgagcaagcttccctagctgtggaaccccgggccccctgctgcgggctctgccttggtgtcatgcctgctgcacccccgtttccactgacgtgccgtctgtggctatgggggtggtcactggaatgacggtcactccagacgtcagccggcagggatgcagcaggctggccgcgcaccggggctcgggcaccctctggccccacactggcaatgatgccacaccttgccatgtccacgctgttggtcaaacccctctgtcatgcctctttaaagagaaaagaagagaaagattttttttttttttaatggcagaccgaagtggagatcttgtagcctagataggatagtctgaccttctagcatagtctttttggcaaatgatttgtgttttcagtgtgtggggaagctgtcctgggggctggggcgacagatagcacataggctgtttctggggctgcaggggcttccctgagctggatgttgtgggtgttgccgtgcttcaggaagtgtggcgaccagaaagcgtagacccggggcccagggtctgcccgcccctgcagcctggcctccccgcacaggctgtggcttgcactccagccgctctagtctctcaggaatttgcttgttacttgtactgtgtaaataaagcttcctggttcaatacccaa

SEQ ID NO: 132756 - DNA, 3557 bp, Homo sapiens
  Payload ID: 5940
  Gene Symbol: FAM53B
  Gene Name: family with sequence similarity 53, member B
  Uniprot ID: Q14153
  ENST ID: ENST00000392754
  CDS Start-End: 718-1986
gtactgtacttaggacgatggtgaacaaagaaaagctctttgcagcgtttgatgaatgggattctgcctcctataggccacactccgagtcttccatacggtacaatctccggactcggtggtgttaggaaagtggcccccggaatggcttgcattccgggtctgggatcctggggtgggcatttgtgccgtcgccttcgccgccgcgctcgccttgcaggagcgggtgcagatggagccaggctgacggttgttcaacaggaacaaatgtttgttcaattgttggatggtggagaaaagggactgtttcctattgactgctgcaggagttggaatggcattgtttattggcctgggaagccaggcaagcgtcttgtgctgcttacaacatattagcagacttccaaatgacatgctagcatatgtgttcccagcagtccccaccggctggcagggagattcctccttgctccagatcctggactcgtttaaaagatgccacctggtttgaggacttgggaaggaatggagtcagccgaccagggagttgaccacatttggccatttcccagaagggccccaccccaagggtgagtggccaatggggagctgtttctgctgacatcaattccccaggaggtactcaccccaagtctgcccaagtgaagatggctgatacccaccctgggatggagcccagcgcctgaggcccttatcatggtgatggtcctaagtgaaagcctcagcacccggggagctgactccattgcatgtgggaccttcagccgtgaactgcacacgccaaagaagatgagtcaaggacctacacttttctcttgtggaattatggaaaatgacagatggcgagacctggacaggaaatgccctcttcagattgaccaaccgagcaccagcatctgggaatgcctgcctgaaaaggacagctcactatggcaccgggaggcagtgaccgcctgcgctgtgaccagtctgatcaaagacctcagcatcagcgaccacaacgggaacccctcagcaccccctagcaagcgccagtgccgctcactgtccttctccgatgagatgtccagttgccggacatcatggaggcccttgggctccaaagtctggactcccgtggaaaagagacgctgctacagcgggggcagcgtccagcgctattccaacggcttcagcaccatgcagaggagttccagcttcagcctcccttcccgggccaacgtgctctcctcaccctgcgaccaggcaggactccaccaccgatttggagggcagccctgccaaggggtgccaggctcagccccgtgtggacaggcaggtgacacctggagccctgacctgcaccccgtgggaggaggccggctggacctgcagcggtccctctcttgctcacatgagcagttttcctttgtggaatactgtcctccctcagccaacagcacacctgcctcaacaccagagctggcgagacgctccagcggcctttcccgcagccgctcccagccgtgtgtccttaacgacaagaaggtcggtgttaaaaggcggcgccctgaagaagtgcaagagcagaggccttctctagaccttgccaagatggcacagaactgtcagaccttcagcagcctcagctgcctgagcgcagggacagaggactgcggtccccagagccccttcgcccgccacgtcagcaacaccagggcctggaccgccctgctctcagcctccggcccagggggcaggacccccgctgggaccccggtccctgagcctcttcccccttccttcgacgaccacctcgcctgccaggaggacctgtcctgtgaggagtcagacagctgcgccctggacgaggattgtggcaggagagcggagccggctgcagcctggcgggaccgcggggcccctgggaacagcctctgctccctggacggcgagttggacattgagcagatagagaagaactgagggggtgtgggcccaggcagggctggggtgtgctggcatcgacagcccccactctgggcactaggtgggcccttgaaggggagcccaactcgtgggcctgatgaaagcttcctgagtggtgtcgggtcccagagagggagcccacctgctgcctgggggagagcctggcctggccgcgtcatacagcgggtgtgtcagcctctcaccggctccccgagcgtggcagccaccaggtccacagaactactgcagcccagaggacagctttgaagtttgcgtcttttctgcctctttccctgtgggatgttgggcagtctctgttgtccccggcagagctgggcaccgctctgtatccccctggtggtgggggctgtcagggagggcctggggtgggggccaggggccatctgctatgtcagggcccttcttggcctcactcaggttcacttctggggagtcggccccgcagcttctttcactcagttttactccgtgccttctctcccaggtctccctgcttcaggcttgggaaggttcgggagatgcttccttctgtaacaccagaaccatttggccttaattccaatgtgagagacagaatccctggggtgctggactggccctccagagggtaagccatgtccggagtctcgggcccaaggaacgatttggagggtgcttgttagggcctcccgtgttgggtagaaatttggtggatctgttggctgaaaagacggacttgcttgcctctcctacagcatggagaggctgaccccatggctctgccaccgttggggcagggttagcagatggcagcccttctctgtggctgacaggtcactgagtgataagcatggttggttccggtgagtgtagggatggcacgataccagggcagcctcttgaaaacggcctcgggagacgggagctgcgagcaggtgggcagatgagggccctatgcgcactcaggggtgaagggcgtccgctggccactctgcaggggcccctgcaggattccaggcacctcccgtttgtccttgaggactgctggctgtaaccagggcacatcacccacctcaagacaagcccacgcccttgtcagcttagggggagcccagtcctgagggctgcatctctgttgtaggcccagccaccggcacaaagctggattcatgctccctgcccctaccccaccctggctcctcaccctggggcatccgaggagcctagccccctgagggtttgctctcctctcaaggtttgtagctcctctccggctgccttgcagacaccaccacatgggctctgctctatgggaatctggcttttagcgaatgtggcgtcttctgcaaacaatagcaattgggctggcttaggagcaagtggctcattttcccataaggctaaaaataactggtgcgctcccttgtgttggctgacacgcgcgttcaaagcacttttgtagtcactttgcttttgctcgtcttcatggacgagtgaacgcctcgcttctgcaggttgagtccagatgcttctcaccttctttctcctcaagaaagatgctttttggg

SEQ ID NO: 132757 - DNA, 4377 bp, Homo sapiens
  Payload ID: 5941
  Gene Symbol: FAM53C
  Gene Name: family with sequence similarity 53, member C
  Uniprot ID: Q9NYF3
  ENST ID: ENST00000239906
  CDS Start-End: 429-1607
ggagggggtgactcgttagtgaggaaaccacccccatccctaaatcaaagcgccaggctcgttcccaacagcgctgtccgagagacactttgagagagacacgacacggagctgcgccctccatgggtggcttggggggattctgcgagccggagctgtccccctactctcctcagggactcgttggttcgcgccagcgccttttaagggcaccgtggggcgaaccgagcgctcagagctgctccggccgcggccctgggagctggaggaaccgcgactcagcaggcatgactggagagggaagtcccaatggtgctagaatggtgctgcagtggcagaagacggctcacaagtgaggtctggaagaacaacagggaagacatccatcatttgctccaaagtgtgcaagtcaaatcctggggagaatcatgataaccctgatcactgagcagctacagaagcagactctggatgagctgaaatgcacacgcttcagcatcagtctgcctttgcctgatcatgcagacatctccaactgtgggaactctttccagcttgtgtctgaaggtgcttcctggaggggcctgccccactgttcctgtgctgagttccaggacagcctcaacttcagctaccatccctcaggcctgagcctgcacctcagaccacccagtcggggaaactcccccaaggagcagcccttctcccaagtcctaagacctgagcccccagatccagagaagcttcctgtgccccctgcccctccatccaagaggcactgccgctcactctcagtgcccgtggacctgtctcgctggcagccggtgtggcggcccgccccctccaagctgtggactcccataaagcaccggggcagtggtggagggggtgggccgcaggtgcctcaccagagccccccaaagcgggtctccagcctcaggttcctccaagctcccagtgcctcttctcaatgtgccccagctcacagaccctacagccctcctttcttcagcctggccctggcccaagattcctctcgaccctgcgccgcctcccctcaaagtggctcctgggagagtgatgctgagtccttgtcaccttgcccacctcagcgccgcttctccctgtcacccagtctgggcccgcaggcaagccgcttcttgccctctgcccggagctctcccgcatcctccccagagctgccctggcgacctcgaggtctccgcaaccttccccgaagccgctcacagccttgtgatctggatgcccgcaaaactggggtcaagcggcgccacgaggaagacccccggcgtctgcggccttcgttggactttgacaagatgaatcagaaaccatactcaggaggtctttgtctccaagaaacagcccgggaaggcagcagcatctctccaccatggttcatggcctgtagccccccacccctctctgcttcctgcagccccactgggggttcctcccaggtgctgagtgaaagcgaagaggaggaggagggggctgtgcggtggggtcggcaggcgctgagcaagcggacactgtgccagcgggactttggggacctggacttgaatttgattgaggaaaactaaaactgagaggctacttcctggggccacacagactgactctctcatggctactaacaagtgtcgagtccccaaggctgggggccgagcctgggaatgggggtgagtggagggctccgactcagggcagctggaaatcttctcgctccagcaagctcgaccatgccaagagactggccgggacaagataaacggagctggtggcgggagggacagccccagagcagacccttcctatggcggccctgagtgtgagtatccctgccaccaagagagcaatgggcagggaaggaaggggtctgccgaccccagctcggggaatttcactagcccctttgcttcaaagggcacttgtgtcttagaatttggccagggtggggggttgagtcagcctcctcagagaaactgcgtgagagtgtgtgcgtgcatgggagtgtacttgtggaaaggtgtgtttgcgtagccttagggaaggaaggcaattgctccttaacagcagagtatcatgatacccccaggatcttgagttttttacaggatgttgggtttgctcaaggagtcaagaggagggcaccaagttttccttttttctaaatagctctggaaccaggcttgtaatccatagcatcaccgactctgcaaaggatttcattttggggtacagcagggtgttttaagtgctgtgacttcagctaatgatcttttcttcagccccaccccctccccactagctcgatctagtatattggggaatgcaggtggggggtgtcaccatattttttctgagctggcctttttttctcatcagattgtccaggctatattccacctgcctcttttgccctcttgagtagagttgcacacagcacatgggcaactgaagcagggttgaggggctctctctctctctcctctgctgatgggacccttttcccctcaccctctgcccttctaagtcatagactaggtaggaaggccctatattggtccccagcatctactgaggcagacctgcaacagaagtggcattcagtccccagcagacatgggtgagctcaccccagcactgctgttgggaaggtgactgcaggaaaccaattcttacaagatccaggcccagcctttttgacctgcttgagagggaagaaggggtgtttagcatttaatagtttgcttgtcttccactcctgccaggaagtgtttatttgcctctaattgggcctgagagaccatagggaggttggggctcactgagggattggctgaggatgtataaagcaaaggctgtgagaagcagttgggagtttggttgtcattggattgaatttacttttttgtttctcacccgcaacttgagccaggacagctggtccaagtggccacagtgatgggtttaagtaccttggtagggctggcaccagtggaaacacatactgaagctgccaccacaatagcttgtgaggttttatccagctgtggttagaccctgcatgaccaaatttgacctgcccttgtttatggcaagaagggcatttttctcttcaatttccagggtttcctaggacccagttcctcatgtaagggaggaagaccaaggtctttgtgttttcttcctcatggaattgaacctgacattttctggatctcctgcatgtcaggagcatcagtgaggcttcagcctcctcgtctccactccagagaggaggtggctatgtcttcttaagcctctggccctcagaggctcctccctatctcctggctagttaccactaggctaccaggtctctaggggcctgagagaggccctctagagaatccagggaaactgtgagcccaggagttgcccatctatggtttcattcctcccctggctcttctccctcttcaggccataatttccctggtgccaatttcttttcctcctggggcatcctcatcccagggctctctgctgtagattggctgtgccagcttccaacaggttactggcaatgccagtgagtttctgtaggccctaagctgaagaagtgaggcagtgattctgcctccatcctggtttccccaaagccccagggcaccatccttaggggagaaggtctacagttatcattattttaattccattactttcagtctggaaaactaagctagtcagaactgtcatcttgcttcccaatctaagaacctgtggccctggaacacttttcaagaattggttcattttgctttacacagtagatctgttccaacagttctgtgtaaaccaaatgctatttttcaatgcatttggactgctgaccatttaaaagcagcctatgattgcttctttttgtaaagcaagcaacctccctccactttagctgttttgactatttgaattttcacatattgggcttacccagagtggagcacacctccagggcatgtggctgacactgggtcaatgtctgcatctgtgctgtgtgtgtagtgtggttggccagtaggtgagtatccctgtgtgtgtgagtgaagccactccccaggctggtgctctcctcctgtgcccagtgactgcccagtggcagctcagctgcccttcactcccacctgctgccaaagtccctgtgctaatgggattacaaatacaaaaagtggaaaaaaattttcgtaaactttgttttatattaaaagaaaaatccataagtctgtgtgtgttaaacatgaggttctgcctctgtggctgtgtttgaaaaaataaagttttattagaataatccattttcccaagcaa

SEQ ID NO: 132758 - DNA, 1686 bp, Homo sapiens
  Payload ID: 5941
  Gene Symbol: FAM53C
  Gene Name: family with sequence similarity 53, member C
  Uniprot ID: Q9NYF3
  ENST ID: ENST00000434981
  CDS Start-End: 495-1673
tcataatcacaatcccattacctcatcctgctgggggggagggggcggagagagaagagagggagtgaacagccctgggctatcctgagctttacaaagtgttctgggtgagggcaaattacagaaccaagtggaaacgtccccgcaaccattataagtcctgggtttttaaggttcaggccgatccggcagctgcaagaggggctcctgggactccgagcaggccctaatccgcgcttggaccacacttcccagcagccttcacgccgcggacgggtcctttgctgggggaagggggattccttcgaagaggtggtcgtggagggcggggcagcagagcagactcagcaggcatgactggagagggaagtcccaatggtgctagaatggtgctgcagtggcagaagacggctcacaagtgaggtctggaagaacaacagggaagacatccatcatttgctccaaagtgtgcaagtcaaatcctggggagaatcatgataaccctgatcactgagcagctacagaagcagactctggatgagctgaaatgcacacgcttcagcatcagtctgcctttgcctgatcatgcagacatctccaactgtgggaactctttccagcttgtgtctgaaggtgcttcctggaggggcctgccccactgttcctgtgctgagttccaggacagcctcaacttcagctaccatccctcaggcctgagcctgcacctcagaccacccagtcggggaaactcccccaaggagcagcccttctcccaagtcctaagacctgagcccccagatccagagaagcttcctgtgccccctgcccctccatccaagaggcactgccgctcactctcagtgcccgtggacctgtctcgctggcagccggtgtggcggcccgccccctccaagctgtggactcccataaagcaccggggcagtggtggagggggtgggccgcaggtgcctcaccagagccccccaaagcgggtctccagcctcaggttcctccaagctcccagtgcctcttctcaatgtgccccagctcacagaccctacagccctcctttcttcagcctggccctggcccaagattcctctcgaccctgcgccgcctcccctcaaagtggctcctgggagagtgatgctgagtccttgtcaccttgcccacctcagcgccgcttctccctgtcacccagtctgggcccgcaggcaagccgcttcttgccctctgcccggagctctcccgcatcctccccagagctgccctggcgacctcgaggtctccgcaaccttccccgaagccgctcacagccttgtgatctggatgcccgcaaaactggggtcaagcggcgccacgaggaagacccccggcgtctgcggccttcgttggactttgacaagatgaatcagaaaccatactcaggaggtctttgtctccaagaaacagcccgggaaggcagcagcatctctccaccatggttcatggcctgtagccccccacccctctctgcttcctgcagccccactgggggttcctcccaggtgctgagtgaaagcgaagaggaggaggagggggctgtgcggtggggtcggcaggcgctgagcaagcggacactgtgccagcgggactttggggacctggacttgaatttgattgaggaaaactaaaactgagaggcta

SEQ ID NO: 132759 - DNA, 923 bp, Homo sapiens
  Payload ID: 5941
  Gene Symbol: FAM53C
  Gene Name: family with sequence similarity 53, member C
  ENST ID: ENST00000513056
  CDS Start-End: 195-539
agagctgctccggccgcggccctgggagctggaggaaccgcgactcagcaggcatgactggagagggaagtcccaatggtgctagaatggtgctgcagtggcagaagacggctcacaagtgaggtctggaagaacaacagggaagacatccatcatttgctccaaagtgtgcaagtcaaatcctggggagaatcatgataaccctgatcactgagcagctacagaagcagactctggatgagctgaaatgcacacgcttcagcatcagtctgcctttgcctgatcatgcagacatctccaactgtgggaactctttccagcttgtgtctgtctgggcccgcaggcaagccgcttcttgccctctgcccggagctctcccgcatcctccccagagctgccctggcgacctcgaggtctccgcaaccttccccgaagccgctcacagccttgtgatctggatgcccgcaaaactggggtcaagcggcgccacgaggaagacccccggcgtctgcggccttcgttggactttgacaagatgaatcagaaaccatactcaggaggtctttgtctccaagaaacagcccgggaaggcagcagcatctctccaccatggttcatggcctgtagccccccacccctctctgcttcctgcagccccactgggggttcctcccaggtgctgagtgaaagcgaagaggaggaggagggggctgtgcggtggggtcggcaggcgctgagcaagcggacactgtgccagcgggactttggggacctggacttgaatttgattgaggaaaactaaaactgagaggctacttcctggggccacacagactgactctctcatggctactaacaagtgtcgagtccccaaggctgggggccgagcctgggaatgggggtgagtggagggctccgactca

SEQ ID NO: 132760 - DNA, 571 bp, Homo sapiens
  Payload ID: 5941
  Gene Symbol: FAM53C
  Gene Name: family with sequence similarity 53, member C
  ENST ID: ENST00000511276
  CDS Start-End: 75-571
gagctgctccggccgcggccctgggagctggaggaaccgcgactcagcaggcatgactggagagggaagtcccaatggtgctagaatggtgctgcagtggcagaagacggctcacaagtgagcctttgcctgatcatgcagacatctccaactgtgggaactctttccagcttgtgtctgaaggtgcttcctggaggggcctgccccactgttcctgtgctgagttccaggacagcctcaacttcagctaccatccctcaggcctgagcctgcacctcagaccacccagtcggggaaactcccccaaggagcagcccttctcccaagtcctaagacctgagcccccagatccagagaagcttcctgtgccccctgcccctccatccaagaggcactgccgctcactctcagtgcccgtggacctgtctcgctggcagccggtgtggcggcccgccccctccaagctgtggactcccataaagcaccggggcagtggtggagggggtgggccgcaggtgcctcaccagagccccccaaagcgggtctccagcctcaggttcctccaagctcc

SEQ ID NO: 132761 - DNA, 2013 bp, Homo sapiens
  Payload ID: 5942
  Gene Symbol: FAM57A
  Gene Name: family with sequence similarity 57, member A
  Uniprot ID: Q8TBR7
  ENST ID: ENST00000301324
  CDS Start-End: 65-742
ccggggcgcgccgagccgaacccagccacgcggcgccagcgaggcggccggacccgcagccccgatgctgctgacgctggccgggggcgcgctcttcttcccggggctcttcgcgctctgcacctgggcgctgcgccgctcccagcccggatggagccgcaccgactgcgtgatgatcagcaccaggctggtttcctcggtgcacgccgtgctggccaccggctcggggatcgtcatcattcgctcctgcgacgacgtgatcaccggcaggcactggcttgcccgggaatatgtgtggtttctgattccatacatgatctatgactcgtacgccatgtacctctgtgaatggtgccgaaccagagaccagaaccgtgcgccctccctcactcttcgaaacttcctaagtcgaaaccgcctcatgatcacacatcatgcggtcattctctttgtccttgtgccagtcgcacagctaaagcagcagcacacccttctgtacaaggtgaatggaatcctcacgctggccaccttcctttcctgccggatccttctcttccccttcatgtactggtcctatggccgccagcagggactaagcctgctccaagtacccttcagcatcccattctactgcaacgtggccaatgccttcctcgtagctcctcagatctactggttctgtctgctgtgcaggaaggcagtccggctctttgacactccccaagccaaaaaggatggctaaatgctcctgggagtcaggcgcagcctcacaccagctgcctcctccactcagcattccatggaccaaattgtgccctgggtagcctcagactttgggtattgataagccgatggatttgagtttttctaaagaatattcatattacctccttcttctaacttgccctatttgcaaaagcacttttgtagtaacaactattgggtcctgtcagacctccacggacagcaaagtggttttaatgcaagcccaaggatccttcttaaggtcttatctcaagagctctgggaggtggaagcatggggtgggatcggtggaccagggtggtaagtgtctgcacatctgcctgtccctgtatcagcggctacccaccttccaaaccactcaggacagtacccgtggcactgggcccgcagaagcaagggatgacttggttcttggaagtaatgtcgtcttgtgacattggcctgggacaatcattgtgggtaggtagttattgatcgtttactagataacccattggttctttgcctcatcctctcatccatgggtcagagttgaattcttatgtctatagacttccaatcagaagtctcactggtggggctgggggtgggggcaggcaggaggcatggatgggaacctgagtaggtagtgtggccaagagatcagcacaacctttgcaggctgacttgctaagtctgacagtgacaaacttgtgagcttactgcagtcagtcacagaggctgttctttttcacacaccccttcatgcccggctttccccatatccacatgcagagggcgagctcataaaactacagggaagcgtgaaatgatggctttggtagctgtttactgggtaaccccactgtgacactgtccttttcatgtgatgtggaaacctacttctgtcctccaaaccatgaaatgtgtcatctagactgcagagtacttgagtgctttgcctcccgatatgccagagcttgtggtccaaagcccattcctgtgtgtccgtcctgccatttagccacagaaggctgcggagtgaggcggcagctagcctggccagtggctgtcccgtggaccgacacctgcgcccccttctgcaagcaggattttctggtgccaacactcattcatcattcccgatcaactaggatgaatttaagactgtgctaccatgtgttctcaagtggtagtttaaaaagtggatttttaaagtgcctttcaattgtctgtgaacgtctaaaggactgatttgtctcattttga

SEQ ID NO: 132762 - DNA, 2412 bp, Homo sapiens
  Payload ID: 5942
  Gene Symbol: FAM57A
  Gene Name: family with sequence similarity 57, member A
  Uniprot ID: Q8TBR7
  ENST ID: ENST00000308278
  CDS Start-End: 237-1010
ccgccggggacgccggggaaccctccgggcccagggaccgcgagagaccccgccccgccctatcgcagccgccgggcctggtcacgcgcagagccgcgccgcgggatcggggccagcgccgggcggaggcgggacggggacgggggcggagggttgaaatcgcgcggccgggccggggcgcgccgagccgaacccagccacgcggcgccagcgaggcggccggacccgcagccccgatgctgctgacgctggccgggggcgcgctcttcttcccggggctcttcgcgctctgcacctgggcgctgcgccgctcccagcccggatggagccgcaccgactgcgtgatgatcagcaccaggctggtttcctcggtgcacgccgtgctggccaccggctcggggatcgtcatcattcgctcctgcgacgacgtgatcaccggcaggcactggcttgcccgggaatatgtgtggtttctgattccatacatgatctatgactcgtacgccatgtacctctgtgaatggtgccgaaccagagaccagaaccgtgcgccctccctcactcttcgaaacttcctaagtcgaaaccgcctcatgatcacacatcatgcggtcattctctttgtccttgtgccagtcgcacagaggctccggggagaccttggggacttctttgtcggctgcatcttcacggcagaactgagcactccgtttgtgtcgctgggcagggttctgattcagctaaagcagcagcacacccttctgtacaaggtgaatggaatcctcacgctggccaccttcctttcctgccggatccttctcttccccttcatgtactggtcctatggccgccagcagggactaagcctgctccaagtacccttcagcatcccattctactgcaacgtggccaatgccttcctcgtagctcctcagatctactggttctgtctgctgtgcaggaaggcagtccggctctttgacactccccaagccaaaaaggatggctaaatgctcctgggagtcaggcgcagcctcacaccagctgcctcctccactcagcattccatggaccaaattgtgccctgggtagcctcagactttgggtattgataagccgatggatttgagtttttctaaagaatattcatattacctccttcttctaacttgccctatttgcaaaagcacttttgtagtaacaactattgggtcctgtcagacctccacggacagcaaagtggttttaatgcaagcccaaggatccttcttaaggtcttatctcaagagctctgggaggtggaagcatggggtgggatcggtggaccagggtggtaagtgtctgcacatctgcctgtccctgtatcagcggctacccaccttccaaaccactcaggacagtacccgtggcactgggcccgcagaagcaagggatgacttggttcttggaagtaatgtcgtcttgtgacattggcctgggacaatcattgtgggtaggtagttattgatcgtttactagataacccattggttctttgcctcatcctctcatccatgggtcagagttgaattcttatgtctatagacttccaatcagaagtctcactggtggggctgggggtgggggcaggcaggaggcatggatgggaacctgagtaggtagtgtggccaagagatcagcacaacctttgcaggctgacttgctaagtctgacagtgacaaacttgtgagcttactgcagtcagtcacagaggctgttctttttcacacaccccttcatgcccggctttccccatatccacatgcagagggcgagctcataaaactacagggaagcgtgaaatgatggctttggtagctgtttactgggtaaccccactgtgacactgtccttttcatgtgatgtggaaacctacttctgtcctccaaaccatgaaatgtgtcatctagactgcagagtacttgagtgctttgcctcccgatatgccagagcttgtggtccaaagcccattcctgtgtgtccgtcctgccatttagccacagaaggctgcggagtgaggcggcagctagcctggccagtggctgtcccgtggaccgacacctgcgcccccttctgcaagcaggattttctggtgccaacactcattcatcattcccgatcaactaggatgaatttaagactgtgctaccatgtgttctcaagtggtagtttaaaaagtggatttttaaagtgcctttcaattgtctgtgaacgtctaaaggactgatttgtctcattttgactgttgagtctttaatgggtgccatttaaaaaacaaaatgctattttttaattgtcttttttttttaactatcagtgtatctttaaaagtcacccttacggtgattaaattgcactaacattcccaactta

SEQ ID NO: 132763 - DNA, 852 bp, Homo sapiens
  Payload ID: 5942
  Gene Symbol: FAM57A
  Gene Name: family with sequence similarity 57, member A
  ENST ID: ENST00000574327
  CDS Start-End: 237-686
ccgccggggacgccggggaaccctccgggcccagggaccgcgagagaccccgccccgccctatcgcagccgccgggcctggtcacgcgcagagccgcgccgcgggatcggggccagcgccgggcggaggcgggacggggacgggggcggagggttgaaatcgcgcggccgggccggggcgcgccgagccgaacccagccacgcggcgccagcgaggcggccggacccgcagccccgatgctgctgacgctggccgggggcgcgctcttcttcccggggctcttcgcgctctgcacctgggcgctgcgccgctcccagcccggatggagccgcaccgactgcgtgatgatcagcaccaggtaccggcgccgccgagacgccccccgaggcccggggcgctgcccaccgcaccccacccggccgcggggcccagggcggaaaaggggggcggcaggaagcccgggggctgctccctccgcgtcccggcggcccgagtttccgaagcccctccgcgtcctcccctggcgggagcggggccggggcgggcgggaatggccgatgagcctccggagcccgctccccacatctgcctgcggctggggagagtcaggccgaagggccgggccgggctccctgcggtcctcggaccggactgagcgcgcgcgctgttctctccgcccgcgctaggctggtttcctcggtgcacgccgtgctggccaccggctcggggatcgtcatcattcgctcctgcgacgacgtgatcaccggcagaggctccggggagaccttggggacttctttgtcggctgcatcttcacggcagaactgagcactccgtttgtgtcgctgggca

SEQ ID NO: 132764 - DNA, 2386 bp, Homo sapiens
  Payload ID: 5942
  Gene Symbol: FAM57A
  Gene Name: family with sequence similarity 57, member A
  ENST ID: ENST00000570699
  CDS Start-End: 80-421
cttcttcccggggctcttcgcgctctgcacctgggcgctgcgccgctcccagcccggatggagccgcaccgactgcgtgatgatcagcaccaggtaccggcgccgccgagacgccccccgaggcccggggcgctgcccaccgcaccccacccggccgcggggcccagggcggaaaaggggggcggcaggaagcccgggggctgctccctccgcgtcccggcggcccgagtttccgaagcccctccgcgtcctcccctggcgggagcggggccggggcgggcgggaatggccgatgagcctccggagcccgctccccacatctgcctgcggctggggagagtcaggccgaagggccgggccgggctccctgcggtcctcggaccggactgagcgcgcgcgctgttctctccgcccgcgctaggctggtttcctcggtgcacgccgtgctggccaccggctcggggatcgtcatcattcgctcctgcgacgacgtgatcaccggcaggcactggcttgcccgggaatatgtgtggtttctgattccatacatgatctatgactcgtacgccatgtacctctgtgaatggtgccgaaccagagaccagaaccgtgcgccctccctcactcttcgaaacttcctaagtcgaaaccgcctcatgatcacacatcatgcggtcattctctttgtccttgtgccagtcgcacagaggctccggggagaccttggggacttctttgtcggctgcatcttcacggcagaactgagcactccgtttgtgtcgctgggcagggttctgattcagctaaagcagcagcacacccttctgtacaaggtgaatggaatcctcacgctggccaccttcctttcctgccggatccttctcttccccttcatgtactggtcctatggccgccagcagggactaagcctgctccaagtacccttcagcatcccattctactgcaacgtggccaatgccttcctcgtagctcctcagatctactggttctgtctgctgtgcaggaaggcagtccggctctttgacactccccaagccaaaaaggatggctaaatgctcctgggagtcaggcgcagcctcacaccagctgcctcctccactcagcattccatggaccaaattgtgccctgggtagcctcagactttgggtattgataagccgatggatttgagtttttctaaagaatattcatattacctccttcttctaacttgccctatttgcaaaagcacttttgtagtaacaactattgggtcctgtcagacctccacggacagcaaagtggttttaatgcaagcccaaggatccttcttaaggtcttatctcaagagctctgggaggtggaagcatggggtgggatcggtggaccagggtggtaagtgtctgcacatctgcctgtccctgtatcagcggctacccaccttccaaaccactcaggacagtacccgtggcactgggcccgcagaagcaagggatgacttggttcttggaagtaatgtcgtcttgtgacattggcctgggacaatcattgtgggtaggtagttattgatcgtttactagataacccattggttctttgcctcatcctctcatccatgggtcagagttgaattcttatgtctatagacttccaatcagaagtctcactggtggggctgggggtgggggcaggcaggaggcatggatgggaacctgagtaggtagtgtggccaagagatcagcacaacctttgcaggctgacttgctaagtctgacagtgacaaacttgtgagcttactgcagtcagtcacagaggctgttctttttcacacaccccttcatgcccggctttccccatatccacatgcagagggcgagctcataaaactacagggaagcgtgaaatgatggctttggtagctgtttactgggtaaccccactgtgacactgtccttttcatgtgatgtggaaacctacttctgtcctccaaaccatgaaatgtgtcatctagactgcagagtacttgagtgctttgcctcccgatatgccagagcttgtggtccaaagcccattcctgtgtgtccgtcctgccatttagccacagaaggctgcggagtgaggcggcagctagcctggccagtggctgtcccgtggaccgacacctgcgcccccttctgcaagcaggattttctggtgccaacactcattcatcattcccgatcaactaggatgaatttaagactgtgctaccatgtgttctcaagtggtagtttaaaaagtggatttttaaagtgcctttcaattgtctgtgaacgtctaaaggactgatttgtctcattttgactgttgagtctttaatgggtgccatttaaaaaacaaaatgct

SEQ ID NO: 132765 - DNA, 373 bp, Homo sapiens
  Payload ID: 5942
  Gene Symbol: FAM57A
  Gene Name: family with sequence similarity 57, member A
  ENST ID: ENST00000572018
  CDS Start-End: 103-312
cggggacgggggcggagggttgaaatcgcgcggccgggccggggcgcgccgagccgaacccagccacgcggcgccagcgaggcggccggacccgcagccccgatgctgctgacgctggccgggggcgcgctcttcttcccggggctcttcgcgctctgcacctgggcgctgcgccgctcccagcccggatggagccgcaccgactgcgtgatgatcagcaccaggctggtttcctcggtgcacgccgtgctggccaccggctcggggatcgtcatcattcgctcctgcgacgacgtgatcaccggcagctaaagcagcagcacacccttctgtacaaggtgaatggaatcctcacgctggccaccttcctttc

SEQ ID NO: 132766 - DNA, 867 bp, Homo sapiens
  Payload ID: 5942
  Gene Symbol: FAM57A
  Gene Name: family with sequence similarity 57, member A
  ENST ID: ENST00000577008
  CDS Start-End: 1-115
ggccaccggctcggggatcgtcatcattcgctcctgcgacgacgtgatcaccggcagaggctccggggagaccttggggacttctttgtcggctgcatcttcacggcagaactgagcactccgtttgtgtcgctgggcagggttctgattcagctaaagcagcagcacacccttctgtacaaggtgaatggaatcctcacgctggccaccttcctttcctgccggatccttctcttccccttcatgtactggtcctatggccgccagcagggactaagcctgctccaagtacccttcagcatcccattctactgcaacgtggccaatgccttcctcgtagctcctcagatctactggttctgtctgctgtgcaggaaggcagtccggctctttgacactccccaagccaaaaaggatggctaaatgctcctgggagtcaggcgcagcctcacaccagctgcctcctccactcagcattccatggaccaaattgtgccctgggtagcctcagactttgggtattgataagccgatggatttgagtttttctaaagaatattcatattacctccttcttctaacttgccctatttgcaaaagcacttttgtagtaacaactattgggtcctgtcagacctccacggacagcaaagtggttttaatgcaagcccaaggatccttcttaaggtcttatctcaagagctctgggaggtggaagcatggggtgggatcggtggaccagggtggtaagtgtctgcacatctgcctgtccctgtatcagcggctacccaccttccaaaccactcaggacagtacccgtggcactgggcccgcagaagcaagggatgacttggttcttggaagtaa

SEQ ID NO: 132767 - DNA, 1481 bp, Homo sapiens
  Payload ID: 5943
  Gene Symbol: FAM57B
  Gene Name: family with sequence similarity 57, member B
  Uniprot ID: Q71RH2
  ENST ID: ENST00000279389
  CDS Start-End: 51-725
gccagacagctaggtgtcattcagggctggtgtcctctgtccaggccatcatggcctccactgccggctacatcgtctccacctcctgcaagcacatcattgatgaccaacactggctgtcctctgcctacacgcaatttgctgtgccctacttcatctacgacatctacgccatgttcctctgtcactggcacaagcaccaggtcaaagggcatggaggggacgacggagcggccagagccccgggcagcacgtgggccatagcgcgtggctacctgcacaaggagttcctcatggtgctccaccatgccgccatggtgctggtgtgcttcccactctcagtggtgtggcgacagggtaagggagacttctttctgggttgcatgttgatggcagaggtcagcacgcccttcgtctgccttggcaagatcctcatccagtacaagcagcagcacacactgctgcacaaggtgaacggggccctgatgctgctcagcttcctctgctgccgggtgctgctctttccctacctgtactgggcctacgggcgccatgccggcctgcccctgctggccgtgcccctggccatccctgcccacgtcaacctgggcgctgcgctgctcctggcccctcagctctactggttcttcctcatctgccgtggggcctgccgcctcttctggccccgctcccggccgcccccggcctgccaggcccaggactgaggccgggggccgggaccctccccctccccacccccacccccgtggagacagggctctggggctgatggctggggttgggagccagggtcctcttgcccggacaaccccaggactgacgatgaccccgaaagggaagaggccccatctctcggggactgagggggtggagagaggggacctcttccccctactctgcccccttcctgcacacccttgcgctggaggaggggagggggcaccgcctcccacccactgagggcaggagggcttgtggggagggacaccaacagggtttcaaggggaccaggagtcagaatgtggggagacgcctctgccaaggccatcccagcccctatgctgccatcccccagggctccccatcacccgagaggagaggacgccccaactaacccccgctggccctcgggcctcccgagtggccggctgcaaccacggctcctctccagggtaggccagcttgaggaatcttatttattttatttatttacccaaatttgaactagtctgttgggttgggggaaggaggtggctgctacccccaagccttcccagtgctgacaaccccgggggcaggcgagggcgcccagtccctcaccatcggctgcacatcgcgccctcgggccctgccatgtccctggtgctactgacctctcaaggcttcctccaatctggggtcgggggaccctgggaggtgctttacagaccgctaataaaagacgatctgcgtgaacgcca

SEQ ID NO: 132768 - DNA, 2313 bp, Homo sapiens
  Payload ID: 5943
  Gene Symbol: FAM57B
  Gene Name: family with sequence similarity 57, member B
  Uniprot ID: Q71RH2
  ENST ID: ENST00000380495
  CDS Start-End: 733-1557
ggagacgccgctgcaggtccggtttctcggtgtctggtcggtgccatcattttcctgcccctcccccgtcctccccaagctggccacttcccctccccctccccctccccaccgagggggcagggggctgggcacggagtctctatgatgatgccatgtgcggtgtctgtgccgggcggcagggactggggcggcagcgagaggaggcagtggagccaggagagcggtggtgaccgctgaccgcttgcccggctgctcctccgctccctcccgcccacctccttcctttggggctggtactcagacccacccccaccccctccccgcctcctcgggccctcccagcctctcacgtaagcctcccctccccacctgcctggtggctccctcccctcccccatccgcatcctcctcctcctgtcccctcttcctctctgtccctcaccaagccatcccctctttgcctctccccatccctcgctggcctgctcctgctccccttctcccatcctcccctcccccgtctctgcccagccagccccctcccgactccccagtttcatcggactccctggccccatcccgtccccgccctggcccctttgtgccccttctcatcgttttctccctccttcccgggcttggcgtcccttctccacccctaactccttccactcggcctccctgccccttcacggcccgcctgcctccctgcccaagtcctgagccaccatgctgaccccgatggtggccgggggggtggtgttccccggactcttcctcctctccaagaacacgctccagcggctgccccagctacgctgggaggaggccgacgcagtcattgtctcagccaggctggtgtcctctgtccaggccatcatggcctccactgccggctacatcgtctccacctcctgcaagcacatcattgatgaccaacactggctgtcctctgcctacacgcaatttgctgtgccctacttcatctacgacatctacgccatgttcctctgtcactggcacaagcaccaggtcaaagggcatggaggggacgacggagcggccagagccccgggcagcacgtgggccatagcgcgtggctacctgcacaaggagttcctcatggtgctccaccatgccgccatggtgctggtgtgcttcccactctcagtggtgtggcgacagggtaagggagacttctttctgggttgcatgttgatggcagaggtcagcacgcccttcgtctgccttggcaagatcctcatccagtacaagcagcagcacacactgctgcacaaggtgaacggggccctgatgctgctcagcttcctctgctgccgggtgctgctctttccctacctgtactgggcctacgggcgccatgccggcctgcccctgctggccgtgcccctggccatccctgcccacgtcaacctgggcgctgcgctgctcctggcccctcagctctactggttcttcctcatctgccgtggggcctgccgcctcttctggccccgctcccggccgcccccggcctgccaggcccaggactgaggccgggggccgggaccctccccctccccacccccacccccgtggagacagggctctggggctgatggctggggttgggagccagggtcctcttgcccggacaaccccaggactgacgatgaccccgaaagggaagaggccccatctctcggggactgagggggtggagagaggggacctcttccccctactctgcccccttcctgcacacccttgcgctggaggaggggagggggcaccgcctcccacccactgagggcaggagggcttgtggggagggacaccaacagggtttcaaggggaccaggagtcagaatgtggggagacgcctctgccaaggccatcccagcccctatgctgccatcccccagggctccccatcacccgagaggagaggacgccccaactaacccccgctggccctcgggcctcccgagtggccggctgcaaccacggctcctctccagggtaggccagcttgaggaatcttatttattttatttatttacccaaatttgaactagtctgttgggttgggggaaggaggtggctgctacccccaagccttcccagtgctgacaaccccgggggcaggcgagggcgcccagtccctcaccatcggctgcacatcgcgccctcgggccctgccatgtccctggtgctactgacctctcaaggcttcctccaatctggggtcgggggaccctgggaggtgctttacagaccgctaataaaagacgatctgcgtgaacgcca

SEQ ID NO: 132769 - DNA, 937 bp, Homo sapiens
  Payload ID: 5943
  Gene Symbol: FAM57B
  Gene Name: family with sequence similarity 57, member B
  ENST ID: ENST00000561666
  CDS Start-End: 499-937
cgcggggagcgaaggggaagagcgaatcccgccgccgcccgcctgggtcggatcctcatcagatgccggacgttggaggaggcaccgggttctggggcgccacaggaggattgaacccccaggctacacccaccacttggatgtatctccggccaagccactgagcatctgcaaaagggagaaacgcctgccgctcagggatattggcacccggtggagaggatgagtgaaacagcctgtgggcggcagaacctggaagaacagagaacgacaagcctgtgcagccttggactgttttgctctcaacaagaagaaatcgacaaggaaaggaagaaatgtaggagagagtccagattccagtgagactcgggcctgactctaaccagctcatggcctgtaaactttcctcccttccacattttcttgtctaggttctgggtgctgaggagaaacatcaacctccctttctgtcttccaacctgtccctctgaggcaggcatgaccctgctgttcgcagtgggttgcgtcttcttcccgttgtgcttcactgccctgcgctggggcttgcagaaccacaccaacctgcagatggagagacaagaggctgtcctggtagcatccaagctggtgtcctctgtccaggccatcatggcctccactgccggctacatcgtctccacctcctgcaagcacatcattgatgaccaacactggctgtcctctgcctacacgcaatttgctgtgccctacttcatctacgacatctacgccatgttcctctgtcactggcacaagcaccaggtcaaagggcatggaggggacgacggagcggccagagccccgggcagcacgtgggccatagcgcgtggctacctgcacaaggagttcctcatggtgctccaccatgccgccatggtgctggtgtgcttcccactct

SEQ ID NO: 132770 - DNA, 876 bp, Homo sapiens
  Payload ID: 5943
  Gene Symbol: FAM57B
  Gene Name: family with sequence similarity 57, member B
  ENST ID: ENST00000569508
  CDS Start-End: 383-511
agtttgacaccttccttttatcccgagaaggtcccttggaagacacttcaggaaggcaggatggcaggacctggttcccttcatcctgcctgtgcctgctccacacctctgctccccagagtagatgggaggggaggtctttctaaacaaaaatgatatctatgtaaatatatgtagtttcaggcttgcacctgttatttcttttgttttcttttttaatggaacaacaatcgctttggctttattttgttttttcaacaaatgtcattttaaagttccaaatatcttgacaaccccctcccttcctttttccaagttctgggtgctgaggagaaacatcaacctccctttctgtcttccaacctgtccctctgaggcaggcatgaccctgctgttcgcagtgggttgcgtcttcttcccgttgtgcttcactgccctgcgctggggcttgcagaaccacaccaacctgcagatggagagacaagaggctgtcctggtagcatccaagtaagaggaccagggtgagggtgtccttcctggggccatggctggctggtgtcctctgtccaggccatcatggcctccactgccggctacatcgtctccacctcctgcaagcacatcattgatgaccaacactggctgtcctctgcctacacgcaatttgctgtgccctacttcatctacgacatctacgccatgttcctctgtcactggcacaagcaccaggtcaaagggcatggaggggacgacggagcggccagagccccgggcagcacgtgggccatagcgcgtggctacctgcacaaggagttcctcatggtgctccaccatgccgccatggtgctggtgtgcttcccactctcagtggtgagt

SEQ ID NO: 132771 - DNA, 1710 bp, Homo sapiens
  Payload ID: 5943
  Gene Symbol: FAM57B
  Gene Name: family with sequence similarity 57, member B
  ENST ID: ENST00000564806
  CDS Start-End: 47-559
acgcctccctctctcccccaggctggtgtcctctgtccaggccatcatggcctccactgccggctacatcgtctccacctcctgcaagcacatcattgatgaccaacactggctgtcctctgcctacacgcaatttgctgtgccctacttcatctacgacatctacgccatgttcctctgtcactggcacaagcaccaggtcaaagggcatggaggggacgacggagcggccagagccccgggcagcacgtgggccatagcgcgtggctacctgcacaaggagttcctcatggtgctccaccatgccgccatggtgctggtgtgcttcccactctcagtggtgtggcgacagggtaagggagacttctttctgggttgcatgttgatggcagaggtcagcacgcccttcgtctgccttggcaagatcctcatccaggtgagtgagcatgggagggtgcaggagcccaatggggaggtcacaggaaggggagggaccttcaaggttgctgccaagggctctagccccttcgtcatccccccctcaccccgtgcattttgagcacctggtgcttgtgtcctggcaaagtgtctggtttgggaggagctgcctgctagggtcgcagggaggcagggagagggccaaggggggccgagcccttctgctgccgtggccactgtgtctgtgtctcctcagtacaagcagcagcacacactgctgcacaaggtgaacggggccctgatgctgctcagcttcctctgctgccgggtgctgctctttccctacctgtactgggcctacgggcgccatgccggcctgcccctgctggccgtgcccctggccatccctgcccacgtcaacctgggcgctgcgctgctcctggcccctcagctctactggttcttcctcatctgccgtggggcctgccgcctcttctggccccgctcccggccgcccccggcctgccaggcccaggactgaggccgggggccgggaccctccccctccccacccccacccccgtggagacagggctctggggctgatggctggggttgggagccagggtcctcttgcccggacaaccccaggactgacgatgaccccgaaagggaagaggccccatctctcggggactgagggggtggagagaggggacctcttccccctactctgcccccttcctgcacacccttgcgctggaggaggggagggggcaccgcctcccacccactgagggcaggagggcttgtggggagggacaccaacagggtttcaaggggaccaggagtcagaatgtggggagacgcctctgccaaggccatcccagcccctatgctgccatcccccagggctccccatcacccgagaggagaggacgccccaactaacccccgctggccctcgggcctcccgagtggccggctgcaaccacggctcctctccagggtaggccagcttgaggaatcttatttattttatttatttacccaaatttgaactagtctgttgggttgggggaaggaggtggctgctacccccaagccttcccagtgctgacaaccccgggggcaggcgagggcgcccagtccctcaccatcggctgcacatcgcgccctcgggccctgccatgtccctggtgctactgacctctcaaggcttcctccaatctggggtcgggggaccctgggaggtgctttacagaccgctaa

SEQ ID NO: 132772 - DNA, 502 bp, Homo sapiens
  Payload ID: 5943
  Gene Symbol: FAM57B
  Gene Name: family with sequence similarity 57, member B
  ENST ID: ENST00000571269
  CDS Start-End: 450-502
tcatcagatgccggacgttggaggaggcaccgggttctggggcgccacaggaggattgaacccccaggctacacccaccacttggatgtatctccggccaagccactgagcatctgcaaaagggagaaacgcctgccgctcagggatattctttttctggtgtgcagatagagggtgggactggcattgcttgggacagtccctaacctgggacagggcacccggtggagaggatgagtgaaacagcctgtgggcggcagaacctggaagaacagagaacgacaagcctgtgcagccttggactgttttgctctcaacaagaagaaatcgacaaggaaaggaagaaatgtaggagagagtccagattccagtgagactcgggcctgactctaaccagctcatggcctgtaaactttcctcccttccacattttcttgtctagggcaggcatgaccctgctgttcgcagtgggttgcgtcttcttcccgttgtgcttcactgc

SEQ ID NO: 132773 - DNA, 1164 bp, Homo sapiens
  Payload ID: 5944
  Gene Symbol: FAM58A
  Gene Name: family with sequence similarity 58, member A
  Uniprot ID: Q8N1B3
  ENST ID: ENST00000440428
  CDS Start-End: 45-731
gcgcgccggggccgcctctccttccgccggtgccgcggcgcctcatggaagccccggagggcggcggaggggggcctgcagcgcggggcccggaggggcagccggcgcccgaagccagggtgcacttccgagtggcgaggttcatcatggaggcaggtgtcaagctagggatgcggtccattcccattgccactgcttgcaccatttaccataagttcttttgcgagaccaacctggacgcctatgacccttacctgattgccatgtcttcaatttacttggccggcaaagtggaagagcagcacctgcggactcgtgacatcatcaatgtgtccaacaggtactttaacccaagcggtgagcccctggaattggactcccgcttctgggaactccgggacagcatcgtgcagtgtgagcttctcatgctgagagttctgcgcttccaggtctccttccagcatccacacaagtacctgctccactacctggtttccctccagaactggctgaaccgccacagctggcagcggacccctgttgccgtcaccgcctgggccctgctgcgggacagctaccatggggcgctgtgcctccgcttccaggcccagcacatcgccgtggcggtgctctacctggccctgcaggtctacggagttgaggtgcccgccgaggtcgaggctgagaagccgtggtggcagatttataccatggacacagagatcccctaaggtcctggcccaggcctgcccaaagagaagcccaggatggtcggctgcctggggacattgtcaccacgtcgccatgacggctggtccccacaggaccagctgggaggactggttgtgctgctggagaagggctggagaaggcaatggcatgctgccgctttgccagtccctagaagtcgcggtgcaggtgatggtgggagccgcgcctccagcgggcaggccgggagtgtactgtgtgcagctgacccaaggcagccacatctgcgtttgtcctttgagaggactttgactacaatacaggcatgacatcaatgaaaggaaagtcatgaaatcgatgagactgaatccctacggatttcttaaaagccagatttgtagggagaatgaatgtgcaacgtggctgaaatctattttgtgtaataaaaggtgatac

SEQ ID NO: 132774 - DNA, 593 bp, Homo sapiens
  Payload ID: 5944
  Gene Symbol: FAM58A
  Gene Name: family with sequence similarity 58, member A
  ENST ID: ENST00000429336
  CDS Start-End: 1-283
ggccggcaaagtggaagagcagcacctgcggactcgtgacatcatcaatgtgtccaacaggtactttaacccaagcggtgagcccctggaattggactcccgcttctgggaactccgggacagcatcgtgcagtgtgagcttctcatgctgagagttctgcgcttccaggtctccttccagcatccacacaaggtgtttaatgacgaccttaccaagccaatcattgataatattgtgtctgatctcattcagatttataccatggacacagagatcccctaaggtcctggcccaggcctgcccaaagagaagcccaggatggtcggctgcctggggacattgtcaccacgtcgccatgacggctggtccccacaggaccagctgggaggactggttgtgctgctggagaagggctggagaaggcaatggcatgctgccgctttgccagtccctagaagtcgcggtgcaggtgatggtgggagccgcgcctccagcgggcaggccgggagtgtactgtgtgcagctgacccaaggcagccacatctgcgtttgtcctttgagaggactttgactacaatacaggcatgacatc

SEQ ID NO: 132775 - DNA, 1306 bp, Homo sapiens
  Payload ID: 5944
  Gene Symbol: FAM58A
  Gene Name: family with sequence similarity 58, member A
  Uniprot ID: Q8N1B3
  ENST ID: ENST00000576892
  CDS Start-End: 114-860
ggcggggccggacgcggccgggtggggcggcagcgcccgccgcgagcacctccagttctgccggcttctgcgcgccggggccgcctctccttccgccggtgccgcggcgcctcatggaagccccggagggcggcggaggggggcctgcagcgcggggcccggaggggcagccggcgcccgaagccagggtgcacttccgagtggcgaggttcatcatggaggcaggtgtcaagctagggatgcggtccattcccattgccactgcttgcaccatttaccataagttcttttgcgagaccaacctggacgcctatgacccttacctgattgccatgtcttcaatttacttggccggcaaagtggaagagcagcacctgcggactcgtgacatcatcaatgtgtccaacaggtactttaacccaagcggtgagcccctggaattggactcccgcttctgggaactccgggacagcatcgtgcagtgtgagcttctcatgctgagagttctgcgcttccaggtctccttccagcatccacacaagtacctgctccactacctggtttccctccagaactggctgaaccgccacagctggcagcggacccctgttgccgtcaccgcctgggccctgctgcgggacagctaccatggggcgctgtgcctccgcttccaggcccagcacatcgccgtggcggtgctctacctggccctgcaggtctacggagttgaggtgcccgccgaggtcgaggctgagaagccgtggtggcaggtgtttaatgacgaccttaccaagccaatcattgataatattgtgtctgatctcattcagatttataccatggacacagagatcccctaaggtcctggcccaggcctgcccaaagagaagcccaggatggtcggctgcctggggacattgtcaccacgtcgccatgacggctggtccccacaggaccagctgggaggactggttgtgctgctggagaagggctggagaaggcaatggcatgctgccgctttgccagtccctagaagtcgcggtgcaggtgatggtgggagccgcgcctccagcgggcaggccgggagtgtactgtgtgcagctgacccaaggcagccacatctgcgtttgtcctttgagaggactttgactacaatacaggcatgacatcaatgaaaggaaagtcatgaaatcgatgagactgaatccctacggatttcttaaaagccagatttgtagggagaatgaatgtgcaacgtggctgaaatctattttgtgtaataaaaggtgatacaagtcaataggga

SEQ ID NO: 132776 - DNA, 578 bp, Homo sapiens
  Payload ID: 5944
  Gene Symbol: FAM58A
  Gene Name: family with sequence similarity 58, member A
  ENST ID: ENST00000482182
  CDS Start-End: 154-578
ttgtagcaatgatctgaatgtatcagaatgactccagtgactgtcactaacttgggagtgagtacctttggggttctatgtccctaaagcctgatgcaccatttcctgcttgtggaagacgcgaatgaaaaatgagatggtgtcaagctagggatgcggtccattcccattgccactgcttgcaccatttaccataagttcttttgcgagaccaacctggacgcctatgacccttacctgattgccatgtcttcaatttacttggccggcaaagtggaagagcagcacctgcggactcgtgacatcatcaatgtgtccaacaggtactttaacccaagcggtgagcccctggaattggactcccgcttctgggaactccgggacagcatcgtgcagtgtgagcttctcatgctgagagttctgcgcttccaggtctccttccagcatccacacaagtacctgctccactacctggtttccctccagaactggctgaaccgccacagctggcagcggacccctgttgccgtcaccgcctgggccctgctgcgggacagctaccatggggcgctgtgcct

SEQ ID NO: 132777 - DNA, 1220 bp, Homo sapiens
  Payload ID: 5944
  Gene Symbol: FAM58A
  Gene Name: family with sequence similarity 58, member A
  ENST ID: ENST00000621629
  CDS Start-End: 45-164
gcgcgccggggccgcctctccttccgccggtgccgcggcgcctcatggaagccccggagggcggcggaggggggcctgcagcgcggggcccggaggggcagccggcgcccgaagccagggtgcacttccgagtggcgaggttcatcatggaggtgtcaagctagggatgcggtccattcccattgccactgcttgcaccatttaccataagttcttttgcgagaccaacctggacgcctatgacccttacctgattgccatgtcttcaatttacttggccggcaaagtggaagagcagcacctgcggactcgtgacatcatcaatgtgtccaacaggtactttaacccaagcggtgagcccctggaattggactcccgcttctgggaactccgggacagcatcgtgcagtgtgagcttctcatgctgagagttctgcgcttccaggtctccttccagcatccacacaagtacctgctccactacctggtttccctccagaactggctgaaccgccacagctggcagcggacccctgttgccgtcaccgcctgggccctgctgcgggacagctaccatggggcgctgtgcctccgcttccaggcccagcacatcgccgtggcggtgctctacctggccctgcaggtctacggagttgaggtgcccgccgaggtcgaggctgagaagccgtggtggcaggtgtttaatgacgaccttaccaagccaatcattgataatattgtgtctgatctcattcagatttataccatggacacagagatcccctaaggtcctggcccaggcctgcccaaagagaagcccaggatggtcggctgcctggggacattgtcaccacgtcgccatgacggctggtccccacaggaccagctgggaggactggttgtgctgctggagaagggctggagaaggcaatggcatgctgccgctttgccagtccctagaagtcgcggtgcaggtgatggtgggagccgcgcctccagcgggcaggccgggagtgtactgtgtgcagctgacccaaggcagccacatctgcgtttgtcctttgagaggactttgactacaatacaggcatgacatcaatgaaaggaaagtcatgaaatcgatgagactgaatccctacggatttcttaaaagccagatttgtagggagaatgaatgtgcaacgtggctgaaatctattttgtgtaataaaaggtgatac

SEQ ID NO: 132778 - DNA, 916 bp, Homo sapiens
  Payload ID: 5944
  Gene Symbol: FAM58A
  Gene Name: family with sequence similarity 58, member A
  ENST ID: ENST00000621817
  CDS Start-End: 44-163
cgcgccggggccgcctctccttccgccggtgccgcggcgcctcatggaagccccggagggcggcggaggggggcctgcagcgcggggcccggaggggcagccggcgcccgaagccagggtgcacttccgagtggcgaggttcatcatggaggcaggaggctaaatattgatttcccaaagatgtccctatcctaatccctggaacctgtgaatgtcatcttatatagcaaaagagattttgaagatgtgattagagaccttaagatgggagatcatcctagattatctgggtgtaaccacacccatccttataaggcaaaggcaggaggagtcaccgtcagagaaggccacgtgaggacagaagcagagttagaagctttgaagatggaggaaggggccagcaaccaaggaatgcagccctcctctagaagctggaaaaggtgtcaagctagggatgcggtccattcccattgccactgcttgcaccatttaccataagttcttttgcgagaccaacctggacgcctatgacccttacctgattgccatgtcttcaatttacttggccggcaaagtggaagagcagcacctgcggactcgtgacatcatcaatgtgtccaacaggtactttaacccaagcggtgagcccctggaattggactcccgcttctgggaactccgggacagcatcgtgcagtgtgagcttctcatgctgagagttctgcgcttccaggtctccttccagcatccacacaagtacctgctccactacctggtttccctccagaactggctgaaccgccacagctggcagcggacccctgttgccgtcaccgcctgggccctgctgcgggacagctaccatggggcgctgtgcctccgcttccaggcccagcacatcgccgtggcggtgctc

SEQ ID NO: 132779 - DNA, 1006 bp, Homo sapiens
  Payload ID: 5944
  Gene Symbol: FAM58A
  Gene Name: family with sequence similarity 58, member A
  ENST ID: ENST00000614851
  CDS Start-End: 1-290
ggcccggaggggcagccggcgcccgaagccagggtgcacttccgagtggcgaggttcatcatggaggtgtcaagctagggatgcggtccattcccattgccactgcttgcaccatttaccataagttcttttgcgagaccaacctggacgcctatgacccttacctgattgccatgtcttcaatttacttggccggcaaagtggaagagcagcacctgcggactcgtgacatcatcaatgtgtccaacagtacctgctccactacctggtttccctccagaactggctgaaccgccacagctggcagcggacccctgttgccgtcaccgcctgggccctgctgcgggacagctaccatggggcgctgtgcctccgcttccaggcccagcacatcgccgtggcggtgctctacctggccctgcaggtctacggagttgaggtgcccgccgaggtcgaggctgagaagccgtggtggcaggtgtttaatgacgaccttaccaagccaatcattgataatattgtgtctgatctcattcagatttataccatggacacagagatcccctaaggtcctggcccaggcctgcccaaagagaagcccaggatggtcggctgcctggggacattgtcaccacgtcgccatgacggctggtccccacaggaccagctgggaggactggttgtgctgctggagaagggctggagaaggcaatggcatgctgccgctttgccagtccctagaagtcgcggtgcaggtgatggtgggagccgcgcctccagcgggcaggccgggagtgtactgtgtgcagctgacccaaggcagccacatctgcgtttgtcctttgagaggactttgactacaatacaggcatgacatcaatgaaaggaaagtcatgaaatcgatgagactgaatccctacggatttcttaaaagccagatttgtagggagaatgaatgtgcaacgtggctgaaatctattttgtgtaataaaaggtgatacaagtc

SEQ ID NO: 132780 - DNA, 1160 bp, Homo sapiens
  Payload ID: 5944
  Gene Symbol: FAM58A
  Gene Name: family with sequence similarity 58, member A
  ENST ID: ENST00000620088
  CDS Start-End: 45-164
gcgcgccggggccgcctctccttccgccggtgccgcggcgcctcatggaagccccggagggcggcggaggggggcctgcagcgcggggcccggaggggcagccggcgcccgaagccagggtgcacttccgagtggcgaggttcatcatggaggtgtcaagctagggatgcggtccattcccattgccactgcttgcaccatttaccataagttcttttgcgagaccaacctggacgcctatgacccttacctgattgccatgtcttcaatttacttggccggcaaagtggaagagcagcacctgcggactcgtgacatcatcaatgtgtccaacaggtactttaacccaagcggtgagcccctggaattggactcccgcttctgggaactccgggacagcatcgtgcagtgtgagcttctcatgctgagagttctgcgcttccaggtctccttccagcatccacacaagtacctgctccactacctggtttccctccagaactggctgaaccgccacagctggcagcggacccctgttgccgtcaccgcctgggccctgctgcgggacagctaccatggggcgctgtgcctccgcttccaggcccagcacatcgccgtggcggtgctctacctggccctgcaggtctacggagttgaggtgcccgccgaggtcgaggctgagaagccgtggtggcagatttataccatggacacagagatcccctaaggtcctggcccaggcctgcccaaagagaagcccaggatggtcggctgcctggggacattgtcaccacgtcgccatgacggctggtccccacaggaccagctgggaggactggttgtgctgctggagaagggctggagaaggcaatggcatgctgccgctttgccagtccctagaagtcgcggtgcaggtgatggtgggagccgcgcctccagcgggcaggccgggagtgtactgtgtgcagctgacccaaggcagccacatctgcgtttgtcctttgagaggactttgactacaatacaggcatgacatcaatgaaaggaaagtcatgaaatcgatgagactgaatccctacggatttcttaaaagccagatttgtagggagaatgaatgtgcaacgtggctgaaatctattttgtgtaataaaaggtgatac

SEQ ID NO: 132781 - DNA, 509 bp, Homo sapiens
  Payload ID: 5944
  Gene Symbol: FAM58A
  Gene Name: family with sequence similarity 58, member A
  ENST ID: ENST00000614850
  CDS Start-End: 1-509
gcggaggggggcctgcagcgcggggcccggaggggcagccggcgcccgaagccagggtgcacttccgagtggcgaggttcatcatggaggcaggtgtcaagctagggatgcggtccattcccattgccactgcttgcaccatttaccataagttcttttgcgagaccaacctggacgcctatgacccttacctgattgccatgtcttcaatttacttggccggcaaagtggaagagcagcacctgcggactcgtgacatcatcaatgtgtccaacagatttataccatggacacagagatcccctaaggtcctggcccaggcctgcccaaagagaagcccaggatggtcggctgcctggggacattgtcaccacgtcgccatgacggctggtccccacaggaccagctgggaggactggttgtgctgctggagaagggctggagaaggcaatggcatgctgccgctttgccagtccctagaagtcgcggtgcaggtgatggtgggagcc

SEQ ID NO: 132782 - DNA, 3163 bp, Homo sapiens
  Payload ID: 5945
  Gene Symbol: FAM60A
  Gene Name: family with sequence similarity 60, member A
  Uniprot ID: Q9NP50
  ENST ID: ENST00000337682
  CDS Start-End: 370-1035
ctctggccgccgcgtttcccgcgccgcggagcttctccccttaaaaggacaatagaggcctcgggagcgcgcgcggtcgccgggacttctccccctcccagcccgcaacgtgcgcgcgcccgtatgcaaataagttcgattcaagagaattttgtgccgggagccgcgcgtgcgcagagggaaagcggaatctacaccttcccggccagcggtagcaactgcagaactgcaggagactatctttctagacaaggcagttgaggaggagggagcgcttgagggggactggcctggcgtgcactccgcacctcggggacattattgcgcgtggaacggctgcttttggaagactattgcccagaagaaaagatgtttggttttcacaagccaaagatgtaccgaagtatagagggctgctgtatttgcagagctaagtcctccagttctcgattcactgacagtaaacgctatgaaaaggacttccagagctgttttggattgcatgagactcgttcaggagacatctgcaatgcctgtgtcctgcttgtgaaaagatggaagaagttgccagcaggatcaaaaaaaaactggaatcatgtggtagatgcaagggctggacccagtctaaagactacattgaaaccaaagaaagtgaaaactctatctgggaacaggataaaaagcaaccagatcagtaaactgcagaaggaatttaaacgtcataattctgatgctcacagtaccacctcaagtgcctccccagctcaatctccttgttacagtaaccagtcagatgacggctcagatacagagatggcttctggttctaacagaacaccagttttttcctttttagatctcacttactggaaaagacagaagatatgttgtgggatcatctataaaggccgttttggggaagtcctcattgacacacatctcttcaagccttgctgcagcaataagaaagcagctgctgagaagccagaggagcaggggccagagcctctgcccatctccactcaggagtggtgactgaggtttttatgtagaaggggaacaaaaaaaaaaatatctgaattttgaaaaaccacaaagctacaaactgaccctcttttttttttgagacggagttttgctcttgttacccaggctggagtgcagtggcgtgatcttggctcactgcaacttccgtctcccgggttcaagtgattctcctgcctcagcctcccaagtagctgggtttataggtgcccgccaccagacccggctaattttttagttttagtagagacggggtttcaccacgttggccaggctggtcttaaatgaccctcttatttttaacttggatacctgctattctgccaaaagacaatttctagagtagttttgaatgggttgatttcccccactcccacaaactctgaagccagtgtctagcttactaaaaaaagagttgtatataatatttaagatgctgagtatttcataggaaagctgaatgctgctgtaaagtgctctttaagtcttttttttttttaatccccttctaatgaatgaaactaggggaatttcaggggacagagatgggatttgttgtatgataaactgtatgtagtttttagtctttctgttttgagaagcagtggttggggcatttttaagatggctggctactcttgttttccctcatgataataaatttgtcataactcagtaacatgaacttgcccctagaggtagttgttaataattttgaaatattaaggtcttgccaagcttctgatgattcacacctgtactactgattattaagcaggacagactgagctttctgttgcaaataccttggaggagaaagtaatttctaaatatacagagaggtaacttgactatatatgttgcatcctgtgcctcccttcatattaatatttgataaagattttaatttatgtaaaacttctaaagcagaatcaaagctcctcttggggaaatggcaagtctttaggataggcaagaccctgtatgaatagtaccaaagcattaccgcatggtagagaacacactcgattaaaaatgttaagctatctgaaaaataaaatgtgcaagtcttcaggatggcacaaaacaaaggttaatgcttcttggggcacatttcttagagggcttgctgagtgtgtaaatataatcgacttttgtttgtgttacatgacttctgtgacttcattgaaaatctgcacaattcagtttcagctctggattacttcagttgacctttgtgaaggtttttatctgtgtagaatgggtgtttgacttgttttagcctattaaatttttattttctttcactctgtattaaaagtaaaacttactaaaagaaaagaggtttgtgttcacattaaatggttttggtttggcttcttttagtcaggctttctgaacattgagatatcctgaacttagagctcttcaatcctaagattttcatgaaaagcctctcacttgaacccaaaccagagtactcttactgcctcttttctaaatgttcaggaaaagcattgccagttcagtcttttcaaaatgagggagaaacatttgcctgccttgtaataacaagactcagtgcttattttttaaactgcattttaaaaattggatagtataataacaataaggagtaagccaccttttataggcaccctgtagttttatagttcttaatctaaacattttatatttccttcttttggaaaaaacctacatgctacaagccaccatatgcacagactatacagtgagttgagttggctctcccacagtctttgaggtgaattacaaaagtccagccattatcatcctcctgagttatttgaaatgattttttttgtacattttggctgcagtattggtggtagaatatactataatatggatcatctctacttctgtatttatttatttattactagacctcaaccacagtcttctttttccccttccacctctctttgcctgtaggatgtactgtatgtagtcatgcactttgtattaatatattagaaatctacagatctgttttgtactttttatactgttggatacttataatcaaaacttttactagggtattgaataaatctagtcttactagaaaataaaa

SEQ ID NO: 132783 - DNA, 1555 bp, Homo sapiens
  Payload ID: 5945
  Gene Symbol: FAM60A
  Gene Name: family with sequence similarity 60, member A
  Uniprot ID: Q9NP50
  ENST ID: ENST00000454658
  CDS Start-End: 240-905
gttgttccggcgcaggtgagggaggtggcggcgagcgacgcggttcacctcccgctgccctcgccctcgccccggcgagcggcccccgcaggaactttcctcccgacgcgagatgtcttatttaccaacaaatccaccagggagcattcttacttgctggctcggcgtctctctcggcagtcaccggagtgcccgagggggaagcacgatttacggaagactattgcccagaagaaaagatgtttggttttcacaagccaaagatgtaccgaagtatagagggctgctgtatttgcagagctaagtcctccagttctcgattcactgacagtaaacgctatgaaaaggacttccagagctgttttggattgcatgagactcgttcaggagacatctgcaatgcctgtgtcctgcttgtgaaaagatggaagaagttgccagcaggatcaaaaaaaaactggaatcatgtggtagatgcaagggctggacccagtctaaagactacattgaaaccaaagaaagtgaaaactctatctgggaacaggataaaaagcaaccagatcagtaaactgcagaaggaatttaaacgtcataattctgatgctcacagtaccacctcaagtgcctccccagctcaatctccttgttacagtaaccagtcagatgacggctcagatacagagatggcttctggttctaacagaacaccagttttttcctttttagatctcacttactggaaaagacagaagatatgttgtgggatcatctataaaggccgttttggggaagtcctcattgacacacatctcttcaagccttgctgcagcaataagaaagcagctgctgagaagccagaggagcaggggccagagcctctgcccatctccactcaggagtggtgactgaggtttttatgtagaaggggaacaaaaaaaaaaatatctgaattttgaaaaaccacaaagctacaaactgaccctcttttttttttgagacggagttttgctcttgttacccaggctggagtgcagtggcgtgatcttggctcactgcaacttccgtctcccgggttcaagtgattctcctgcctcagcctcccaagtagctgggtttataggtgcccgccaccagacccggctaattttttagttttagtagagacggggtttcaccacgttggccaggctggtcttaaatgaccctcttatttttaacttggatacctgctattctgccaaaagacaatttctagagtagttttgaatgggttgatttcccccactcccacaaactctgaagccagtgtctagcttactaaaaaaagagttgtatataatatttaagatgctgagtatttcataggaaagctgaatgctgctgtaaagtgctctttaagtcttttttttttttaatccccttctaatgaatgaaactaggggaatttcaggggacagagatgggatttgttgtatgataaactgtatgtagtttttagtctttctgttttgagaagcagtggttggggcatttttaagatggctggctactcttg

SEQ ID NO: 132784 - DNA, 669 bp, Homo sapiens
  Payload ID: 5945
  Gene Symbol: FAM60A
  Gene Name: family with sequence similarity 60, member A
  ENST ID: ENST00000543615
  CDS Start-End: 290-669
cgccattcgctcggaaactaagttgccatccgcttccgagctggcggccgagggtctttaaatcggcctttgggggtcagtgctgggctctgccggagcgcacgcggcgtggcgttgtttgctcaactccggagggatgcggatgcgacaatgagagcaacacgcggtcgcttaaaaacagcccgtcttccactcgcctgccctcttcggaccgcgcccaagagcctctggtgtccggggtgctttcggagcccgaagttttgctcccgactattgcccagaagaaaagatgtttggttttcacaagccaaagatgtaccgaagtatagagggctgctgtatttgcagagctaagtcctccagttctcgattcactgacagtaaacgctatgaaaaggacttccagagctgttttggattgcatgagactcgttcaggagacatctgcaatgcctgtgtcctgcttgtgaaaagatggaagaagttgccagcaggatcaaaaaaaaactggaatcatgtggtagatgcaagggctggacccagtctaaagactacattgaaaccaaagaaagtgaaaactctatctgggaacaggataaaaagcaaccagatcagtaaactgcagaaggaatttaaacgtcataattctgatgctcacagtaccacctc

SEQ ID NO: 132785 - DNA, 738 bp, Homo sapiens
  Payload ID: 5945
  Gene Symbol: FAM60A
  Gene Name: family with sequence similarity 60, member A
  Uniprot ID: Q9NP50
  ENST ID: ENST00000542983
  CDS Start-End: 493-714
gcagagggaaagcggaatctacaccttcccggccagcggtagcaactgcagaactgcaggagactatctttctagacaaggcagttgaggaggagggagcgcttgagggggactggcctggcgtgcactccgcacctcggggacattattgcgcgtggaacggctgcttttggaagattgcatgagactcgttcaggagacatctgcaatgcctgtgtcctgcttgtgaaaagatggaagaagttgccagcaggatcaaaaaaaaactggaatcatgtggtagatgcaagggctggacccagtctaaagactacattgaaaccaaagaaagtgaaaactctatctgggaacaggataaaaagcaaccagatcagtaaactgcagaaggaatttaaacgtcataattctgatgctcacagtaccacctcaagtgcctccccagctcaatctccttgttacagtaaccagtcagatgacggctcagatacagagatggcttctggttctaacagaacaccagttttttcctttttagatctcacttactggaaaagacagaagatatgttgtgggatcatctataaaggccgttttggggaagtcctcattgacacacatctcttcaagccttgctgcagcaataagaaagcagctgctgagaagccagaggagcaggggccagagcctctgcccatctccactcaggagtggtgactgaggtttttatgtagaagggga

SEQ ID NO: 132786 - DNA, 845 bp, Homo sapiens
  Payload ID: 5945
  Gene Symbol: FAM60A
  Gene Name: family with sequence similarity 60, member A
  ENST ID: ENST00000544921
  CDS Start-End: 1-178
ccgaagtatagagggctgctgtatttgcagagctaagtcctccagttctcgattcactgacagtaaacgctatgaaaaggacttccagagctgttttggagacaatgtcttcctatgttgcctaggctggagtgcagtagctattcacaggtgtgatcattgtgcaccacagccttgaacttttgggctcaagtgatcctcccgtctgagcctctcgagtagctgggactacagattgcatgagactcgttcaggagacatctgcaatgcctgtgtcctgcttgtgaaaagatggaagaagttgccagcaggatcaaaaaaaaactggaatcatgtggtagatgcaagggctggacccagtctaaagactacattgaaaccaaagaaagtgaaaactctatctgggaacaggataaaaagcaaccagatcagtaaactgcagaaggaatttaaacgtcataattctgatgctcacagtaccacctcaagtgcctccccagctcaatctccttgttacagtaaccagtcagatgacggctcagatacagagatggcttctggttctaacagaacaccagttttttcctttttagatctcacttactggaaaagacagaagatatgttgtgggatcatctataaaggccgttttggggaagtcctcattgacacacatctcttcaagccttgctgcagcaataagaaagcagctgctgagaagccagaggagcaggggccagagcctctgcccatctccactcaggagtggtgactgaggtttttatgtagaaggggaacaaaaaaaaaaatatctgaattttgaaaaaccacaaagctacaaactg

SEQ ID NO: 132787 - DNA, 2532 bp, Homo sapiens
  Payload ID: 5945
  Gene Symbol: FAM60A
  Gene Name: family with sequence similarity 60, member A
  Uniprot ID: Q9NP50
  ENST ID: ENST00000539409
  CDS Start-End: 183-404
gttgaggaggagggagcgcttgagggggactggcctggcgtgcactccgcacctcggggacattattgcgcgtggaacggctgcttttggaagattctgatgctcacagtaccacctcaagtgcctccccagctcaatctccttgttacagtaaccagtcagatgacggctcagatacagagatggcttctggttctaacagaacaccagttttttcctttttagatctcacttactggaaaagacagaagatatgttgtgggatcatctataaaggccgttttggggaagtcctcattgacacacatctcttcaagccttgctgcagcaataagaaagcagctgctgagaagccagaggagcaggggccagagcctctgcccatctccactcaggagtggtgactgaggtttttatgtagaaggggaacaaaaaaaaaaatatctgaattttgaaaaaccacaaagctacaaactgaccctcttttttttttgagacggagttttgctcttgttacccaggctggagtgcagtggcgtgatcttggctcactgcaacttccgtctcccgggttcaagtgattctcctgcctcagcctcccaagtagctgggtttataggtgcccgccaccagacccggctaattttttagttttagtagagacggggtttcaccacgttggccaggctggtcttaaatgaccctcttatttttaacttggatacctgctattctgccaaaagacaatttctagagtagttttgaatgggttgatttcccccactcccacaaactctgaagccagtgtctagcttactaaaaaaagagttgtatataatatttaagatgctgagtatttcataggaaagctgaatgctgctgtaaagtgctctttaagtcttttttttttttaatccccttctaatgaatgaaactaggggaatttcaggggacagagatgggatttgttgtatgataaactgtatgtagtttttagtctttctgttttgagaagcagtggttggggcatttttaagatggctggctactcttgttttccctcatgataataaatttgtcataactcagtaacatgaacttgcccctagaggtagttgttaataattttgaaatattaaggtcttgccaagcttctgatgattcacacctgtactactgattattaagcaggacagactgagctttctgttgcaaataccttggaggagaaagtaatttctaaatatacagagaggtaacttgactatatatgttgcatcctgtgcctcccttcatattaatatttgataaagattttaatttatgtaaaacttctaaagcagaatcaaagctcctcttggggaaatggcaagtctttaggataggcaagaccctgtatgaatagtaccaaagcattaccgcatggtagagaacacactcgattaaaaatgttaagctatctgaaaaataaaatgtgcaagtcttcaggatggcacaaaacaaaggttaatgcttcttggggcacatttcttagagggcttgctgagtgtgtaaatataatcgacttttgtttgtgttacatgacttctgtgacttcattgaaaatctgcacaattcagtttcagctctggattacttcagttgacctttgtgaaggtttttatctgtgtagaatgggtgtttgacttgttttagcctattaaatttttattttctttcactctgtattaaaagtaaaacttactaaaagaaaagaggtttgtgttcacattaaatggttttggtttggcttcttttagtcaggctttctgaacattgagatatcctgaacttagagctcttcaatcctaagattttcatgaaaagcctctcacttgaacccaaaccagagtactcttactgcctcttttctaaatgttcaggaaaagcattgccagttcagtcttttcaaaatgagggagaaacatttgcctgccttgtaataacaagactcagtgcttattttttaaactgcattttaaaaattggatagtataataacaataaggagtaagccaccttttataggcaccctgtagttttatagttcttaatctaaacattttatatttccttcttttggaaaaaacctacatgctacaagccaccatatgcacagactatacagtgagttgagttggctctcccacagtctttgaggtgaattacaaaagtccagccattatcatcctcctgagttatttgaaatgattttttttgtacattttggctgcagtattggtggtagaatatactataatatggatcatctctacttctgtatttatttatttattactagacctcaaccacagtcttctttttccccttccacctctctttgcctgtaggatgtactgtatgtagtcatgcactttgtattaatatattagaaatctacagatctgttttgtactttttatactgttggatacttataatcaaaacttttactagggtattgaataaatctagtcttactagaaaataaaa

SEQ ID NO: 132788 - DNA, 459 bp, Homo sapiens
  Payload ID: 5945
  Gene Symbol: FAM60A
  Gene Name: family with sequence similarity 60, member A
  ENST ID: ENST00000539004
  CDS Start-End: 57-459
attcccaagaccaccagttactggaattatttctggactattgcccagaagaaaagatgtttggttttcacaagccaaagatgtaccgaagtatagagggctgctgtatttgcagagctaagtcctccagttctcgattcactgacagtaaacgctatgaaaaggacttccagagctgttttggattgcatgagactcgttcaggagacatctgcaatgcctgtgtcctgcttgtgaaaagatggaagaagttgccagcaggatcaaaaaaaaactggaatcatgtggtagatgcaagggctggacccagtctaaagactacattgaaaccaaagaaagtgaaaactctatctgggaacaggataaaaagcaaccagatcagtaaactgcagaaggaatttaaacgtcataattctgatgctcacagtaccacctcaagtgcctccccagctcaatctc

SEQ ID NO: 132789 - DNA, 3163 bp, Homo sapiens; identical to SEQ ID NO: 132782
  Payload ID: 5945
  Gene Symbol: FAM60A
  Gene Name: family with sequence similarity 60, member A
  Uniprot ID: Q9NP50
  ENST ID: ENST00000617411
  CDS Start-End: 370-1035

SEQ ID NO: 132790 - DNA, 669 bp, Homo sapiens; identical to SEQ ID NO: 132784
  Payload ID: 5945
  Gene Symbol: FAM60A
  Gene Name: family with sequence similarity 60, member A
  ENST ID: ENST00000632726
  CDS Start-End: 290-669

SEQ ID NO: 132791 - DNA, 459 bp, Homo sapiens; identical to SEQ ID NO: 132788
  Payload ID: 5945
  Gene Symbol: FAM60A
  Gene Name: family with sequence similarity 60, member A
  ENST ID: ENST00000632259
  CDS Start-End: 57-459

SEQ ID NO: 132792 - DNA, 845 bp, Homo sapiens; identical to SEQ ID NO: 132786
  Payload ID: 5945
  Gene Symbol: FAM60A
  Gene Name: family with sequence similarity 60, member A
  ENST ID: ENST00000631546
  CDS Start-End: 1-178

SEQ ID NO: 132793 - DNA, 738 bp, Homo sapiens; identical to SEQ ID NO: 132785
  Payload ID: 5945
  Gene Symbol: FAM60A
  Gene Name: family with sequence similarity 60, member A
  Uniprot ID: Q9NP50
  ENST ID: ENST00000633815
  CDS Start-End: 493-714

SEQ ID NO: 132794 - DNA, 1555 bp, Homo sapiens; identical to SEQ ID NO: 132783
  Payload ID: 5945
  Gene Symbol: FAM60A
  Gene Name: family with sequence similarity 60, member A
  Uniprot ID: Q9NP50
  ENST ID: ENST00000633702
  CDS Start-End: 240-905

SEQ ID NO: 132795 - DNA, 2532 bp, Homo sapiens; identical to SEQ ID NO: 132787
  Payload ID: 5945
  Gene Symbol: FAM60A
  Gene Name: family with sequence similarity 60, member A
  Uniprot ID: Q9NP50
  ENST ID: ENST00000631598
  CDS Start-End: 183-404

SEQ ID NO: 132796 - DNA, 2400 bp, Homo sapiens
  Payload ID: 5946
  Gene Symbol: FAM63A
  Gene Name: family with sequence similarity 63, member A
  Uniprot ID: Q8N5J2
  ENST ID: ENST00000312210
  CDS Start-End: 679-1662
agagaaagggtctgttgtttttctctcctgtttctcgctccctctctgctgatcacaaagctgctgaccgggtcagaaagtcctgatggaaatccaccagcgctgggcaggcccctcctcctccagggagcttgtccttgcctaatttttcttcgtcctgatgagaacaaaaaagagagagagaagaaaagaaaaaccacaaacttcctttgaaaaccagcttgtagtcagggcccggagcgcatgccatagactcggcgactcaggaatcctgaagactctctgagcgacctggagcaccttggctgtgtccctgcctgccttcaccctcctccagtgcccccagtactgggcgtgagtccggaagtggccacaacccagcctggaccgtcgcttataaagctgtgtaaacctgtataagctcaggcgttgacagctggaaggcagctggcactggcagcccccttcattgcacctatctcccccatctcattgccacggctgaaccctccttctcaatcttggaacagcacccccttctttaaggagcttcctcagtcccccaggacccgacagcctgagccagatttctactgtgtcaagtggatcccttggaaaggagaacagacacccatcatcacccagagcactaacggcccttgccctctccttgccatcatgaacatcctctttcttcagtggaaggtgaagctccccccgcagaaggaagtgatcacatcggatgagctcatggcccatcttggaaactgcctcctgtccatcaagccccaggagaagtcagagggacttcagcttaattttcagcagaatgtggatgatgcaatgacagtgctgcctaaactggccacaggtctggatgtcaatgtgcgattcacaggcgtctctgattttgagtatacacccgagtgcagtgtctttgacctgctaggcatacctctgtaccatggctggcttgttgatccacagagtcctgaggctgtgcgtgcagttgggaaactgagttacaaccagctggtggagaggatcatcacctgcaaacactccagtgacaccaacctcgtgacagaaggcctgattgcagagcagttcctggagaccaccgcggcccagctgacctaccacggactgtgtgagctgacagcagctgctaaggagggtgaacttagcgtctttttccgaaacaaccactttagcaccatgactaagcataagagtcacttatacctactggtcactgaccagggctttctacaggaggagcaagtcgtatgggagagcctgcacaatgtggatggagacagctgcttttgtgactctgactttcacctgagtcattccctgggcaaggggcctggagcagaaggtgggagtggctccccagaaacgcagctgcaggtagaccaggactacctgattgctctgtccctgcagcagcaacagccacgaggcccgctggggcttaccgacttggagctggcccagcagcttcagcaagaggagtatcaacagcagcaggcagcgcagccagtgcggatgcggacgcgggtcctgtcactgcaggggagaggagccacatctggacgcccagccggggagcgtcggcagaggccgaagcacgagtcagactgcattctgctgtagctctgccccagtgccaggctggcctgccccttcttccagaggctatggctagttggcttgctcccccgcctccacccctgagatgtgctggataacttatttatggactgttggggatgagagcaggcaacaaatgccaaggtcagacttggtaatgtccttgacctcacgtgctgctgccttctctgcctcccatccagggcaacactaggattggtgggtttctggttctcaactcccggtccctgaatagtcacacgtatgtacagactgaggctctggggtgaggtccctatccagaatgcatctcttctgcttcccatccctgctgcctggatgctcctgatcacctaggcaggcctgtctccagttgtttcagagcttaatttgggtttctatctcttatttgtaatgccttcctggggtttggaaataaaacttctggccgggcacggtggctcactcctgtaatctcaacaatttgagaggccaaggtgggcggatcacctgaggttaggagttcgagaccagcctgcccaaaaaggtgaaaccccgtctctactaaaaatacaagaaattagctgggcgtcatggtgggcgcctgtaatcccagctactcgggaggctgaggcaggagaatcacttgaacctgggaggtgaaagttgcagtgagccgagatcgcaccattgcactccagcctgggcgacaagagcaaaactgtctaaaaaaaaaaaaaa

SEQ ID NO: 132797 - DNA, 1961 bp, Homo sapiens
  Payload ID: 5946
  Gene Symbol: FAM63A
  Gene Name: family with sequence similarity 63, member A
  Uniprot ID: Q8N5J2
  ENST ID: ENST00000361738
  CDS Start-End: 221-1774
tttccggcgaggccaagggggcgtggcgtggggcgacgtgggaaacgtagtcccgcaactccgcaatgtccctagcaaccgagggaaggattgttttctgagggatcagtcgttcggtaaacaaatgtctttggggagctgacacctgctgtccttccacctttggtctgcaagtctggattgcttagaggagctaagtcaggagagacatgtaaaggggatgctgcttggtcctcctccttttaatgaaagcacgaaaccttccccctctccttgtcactcttttgcatcccaagcctggcttaggcaagtccctgaggttagtaaacaccttcagtgcccctcagccaagtcccttttgaccatggaataccatcagcctgaggatccagcccctggtaaggccgggactgcagaagcagtcatccctgaaaaccatgaggttctggcaggcccagatgagcaccctcaggacacagatgcaagagatgctgatggggaggctagagaacgggagccagcagaccaagctttgctgcctagccagtgtggggacaaccttgagtcccctctgcctgaagctagctcagctccaccggggccaacccttgggacactgcctgaagtagagacaataagggcatgctccatgccccaggagcttcctcagtcccccaggacccgacagcctgagccagatttctactgtgtcaagtggatcccttggaaaggagaacagacacccatcatcacccagagcactaacggcccttgccctctccttgccatcatgaacatcctctttcttcagtggaaggtgaagctccccccgcagaaggaagtgatcacatcggatgagctcatggcccatcttggaaactgcctcctgtccatcaagccccaggagaagtcagagggacttcagcttaattttcagcagaatgtggatgatgcaatgacagtgctgcctaaactggccacaggtctggatgtcaatgtgcgattcacaggcgtctctgattttgagtatacacccgagtgcagtgtctttgacctgctaggcatacctctgtaccatggctggcttgttgatccacagagtcctgaggctgtgcgtgcagttgggaaactgagttacaaccagctggtggagaggatcatcacctgcaaacactccagtgacaccaacctcgtgacagaaggcctgattgcagagcagttcctggagaccaccgcggcccagctgacctaccacggactgtgtgagctgacagcagctgctaaggagggtgaacttagcgtctttttccgaaacaaccactttagcaccatgactaagcataagagtcacttatacctactggtcactgaccagggctttctacaggaggagcaagtcgtatgggagagcctgcacaatgtggatggagacagctgcttttgtgactctgactttcacctgagtcattccctgggcaaggggcctggagcagaaggtgggagtggctccccagaaacgcagctgcaggtagaccaggactacctgattgctctgtccctgcagcagcaacagccacgaggcccgctggggcttaccgacttggagctggcccagcagcttcagcaagaggagtatcaacagcagcaggcagcgcagccagtgcggatgcggacgcgggtcctgtcactgcaggggagaggagccacatctggacgcccagccggggagcgtcggcagaggccgaagcacgagtcagactgcattctgctgtagctctgccccagtgccaggctggcctgccccttcttccagaggctatggctagttggcttgctcccccgcctccacccctgagatgtgctggataacttatttatggactgttggggatgagagcaggcaacaaatgccaaggtcagacttggtaatgtccttgacctcacgtgctgctgccttctct

SEQ ID NO: 132798 - DNA, 2817 bp, Homo sapiens
  Payload ID: 5946
  Gene Symbol: FAM63A
  Gene Name: family with sequence similarity 63, member A
  Uniprot ID: Q8N5J2
  ENST ID: ENST00000361936
  CDS Start-End: 956-2365
ggccaagggggcgtggcgtggggcgacgtgggaaacgtagtcccgcaactccgcaatgtccctagcaaccgagggaaggattgttttctgagggatcagtcgttcggtaaacaaatgtctgctgaccgggtcagaaagtcctgatggaaatccaccagcgctgggcaggcccctcctcctccagggagcttgtccttgcctaatttttcttcgtcctgatgagaacaaaaaagagagagagaagaaaagaaaaaccacaaacttcctttgaaaaccagcttgtagtcagggcccggagcgcatgccatagactcggcgactcaggaatcctgaagactctctgagcgacctggagcaccttggctgtgtccctgcctgccttcaccctcctccagtgcccccagtactgggcgtgagtccggaagtggccacaacccagcctggaccgtcgcttataaagctgtgtaaacctgtataagctcaggcgttgacagctggaaggcagctggcactggcagcccccttcattgcacctatctcccccatctcattgccacggctgaaccctccttctcaatcttggaacagcacccccttctttaagggaagctgactccacccatgtgttcaatcccaccagtcttccctcccaagtctggaagccccacgacctcttggtctcatctggtcacagcaagttagaggtggaaagagctcagcacggggcccttctgtttacacatatactgcccatagccaggagttactgcacaaacactagccagccttctacactacattccttttccaagacttttctgggttagtttgctttccagcccactgatttccttcttattggacaggtcactcttttgcatcccaagcctggcttaggcaagtccctgaggttagtaaacaccttcagtgcccctcagccaagtcccttttgaccatggaataccatcagcctgaggatccagcccctggtaaggccgggactgcagaagcagtcatccctgaaaaccatgaggttctggcaggcccagatgagcaccctcaggacacagatgcaagagatgctgatggggaggctagagaacgggagccagcagaccaagctttgctgcctagccagtgtggggacaaccttgagtcccctctgcctgaagctagctcagctccaccggggccaacccttgggacactgcctgaagtagagacaataagggcatgctccatgccccaggagcttcctcagtcccccaggacccgacagcctgagccagatttctactgtgtcaagtggatcccttggaaaggagaacagacacccatcatcacccagagcactaacggcccttgccctctccttgccatcatgaacatcctctttcttcagtggaaggtgaagctccccccgcagaaggaagtgatcacatcggatgagctcatggcccatcttggaaactgcctcctgtccatcaagccccaggagaagtcagagggacttcagcttaattttcagcagaatgtggatgatgcaatgacagtgctgcctaaactggccacaggtctggatgtcaatgtgcgattcacaggcgtctctgattttgagtatacacccgagtgcagtgtctttgacctgctaggcatacctctgtaccatggctggcttgttgatccacagagtcctgaggctgtgcgtgcagttgggaaactgagttacaaccagctggtggagaggatcatcacctgcaaacactccagtgacaccaacctcgtgacagaaggcctgattgcagagcagttcctggagaccaccgcggcccagctgacctaccacggactgtgtgagctgacagcagctgctaaggagggtgaacttagcgtctttttccgaaacaaccactttagcaccatgactaagcataagagtcacttatacctactggtcactgaccagggctttctacaggaggagcaagtcgtatgggagagcctgcacaatgtggatggagacagctgcttttgtgactctgactttcacctgagtcattccctgggcaaggggcctggagcagaaggtgggagtggctccccagaaacgcagctgcaggtagaccaggactacctgattgctctgtccctgcagcagcaacagccacgaggcccgctggggcttaccgacttggagctggcccagcagcttcagcaagaggagtatcaacagcagcaggcagcgcagccagtgcggatgcggacgcgggtcctgtcactgcaggggagaggagccacatctggacgcccagccggggagcgtcggcagaggccgaagcacgagtcagactgcattctgctgtagctctgccccagtgccaggctggcctgccccttcttccagaggctatggctagttggcttgctcccccgcctccacccctgagatgtgctggataacttatttatggactgttggggatgagagcaggcaacaaatgccaaggtcagacttggtaatgtccttgacctcacgtgctgctgccttctctgcctcccatccagggcaacactaggattggtgggtttctggttctcaactcccggtccctgaatagtcacacgtatgtacagactgaggctctggggtgaggtccctatccagaatgcatctcttctgcttcccatccctgctgcctggatgctcctgatcacctaggcaggcctgtctccagttgtttcagagcttaatttgggtttctatctcttatttgtaatgccttcctggggtttggaaataaaacttctggccgggca

SEQ ID NO: 132799 - DNA, 1546 bp, Homo sapiens
  Payload ID: 5946
  Gene Symbol: FAM63A
  Gene Name: family with sequence similarity 63, member A
  Uniprot ID: Q8N5J2
  ENST ID: ENST00000493834
  CDS Start-End: 243-1367
acaacccagcctggaccgtcgcttataaagctgtgtaaacctgtataagctcaggcgttgacagctggaaggcagctggcactggcagcccccttcattgcacctatctcccccatctcattgccacggctgaaccctccttctcaatcttggaacagcacccccttctttaagctagctcagctccaccggggccaacccttgggacactgcctgaagtagagacaataagggcatgctccatgccccaggagcttcctcagtcccccaggacccgacagcctgagccagatttctactgtgtcaagtggatcccttggaaaggagaacagacacccatcatcacccagagcactaacggcccttgccctctccttgccatcatgaacatcctctttcttcagtggaaggtgaagctccccccgcagaaggaagtgatcacatcggatgagctcatggcccatcttggaaactgcctcctgtccatcaagccccaggagaagtcagagggacttcagcttaattttcagcagaatgtggatgatgcaatgacagtgctgcctaaactggccacaggtctggatgtcaatgtgcgattcacaggcgtctctgattttgagtatacacccgagtgcagtgtctttgacctgctaggcatacctctgtaccatggctggcttgttgatccacagagtcctgaggctgtgcgtgcagttgggaaactgagttacaaccagctggtggagaggatcatcacctgcaaacactccagtgacaccaacctcgtgacagaaggcctgattgcagagcagttcctggagaccaccgcggcccagctgacctaccacggactgtgtgagctgacagcagctgctaaggagggtgaacttagcgtctttttccgaaacaaccactttagcaccatgactaagcataagagtcacttatacctactggtcactgaccagggctttctacaggaggagcaagtcgtatgggagagcctgcacaatgtggatggagacagctgcttttgtgactctgactttcacctgagtcattccctgggcaaggggcctggagcagaaggtgggagtggctccccagaaacgcagctgcaggtagaccaggactacctgattgctctgtccctgcagcagcaacagccacgaggcccgctggggcttaccgacttggagctggcccagcagcttcagcaagaggagtatcaacagcagcaggcagcgcagccagtgcggatgcggacgcgggtcctgtcactgcaggggagaggagccacatctggacgcccagccggggagcgtcggcagaggccgaagcacgagtcagactgcattctgctgtagctctgccccagtgccaggctggcctgccccttcttccagaggctatggctagttggcttgctcccccgcctccacccctgagatgtgctggataacttatttatggactgttggggatgagagcaggcaacaaatgccaaggtcagacttggtaatgtccttgacctcacgtgctgctg

SEQ ID NO: 132800 - DNA, 508 bp, Homo sapiens
  Payload ID: 5946
  Gene Symbol: FAM63A
  Gene Name: family with sequence similarity 63, member A
  ENST ID: ENST00000497067
  CDS Start-End: 1-428
ctgactttcacctgagtcattccctgggcaaggggcctggagcagaaggtgggagtggctccccagaaacgcagctgcaggtagaccaggactacctgattgctctgtccctgcagcagcaacagccacgaggcccgctggggcttaccgacttggagctggcccagcagcttcagcaagaggagtatcaacagcagcaggcagcgcagccagtgcggatgcggacgcgggtcctgtcactgcaggtgggctgctgcctgggcgcccacactcccggtttccacctcatgctttgccgggtccagaacacctgttattcctgcactggtctcttcaaggtttcttctctcagagtccttcccctgcctgtccctctcccctggagccccttcctgtcttcctctccctactctctgtcccaatcctgacaccccttcttctagaatctcttcttgtgctcttccaaggaagttcagtgaccaattgttaaatccgatacaggggagag

SEQ ID NO: 132801 - DNA, 2637 bp, Homo sapiens
  Payload ID: 5946
  Gene Symbol: FAM63A
  Gene Name: family with sequence similarity 63, member A
  Uniprot ID: Q8N5J2
  ENST ID: ENST00000622754
  CDS Start-End: 445-1854
ctggcagcccccttcattgcacctatctcccccatctcattgccacggctgaaccctccttctcaatcttggaacagcacccccttctttaagggaagctgactccacccatgtgttcaatcccaccagtcttccctcccaagtctggaagccccacgacctcttggtctcatctggtcacagcaagttagaggtggaaagagctcagcacggggcccttctgtttacacatatactgcccatagccaggagttactgcacaaacactagccagccttctacactacattccttttccaagacttttctgggttagtttgctttccagcccactgatttccttcttattggacaggtcactcttttgcatcccaagcctggcttaggcaagtccctgaggttagtaaacaccttcagtgcccctcagccaagtcccttttgaccatggaataccatcagcctgaggatccagcccctggtaaggccgggactgcagaagcagtcatccctgaaaaccatgaggttctggcaggcccagatgagcaccctcaggacacagatgcaagagatgctgatggggaggctagagaacgggagccagcagaccaagctttgctgcctagccagtgtggggacaaccttgagtcccctctgcctgaagctagctcagctccaccggggccaacccttgggacactgcctgaagtagagacaataagggcatgctccatgccccaggagcttcctcagtcccccaggacccgacagcctgagccagatttctactgtgtcaagtggatcccttggaaaggagaacagacacccatcatcacccagagcactaacggcccttgccctctccttgccatcatgaacatcctctttcttcagtggaaggtgaagctccccccgcagaaggaagtgatcacatcggatgagctcatggcccatcttggaaactgcctcctgtccatcaagccccaggagaagtcagagggacttcagcttaattttcagcagaatgtggatgatgcaatgacagtgctgcctaaactggccacaggtctggatgtcaatgtgcgattcacaggcgtctctgattttgagtatacacccgagtgcagtgtctttgacctgctaggcatacctctgtaccatggctggcttgttgatccacagagtcctgaggctgtgcgtgcagttgggaaactgagttacaaccagctggtggagaggatcatcacctgcaaacactccagtgacaccaacctcgtgacagaaggcctgattgcagagcagttcctggagaccaccgcggcccagctgacctaccacggactgtgtgagctgacagcagctgctaaggagggtgaacttagcgtctttttccgaaacaaccactttagcaccatgactaagcataagagtcacttatacctactggtcactgaccagggctttctacaggaggagcaagtcgtatgggagagcctgcacaatgtggatggagacagctgcttttgtgactctgactttcacctgagtcattccctgggcaaggggcctggagcagaaggtgggagtggctccccagaaacgcagctgcaggtagaccaggactacctgattgctctgtccctgcagcagcaacagccacgaggcccgctggggcttaccgacttggagctggcccagcagcttcagcaagaggagtatcaacagcagcaggcagcgcagccagtgcggatgcggacgcgggtcctgtcactgcaggggagaggagccacatctggacgcccagccggggagcgtcggcagaggccgaagcacgagtcagactgcattctgctgtagctctgccccagtgccaggctggcctgccccttcttccagaggctatggctagttggcttgctcccccgcctccacccctgagatgtgctggataacttatttatggactgttggggatgagagcaggcaacaaatgccaaggtcagacttggtaatgtccttgacctcacgtgctgctgccttctctgcctcccatccagggcaacactaggattggtgggtttctggttctcaactcccggtccctgaatagtcacacgtatgtacagactgaggctctggggtgaggtccctatccagaatgcatctcttctgcttcccatccctgctgcctggatgctcctgatcacctaggcaggcctgtctccagttgtttcagagcttaatttgggtttctatctcttatttgtaatgccttcctggggtttggaaataaaacttctggccgggcacggtggctcactcctgtaatctcaacaatttgagaggccaaggtgggcggatcacctgaggttaggagttcgagaccagcctgcccaaaaaggtgaaaccccgtctctactaaaaatacaagaaattagctgggactacaggcatgcgccactgcgcccagctaatttttgtatttttagtagagacggtttcgccactttggtcaggctagtcttgaattcctgacctcaagtaatccgcctgccttggcctcccgaagtgctggaattacaggcgtgagccactgcgcccagctacctgtcatttctaatatagcctgcagggggaacc

SEQ ID NO: 132802 - DNA, 4866 bp, Homo sapiens
  Payload ID: 5947
  Gene Symbol: FAM63B
  Gene Name: family with sequence similarity 63, member B
  ENST ID: ENST00000316848
  CDS Start-End: 205-1473
gcagtcaggcggaggcaagctcagagcgcacggacagagcggtagcgcgcgcccgcgcgcgttcttagtactctccccggtgacgtgcctgaccgaggccgcgccagggcgctgttgctgccaatacagctgtcatggcgtccaaggcgctggctgcggagaagtggccgcggtctccatagagctgggggcgggcggcccggtatggagagcagccccgagagcctgcagccgctagaacacggggtggcggccgggccagcgtcagggacaggttcttcgcaggaagggctacaggagaccaggctcgccgctggtgatggtcctggggtatgggcggcggagaccagcggcgggaatgggctgggggcggcggccgccaggaggagcctcccggactcggcttctcccgcgggctctcctgaggttcccggaccctgcagctcctccgcgggtttggacttgaaggacagtggtttggagagtcctgctgccgccgaggcgcctctgagagggcagtacaaggtgaccgcctccccggagacagccgtggccggagtgggtcatgagttgggtaccgccggagacgcgggagcccgcccggatctcgccggcacctgccaagcagaactgaccgccgccggctccgaagagcccagcagcgccggcggcctcagcagcagttgcagcgacccgagccctcctggggaatctccgagcctggactctctggagtcgttctctaacctgcattcttttcccagtagctgcgagttcaatagtgaggagggagcggagaacagggtccctgaggaggaggagggcgcggcggtgttgcccggggctgttcctctgtgcaaggaggaggagggggaggagaccgctcaggtgctggcggcctccaaggaacgcttcccgggacaatctgtgtatcacatcaagtggatccagtggaaggaagagaacacacccatcatcacccagaatgagaacggaccctgccccttgctggccatcctcaatgttttgctcctggcctggaaggtgaaacttccaccgatgatggaaatcataactgctgagcagctgatggaatatttaggagattacatgcttgatgcaaagccaaaagaaatttcagaaattcaacgtttaaattatgaacagaatatgagtgatgccatggcaattttgcacaaactacagacaggcctggatgtaaatgtaagattcactggtgttcgagtgtttgaatatacaccagaatgcatagtatttgatcttcttgatattcctttgtaccatgggtggttagtagaccctcagattgatgacattgtaaaagctgttggtaactgcagctacaaccaactagtggagaagatcatctcttgtaaacagtcagacaatagtgagctggttagtgaagggtcaactgtatttgttggtaacggaccaggggtttcttactgaagagaaagttgtttgggaaagcctacacaacgtagatggtgatggaaatttctgtgactcagaatttcatcttcgacctccttcagatcctgaaactgtatacaaaggacaacaagatcagatagatcaggattatcttatggcattatctctacaacaagaacagcagagccaagagatcaattgggaacaaatcccggaaggaatcagtgatttggaactagcaaagaaactccaagaggaagaggacagacgggcttctcaatactatcaggaacaggaacaagcagcagctgctgctgctgctgcttctacacaggctcagggccagccagcacaagcctctccatcaagtggaagacaatctgggaatagtgaacgtaaacggaaggaaccacgagaaaaagataaagaaaaagaaaaggaaaaaaatagctgtgttattttgtaacaagtgttggcttctgttggaaccacctatatgtcttgagaaacaaaaccacaggaggaaaggaagaaaaaccgatcaataccgtctgtgcctgatttcctaatggattttgttcgttttttcaggggaacggttgttacttagttacaatcagactttttcaagtcacacaatacactctttatgagctggagtttcatgttacaagttggaaatgctgtgtgttgacattcatgaaaaatactgcacttgtagccagattagcaaatcacagcaaattttgtgtcatagtgacattcataactcatatcagttagtaagctattatatcttctgttctaacaatgaatggaggtaattgatttagtctgattccttcctgaaatctaaatattagcacaatagtttctgaaattttacaatgttaaattatgatctaattcatgagaaaccacgggtttaacatagggattcaaaaaaacaaaaacaaaagaataggaataaataacccttaattgtatattggactagttcagcccttaaacagctttacctttatttaggaatgtacattttaggtattatcttgatcatggagcttagttttaatttagatagcaaaaataaagatttgtatttcttttccaatagcaaaaagttacataacactaatacttataacctatcaatatcagatattaatgactttgtagtgttgtaaaattttgaggaattttggagtctttatcataggtaacctggaccacagttactatttattgacaatgtgattgagtgtatggaggaaagcacagtggatgctaggctttgtaaatatggggatgtagaaaagcagatagttcagtgtctacctttttctagaactaccttgaaccttaaattttaagtcatgttcattgctagaaaattaaatgtacttattaaaaccaatgaaaaagcacatttctgaaatgaagttagagataatctctgtgtcttataaaaagacattaataaaaatctgaaagggccgggcgcagtggctcacgcctgtaatcccaacattttgggaggccaaggtgggcggatcatctgaggccaggagttcgagaccagcctggccagcatggtgaaaccctgtctctactaaaaatacaaaaaatcagcctggcatggtggtgcgtgcctgtagtcccagctactcagggctgaggcaggagaattgcttgaacccggcaggcagaggttgcagtgagccgagatcgccctgctgcactccagcctgggtgacagagggagactccgtctcaaaaaaaaaaaagtctgagagtagctaagaatttatgtaaaagcaatcagagtttttaatttatgggaaccaaataaaactataacctcatagtgtttataagaactcagaaataatatttatttaactttattatgaggccacacatattttcctgtgtttctatatatagtttggaaaactatccttaatagtctgttttatatgccttatatttaaaagtttgttttagttattttgaaagactattgctgctgcaaatagttgtgtgctttacattctaagcttcagtacatttatttaagagcatcataatctgacctgagcatccacttggagagtgttttttttgtgtgtggtctggggtgacaaaagaccacaaaaatgtgtggtctggattttttcaactatgtcattaactttatgatccaagaccagttataggatgaatctgtatgtaaaaatagagtcttatttatggaaggaattattctaagggaaaaatccagggtcaagctgtatcttttatgtcctttatattgcatgtctatttctgttacacaatttgttatttcttcaaatttcctatggtagcatgataaatcatcaaagaacctgtttgggatataaaactctgatagaaaatatttaatgagtatcttgattataacctagaatatgtatacgttagtaaaataaccagatatactacagaactctctattggctcaaacaggttgacctcaatccaagtttactcttgatatcactctgttggctgaaggaggtaactcaaacctcagggtttgtttttcccgggacagatagtagtgatagtgcattatatttgaataagaaaaacaaaccagtataccttgagaaattttaaaaagcatagttgaggcatattttttcataattatatacttatctgtttattgcccatggaaaatatatgtgtagaagtatttcttctgttatttgttactatcttcttaatttgttccaaagaaaatgctgccatactgcattccctctggaaggaaacaaaacaaaacaaaactcactcaaaaccagcagtgctgctatcagataagtagatgtcaatgtatacttacaaggaaaaactaaaaaatgtaatgtgttaattcagcctttttctatgtaatatttccaagtcagactttcttacattcctggaatttactttgatataccaagaataataatgataaaatgtttgctttgattactgtggggggaaagatgaaatgttcaattgtattaaaacaaacaagcttttcagagatactggtttcctgcccttgaagggtataaagaatttagatcatgcctgtaatcccagtactttgggaggccgaggcaggtggatcacctgagatcaggagttcgagaccagcctggccaacatggcaaaaccctgtctctactaaaaatacaataattagccaggcatggtggcgggcacctgtcatcccagctacttgggaggctgaggcaggagaatcgcttgaacccaggaggcagtgattgcagtgagctgagatagcaccactgcatgcaagcctgggcaatagagcgagactccgtctcaaaaaaaaaaaaaaaaaaa

SEQ ID NO: 132803 - DNA, 4820 bp, Homo sapiens
  Payload ID: 5947
  Gene Symbol: FAM63B
  Gene Name: family with sequence similarity 63, member B
  Uniprot ID: Q8NBR6
  ENST ID: ENST00000450403
  CDS Start-End: 35-1897
cggtctccatagagctgggggcgggcggcccggtatggagagcagccccgagagcctgcagccgctagaacacggggtggcggccgggccagcgtcagggacaggttcttcgcaggaagggctacaggagaccaggctcgccgctggtgatggtcctggggtatgggcggcggagaccagcggcgggaatgggctgggggcggcggccgccaggaggagcctcccggactcggcttctcccgcgggctctcctgaggttcccggaccctgcagctcctccgcgggtttggacttgaaggacagtggtttggagagtcctgctgccgccgaggcgcctctgagagggcagtacaaggtgaccgcctccccggagacagccgtggccggagtgggtcatgagttgggtaccgccggagacgcgggagcccgcccggatctcgccggcacctgccaagcagaactgaccgccgccggctccgaagagcccagcagcgccggcggcctcagcagcagttgcagcgacccgagccctcctggggaatctccgagcctggactctctggagtcgttctctaacctgcattcttttcccagtagctgcgagttcaatagtgaggagggagcggagaacagggtccctgaggaggaggagggcgcggcggtgttgcccggggctgttcctctgtgcaaggaggaggagggggaggagaccgctcaggtgctggcggcctccaaggaacgcttcccgggacaatctgtgtatcacatcaagtggatccagtggaaggaagagaacacacccatcatcacccagaatgagaacggaccctgccccttgctggccatcctcaatgttttgctcctggcctggaaggtgaaacttccaccgatgatggaaatcataactgctgagcagctgatggaatatttaggagattacatgcttgatgcaaagccaaaagaaatttcagaaattcaacgtttaaattatgaacagaatatgagtgatgccatggcaattttgcacaaactacagacaggcctggatgtaaatgtaagattcactggtgttcgagtgtttgaatatacaccagaatgcatagtatttgatcttcttgatattcctttgtaccatgggtggttagtagaccctcagattgatgacattgtaaaagctgttggtaactgcagctacaaccaactagtggagaagatcatctcttgtaaacagtcagacaatagtgagctggttagtgaaggctttgtagctgagcagtttctaaataacacagccactcaactgacataccatggattatgtgaactaacttcaacggttcaggaaggagaactttgtgtgttctttcggaataatcattttagcaccatgaccaaatacaagggtcaactgtatttgttggtaacggaccaggggtttcttactgaagagaaagttgtttgggaaagcctacacaacgtagatggtgatggaaatttctgtgactcagaatttcatcttcgacctccttcagatcctgaaactgtatacaaaggacaacaagatcagatagatcaggattatcttatggcattatctctacaacaagaacagcagagccaagagatcaattgggaacaaatcccggaaggaatcagtgatttggaactagcaaagaaactccaagaggaagaggacagacgggcttctcaatactatcaggaacaggaacaagcagcagctgctgctgctgctgcttctacacaggctcagggccagccagcacaagcctctccatcaagtggaagacaatctgggaatagtgaacgtaaacggaaggaaccacgagaaaaagataaagaaaaagaaaaggaaaaaaatagctgtgttattttgtaacaagtgttggcttctgttggaaccacctatatgtcttgagaaacaaaaccacaggaggaaaggaagaaaaaccgatcaataccgtctgtgcctgatttcctaatggattttgttcgttttttcaggggaacggttgttacttagttacaatcagactttttcaagtcacacaatacactctttatgagctggagtttcatgttacaagttggaaatgctgtgtgttgacattcatgaaaaatactgcacttgtagccagattagcaaatcacagcaaattttgtgtcatagtgacattcataactcatatcagttagtaagctattatatcttctgttctaacaatgaatggaggtaattgatttagtctgattccttcctgaaatctaaatattagcacaatagtttctgaaattttacaatgttaaattatgatctaattcatgagaaaccacgggtttaacatagggattcaaaaaaacaaaaacaaaagaataggaataaataacccttaattgtatattggactagttcagcccttaaacagctttacctttatttaggaatgtacattttaggtattatcttgatcatggagcttagttttaatttagatagcaaaaataaagatttgtatttcttttccaatagcaaaaagttacataacactaatacttataacctatcaatatcagatattaatgactttgtagtgttgtaaaattttgaggaattttggagtctttatcataggtaacctggaccacagttactatttattgacaatgtgattgagtgtatggaggaaagcacagtggatgctaggctttgtaaatatggggatgtagaaaagcagatagttcagtgtctacctttttctagaactaccttgaaccttaaattttaagtcatgttcattgctagaaaattaaatgtacttattaaaaccaatgaaaaagcacatttctgaaatgaagttagagataatctctgtgtcttataaaaagacattaataaaaatctgaaagggccgggcgcagtggctcacgcctgtaatcccaacattttgggaggccaaggtgggcggatcatctgaggccaggagttcgagaccagcctggccagcatggtgaaaccctgtctctactaaaaatacaaaaaatcagcctggcatggtggtgcgtgcctgtagtcccagctactcagggctgaggcaggagaattgcttgaacccggcaggcagaggttgcagtgagccgagatcgccctgctgcactccagcctgggtgacagagggagactccgtctcaaaaaaaaaaaagtctgagagtagctaagaatttatgtaaaagcaatcagagtttttaatttatgggaaccaaataaaactataacctcatagtgtttataagaactcagaaataatatttatttaactttattatgaggccacacatattttcctgtgtttctatatatagtttggaaaactatccttaatagtctgttttatatgccttatatttaaaagtttgttttagttattttgaaagactattgctgctgcaaatagttgtgtgctttacattctaagcttcagtacatttatttaagagcatcataatctgacctgagcatccacttggagagtgttttttttgtgtgtggtctggggtgacaaaagaccacaaaaatgtgtggtctggattttttcaactatgtcattaactttatgatccaagaccagttataggatgaatctgtatgtaaaaatagagtcttatttatggaaggaattattctaagggaaaaatccagggtcaagctgtatcttttatgtcctttatattgcatgtctatttctgttacacaatttgttatttcttcaaatttcctatggtagcatgataaatcatcaaagaacctgtttgggatataaaactctgatagaaaatatttaatgagtatcttgattataacctagaatatgtatacgttagtaaaataaccagatatactacagaactctctattggctcaaacaggttgacctcaatccaagtttactcttgatatcactctgttggctgaaggaggtaactcaaacctcagggtttgtttttcccgggacagatagtagtgatagtgcattatatttgaataagaaaaacaaaccagtataccttgagaaattttaaaaagcatagttgaggcatattttttcataattatatacttatctgtttattgcccatggaaaatatatgtgtagaagtatttcttctgttatttgttactatcttcttaatttgttccaaagaaaatgctgccatactgcattccctctggaaggaaacaaaacaaaacaaaactcactcaaaaccagcagtgctgctatcagataagtagatgtcaatgtatacttacaaggaaaaactaaaaaatgtaatgtgttaattcagcctttttctatgtaatatttccaagtcagactttcttacattcctggaatttactttgatataccaagaataataatgataaaatgtttgctttgattactgtggggggaaagatgaaatgttcaattgtattaaaacaaacaagcttttcagagatactggtttcctgcccttgaagggtataaagaatttagatcatgcctgtaatcccagtactttgggaggccgaggcaggtggatcacctgagatcaggagttcgagaccagcctggccaacatggcaaaaccctgtctctactaaaaatacaataattagccaggcatggtggcgggcacctgtcatcccagctacttgggaggctgaggcaggagaatcgcttgaacccaggaggcagtgattgcagtgagctgagatagcaccactgcatgcaagcctgggcaatagagcgagactccgtctc

SEQ ID NO: 132804 - DNA, 9238 bp, Homo sapiens
  Payload ID: 5947
  Gene Symbol: FAM63B
  Gene Name: family with sequence similarity 63, member B
  Uniprot ID: Q8NBR6
  ENST ID: ENST00000559228
  CDS Start-End: 83-1948
aatacagctgtcatggcgtccaaggcgctggctgcggagaagtggccgcggtctccatagagctgggggcgggcggcccggtatggagagcagccccgagagcctgcagccgctagaacacggggtggcggccgggccagcgtcagggacaggttcttcgcaggaagggctacaggagaccaggctcgccgctggtgatggtcctggggtatgggcggcggagaccagcggcgggaatgggctgggggcggcggccgccaggaggagcctcccggactcggcttctcccgcgggctctcctgaggttcccggaccctgcagctcctccgcgggtttggacttgaaggacagtggtttggagagtcctgctgccgccgaggcgcctctgagagggcagtacaaggtgaccgcctccccggagacagccgtggccggagtgggtcatgagttgggtaccgccggagacgcgggagcccgcccggatctcgccggcacctgccaagcagaactgaccgccgccggctccgaagagcccagcagcgccggcggcctcagcagcagttgcagcgacccgagccctcctggggaatctccgagcctggactctctggagtcgttctctaacctgcattcttttcccagtagctgcgagttcaatagtgaggagggagcggagaacagggtccctgaggaggaggagggcgcggcggtgttgcccggggctgttcctctgtgcaaggaggaggagggggaggagaccgctcaggtgctggcggcctccaaggaacgcttcccgggacaatctgtgtatcacatcaagtggatccagtggaaggaagagaacacacccatcatcacccagaatgagaacggaccctgccccttgctggccatcctcaatgttttgctcctggcctggaaggtgaaacttccaccgatgatggaaatcataactgctgagcagctgatggaatatttaggagattacatgcttgatgcaaagccaaaagaaatttcagaaattcaacgtttaaattatgaacagaatatgagtgatgccatggcaattttgcacaaactacagacaggcctggatgtaaatgtaagattcactggtgttcgagtgtttgaatatacaccagaatgcatagtatttgatcttcttgatattcctttgtaccatgggtggttagtagaccctcagattgatgacattgtaaaagctgttggtaactgcagctacaaccaactagtggagaagatcatctcttgtaaacagtcagacaatagtgagctggttagtgaaggctttgtagctgagcagtttctaaataacacagccactcaactgacataccatggattatgtgaactaacttcaacggttcaggaaggagaactttgtgtgttctttcggaataatcattttagcaccatgaccaaatacaagggtcaactgtatttgttggtaacggaccaggggtttcttactgaagagaaagttgtttgggaaagcctacacaacgtagatggtgatggaaatttctgtgactcagaatttcatcttcgacctccttcagatcctgaaactgtatacaaaggacaacaagatcagatagatcaggattatcttatggcattatctctacaacaagaacagcagagccaagagatcaattgggaacaaatcccggaaggaatcagtgatttggaactagcaaagaaactccaagaggaagaggacagacgggcttctcaatactatcaggaacaggaacaagcagcagctgctgctgctgctgcttctacacaggctcagcagggccagccagcacaagcctctccatcaagtggaagacaatctgggaatagtgaacgtaaacggaaggaaccacgagaaaaagataaagaaaaagaaaaggaaaaaaatagctgtgttattttgtaacaagtgttggcttctgttggaaccacctatatgtcttgagaaacaaaaccacaggaggaaaggaagaaaaaccgatcaataccgtctgtgcctgatttcctaatggattttgttcgttttttcaggggaacggttgttacttagttacaatcagactttttcaagtcacacaatacactctttatgagctggagtttcatgttacaagttggaaatgctgtgtgttgacattcatgaaaaatactgcacttgtagccagattagcaaatcacagcaaattttgtgtcatagtgacattcataactcatatcagttagtaagctattatatcttctgttctaacaatgaatggaggtaattgatttagtctgattccttcctgaaatctaaatattagcacaatagtttctgaaattttacaatgttaaattatgatctaattcatgagaaaccacgggtttaacatagggattcaaaaaaacaaaaacaaaagaataggaataaataacccttaattgtatattggactagttcagcccttaaacagctttacctttatttaggaatgtacattttaggtattatcttgatcatggagcttagttttaatttagatagcaaaaataaagatttgtatttcttttccaatagcaaaaagttacataacactaatacttataacctatcaatatcagatattaatgactttgtagtgttgtaaaattttgaggaattttggagtctttatcataggtaacctggaccacagttactatttattgacaatgtgattgagtgtatggaggaaagcacagtggatgctaggctttgtaaatatggggatgtagaaaagcagatagttcagtgtctacctttttctagaactaccttgaaccttaaattttaagtcatgttcattgctagaaaattaaatgtacttattaaaaccaatgaaaaagcacatttctgaaatgaagttagagataatctctgtgtcttataaaaagacattaataaaaatctgaaagggccgggcgcagtggctcacgcctgtaatcccaacattttgggaggccaaggtgggcggatcatctgaggccaggagttcgagaccagcctggccagcatggtgaaaccctgtctctactaaaaatacaaaaaatcagcctggcatggtggtgcgtgcctgtagtcccagctactcagggctgaggcaggagaattgcttgaacccggcaggcagaggttgcagtgagccgagatcgccctgctgcactccagcctgggtgacagagggagactccgtctcaaaaaaaaaaaagtctgagagtagctaagaatttatgtaaaagcaatcagagtttttaatttatgggaaccaaataaaactataacctcatagtgtttataagaactcagaaataatatttatttaactttattatgaggccacacatattttcctgtgtttctatatatagtttggaaaactatccttaatagtctgttttatatgccttatatttaaaagtttgttttagttattttgaaagactattgctgctgcaaatagttgtgtgctttacattctaagcttcagtacatttatttaagagcatcataatctgacctgagcatccacttggagagtgttttttttgtgtgtggtctggggtgacaaaagaccacaaaaatgtgtggtctggattttttcaactatgtcattaactttatgatccaagaccagttataggatgaatctgtatgtaaaaatagagtcttatttatggaaggaattattctaagggaaaaatccagggtcaagctgtatcttttatgtcctttatattgcatgtctatttctgttacacaatttgttatttcttcaaatttcctatggtagcatgataaatcatcaaagaacctgtttgggatataaaactctgatagaaaatatttaatgagtatcttgattataacctagaatatgtatacgttagtaaaataaccagatatactacagaactctctattggctcaaacaggttgacctcaatccaagtttactcttgatatcactctgttggctgaaggaggtaactcaaacctcagggtttgtttttcccgggacagatagtagtgatagtgcattatatttgaataagaaaaacaaaccagtataccttgagaaattttaaaaagcatagttgaggcatattttttcataattatatacttatctgtttattgcccatggaaaatatatgtgtagaagtatttcttctgttatttgttactatcttcttaatttgttccaaagaaaatgctgccatactgcattccctctggaaggaaacaaaacaaaacaaaactcactcaaaaccagcagtgctgctatcagataagtagatgtcaatgtatacttacaaggaaaaactaaaaaatgtaatgtgttaattcagcctttttctatgtaatatttccaagtcagactttcttacattcctggaatttactttgatataccaagaataataatgataaaatgtttgctttgattactgtggggggaaagatgaaatgttcaattgtattaaaacaaacaagcttttcagagatactggtttcctgcccttgaagggtataaagaatttagatcatgcctgtaatcccagtactttgggaggccgaggcaggtggatcacctgagatcaggagttcgagaccagcctggccaacatggcaaaaccctgtctctactaaaaatacaataattagccaggcatggtggcgggcacctgtcatcccagctacttgggaggctgaggcaggagaatcgcttgaacccaggaggcagtgattgcagtgagctgagatagcaccactgcatgcaagcctgggcaatagagcgagactccgtctcaaaaaaaaaaaaaaaaaaaaaattagagctattgtgtctttattttcttaaattttgcccaaggtaacgttatatatcccaccacttcattgctggtttgggtacataggattttgaaagtggtatattaaagtctttccttccaagtattttgtaatacttgaaaattcttagatgtatactgctaacaaaagttagaacttaaacatttttgtttttatcatttatagcctagattagggacatatttgcatcaaccaaatcatcattagatttgaaaataggcagatgaatgaacaaatatggtcattgcactttccttttactttcagagtctaagtatattccttaaggttagtaaccagtctttattaaaaatataaaatttttcttcatgtctaatcccattgcatccacaatgctgtgatttatagtacatgatcaacacttaaaagtactttacatatgtgtgtttctgaagcaagttttcatgacctctgttagattctcaaaagaattcagaacttcaatttaagaatcaccattttaagaatacatgtgtacatatacacattaagcagtataaagcagctaaaattggcattggttttacactggtgcagtgtgcttaggtaaagtaacttcttccatgtttcaaggtcaggttcagagttgaatgaagtgtagatttaaatttaggattaggctttggaatatatcttgtttttattgtctcacatttctgatattgactacttatcccatattctgtttcaaattctttatcatatttcaagttctttctcatacttcttgatcttggcttaactaagcaagttagtatcagagactagttgactgaacccaagattaaacattttgcacttgcacaaaaccttcttagcattttgctttcaatgaatcagaaagtcaattcactaagagacagatcatgagaggaaagagaactagaggccaataaataaaataattgttcatatattaatgttcacatgtgaactacatatctaaaatcttggagaaaaatcaaggcaagaatttccagaactgtcctcaaatagctcatttatttaagttttgttaaaaagcaaaagcgaattgattacatttgattaacttttcctattccatgcacaagttaccttaaaacatgataaaaaccttatgggcattacctatcacacagtacttatgcataaacttataatagtaaaattactaatgtttgataaaataagatggaggcattacaaatagtctacagtttgtattttaaggaattggacatgaagaattctagatcattttgtgtctataaacccgactttctatcttgccttgggcaaactttctgtgcctcaatgtactctttaaatatgtgaaggatgctctttttgattaagtgttttgcactcctgaataaagggcatagtataagcacaaagtatgacttaatttatcacaaatattacacatcctatgttcttgaatgtgcacacttttttctcaataacaaaatatatcttaagtcagtttttttaatgctgtcaaaatttgtagaattttctttgagtatggcgtgatctcttcccaaatgcattttacagttttttgtgtgttctatagactatagagtcaaaatcaagagtattttgagaggatcagaagcatttaaaaatctatttttttctagtatctttcacagatctaaatatttagattctctttgcctttttctccatggaatacggtggtatcaaattactaatacagtatataaacttcgtttgcattggtggaattcatttagatctctcaagtaatattattttagggctatataaattgtgtttttagtgtaaaatgttatttgataatgtgaagttaaatcccttttagaaagtgactgaaaatggtaaaggaactcatcagaatcttagcgttcttaagttctctgataatttagtatattttattaatgatgtccaacacctctaagattgttgagaaaacatgaagaattgaggttactcttctcaggtgacactttaaatattaaaatcagaggcttcctgaacaaaacaaattgcaaaatagcgataatggcatgggagaggccagatgcaggactctggtaaatttaacttactttgaatatctatctaaattttagttcatgcatgttcttacttaatcctggtgtttttgctcttagatgttagagtttaataaattgtgatacgcatatatttttttacatgaaggattctactttctaattttacttttctgatctcaagaaaattaaacttgaaaaacggggtaaaattcttcaactattgcctcaagttcagttttgtcctattgtcctgagaaaggagatttagacttgtctgcctaacacaggtattttttagggcatcgtactatcccagagaaagtgttgagataccatggcagaaatataaaacctaagctttgaaccccagtagacttcttcttctgccattaagtctctctttatctgatattctaaggatttcttcaaactacttaataatttgtcaccattaactttaatatccagttttaatctgcactgtaatatcctgctttgagaagaaagaatgcctcataaattagagaaggacaaaacaaaatgttttggaaggtgatcctggctcctttggctctcataattgttttatagctgaaaataaaaagtcaggaaactggcccggtgcggtggctcatgcctgtaatcccagcactttgggaggctgaggtgggtggatcacctgaagtcaggagttcgagaccagcctggccaacatggtgaaaccctgtctctactaaaaatacaaaaaaaattagctgggtgtggtggcacatgcctgtaatcccagccactggggaggttgaggcgcaagaatcgcttgaacccggaaggcagaggttgcagtgagccaagattgccccactgcactccagcctgggcgactgagcgagactcttatatctcaaaaaaaaaaaaaaaaaaaagtcaagaaactgaaattcccatttaagttctcaaatcagtgatctgtcaaaataggccttgtaactgaaataccttacaaagcagttctaactaatgcaatgtgttttttaaaaatttttaatgaaccttacattgtgaacataattgcaacatgttttaagacaaacagtatttaatccttgaagacctgtcttgtatgtctctcaattttgtcagaatttttattattgtttttcacatatgtgaaataagcagttttttcagggtacatagggtatctttgttttacagatttttaaagatgaggttttgaaaagccctcagaggtttttgttaaaagactatcttgcttaataaatgacagcttgttacagattcacacattacaagtaggacagtataacaggagattggtgtgtgaatgctacaaaacagtcagcaaaaggaatcatgtttgcttgtgaaacttcagaggtaccctgaaagtcatttcctaaagctagtgcgtgtgaatcttttccttgaattgtgcagaataattggattgaggcacatattttgaggagtagcaagtggaatggtataatgactacagagaaaattatcttgaaatatagcaaggaagagaaacaagttttctttctccactttattgttggactaattgggtcaatttgctgtgacatatcaaagatctctttgtgccaggccaagactggctactgagttctcaaagcgttttaatatatagattacgtatgagtgcctattttttcctcctcctttcattttttatcttaatacccattttacttctgaaataattcatctgttttgctttatgaccagctttaatttcaattgaggaataataacaaccctagagattcataggaaagagcattgaaatacattttttgcataaagatacctaaaaccatctacccagcttagggttgaactgaatttctgtgaaataaatttgttttaaatactaattattttaaaactacttaattcttaaaaacaatgtcatcagtttcaaaactttcactttgggaggatattccttaaaaggcatacatagatggtaaagtataaaatatttctgacagaattattcagtattattcaacatttactttcatgtttgttattgtaccacaaagatagtgtcattgttgggttaaaatgttggctgtttttgttaatatacttaaaactgtaaccagtgaataacacctgtagtattttttattatagattatattttatttcaataaactttgatatttagaccaaa

SEQ ID NO: 132805 - DNA, 1859 bp, Homo sapiens
  Payload ID: 5947
  Gene Symbol: FAM63B
  Gene Name: family with sequence similarity 63, member B
  ENST ID: ENST00000560289
  CDS Start-End: 111-1250
gaggccgcgccagggcgctgttgctgccaatacagctgtcatggcgtccaaggcgctggctgcggagaagtggccgcggtctccatagagctgggggcgggcggcccggtatggagagcagccccgagagcctgcagccgctagaacacggggtggcggccgggccagcgtcagggacaggttcttcgcaggaagggctacaggagaccaggctcgccgctggtgatggtcctggggtatgggcggcggagaccagcggcgggaatgggctgggggcggcggccgccaggaggagcctcccggactcggcttctcccgcgggctctcctgaggttcccggaccctgcagctcctccgcgggtttggacttgaaggacagtggtttggagagtcctgctgccgccgaggcgcctctgagagggcagtacaaggtgaccgcctccccggagacagccgtggccggagtgggtcatgagttgggtaccgccggagacgcgggagcccgcccggatctcgccggcacctgccaagcagaactgaccgccgccggctccgaagagcccagcagcgccggcggcctcagcagcagttgcagcgacccgagccctcctggggaatctccgagcctggactctctggagtcgttctctaacctgcattcttttcccagtagctgcgagttcaatagtgaggagggagcggagaacagggtccctgaggaggaggagggcgcggcggtgttgcccggggctgttcctctgtgcaaggaggaggagggggaggagaccgctcaggtgctggcggcctccaaggaacgcttcccgggacaatctgtgtatcacatcaagtggatccagtggaaggaagagaacacacccatcatcacccagaatgagaacggaccctgccccttgctggccatcctcaatgttttgctcctggcctggaaggtgaaacttccaccgatgatggaaatcataactgctgagcagctgatggaatatttaggagattacatgcttgatgcaaagccaaaagaaatttcagaaattcaacgtttaaattatgaacagaatatgagtgatgccatggcaattttgcacaaactacagacaggcctggatgtaaatattgatgacattgtaaaagctgttggtaactgcagctacaaccaactagtggagaagatcatctcttgtaaacagtcagacaatagtgagctggttagtgaaggtgggctttgtagctgagcagtttctaaataacacagccactcaactgacataccatggattatgtgaactaacttcaacggttcaggaaggagaactttgtgtgttctttcggaataatcattttagcaccatgaccaaatacaagggtcaactgtatttgttggtaacggaccaggggtttcttactgaagagaaagttgtttgggaaagcctacacaacgtagatggtgatggaaatttctgtgactcagaatttcatcttcgacctccttcagatcctgaaactgtatacaaaggacaacaagatcagatagatcaggattatcttatggcattatctctacaacaagaacagcagagccaagagatcaattgggaacaaatcccggaaggaatcagtgatttggaactagcaaagaaactccaagaggaagaggacagacgggcttctcaatactatcaggaacaggaacaagcagcagctgctgctgctgctgcttctacacaggctcagcagggccagccagcacaagcctctccatcaagtggaagacaatctgggaatagtgaacgtaaacggaaggaaccacgagaaaaagataaagaaaaagaaaaggaaaaaaa

SEQ ID NO: 132806 - DNA, 1473 bp, Homo sapiens
  Payload ID: 5948
  Gene Symbol: FAM64A
  Gene Name: family with sequence similarity 64, member A
  Uniprot ID: Q9BSJ6
  ENST ID: ENST00000250056
  CDS Start-End: 84-830
ggcgaggagcagctgtgctgcggctgtgctcggccttagtggtgtcggggtctagtggacagagaagactcttggccaggcagatggcttctcggtggcagaacatggggacctccgtgcgccggagatctctccagcaccaggagcagctggaggacagcaaggagctgcagcctgtggtcagccatcaggagacctctgtaggggccctggggtccctgtgcagacagttccaaaggaggctgcccctgagagccgtcaacctcaacctccgcgcagggccctcctggaaacgcctggaaaccccagagccaggtcagcagggcctccaggctgcagctcgctcagctaagagtgctttgggtgccgtgtcccagagaatccaggagtcctgccaaagtggcaccaagtggctggtggagacccaggtgaaggccaggaggcggaagagaggagcacagaagggcagtggatccccaactcacagcctgagccagaagagcacccggctgtctggagccgcccctgcccactcagccgcagacccctgggagaaggagcatcaccgcctctctgtccggatgggctcacatgcccacccattacggcgatcaaggcgggaggctgccttccggagcccctactcctcaacagagcccctctgctctcccagcgagtctgacagtgacctagagcctgtgggggcgggaattcagcatctccagaagctgtcccaagagctagatgaagccattatggcggaagagaggaaacaagccctgtctgaccgccaaggcttcatactcaaggatgtctatgcttccccgtgagcttcctggaaaaaacccccgggagtcgtcagtacccctgggccactgctaacaagcacctaacaaggggcccagagccccctgctccagccacatctggacccatcagtgactgcctgccatagcctgagagtgtcttggggagaccttgcagagggggagaattgttccttctgctttcctaggggactcttgagcttagaaactcatcgtacacttgaccttgagccttctatttgcctcatctataacatgaagtgctagcatcagatatttgagagctcttagctctgtacccgggtgcctggtttttggggagtcatccgcagagtcactcacccactgtgtttctggtgccaaggctcttgagggccccactctcatccctcctttccctaccagggactcggaggaaggcataggagatatttccaggcttacgaccctgggctcacgggtacctatttatatgctcagtgcagagcactgtggatgtgccaggaggggtagccctgttcaagagcaatttctgccctttgtaaattatttaagaaacctgctttgtcattttattagaaagaaaccagcgtgtgactttcctagataacactgctttctcataataaagactatttgcatttga

SEQ ID NO: 132807 - DNA, 833 bp, Homo sapiens
  Payload ID: 5948
  Gene Symbol: FAM64A
  Gene Name: family with sequence similarity 64, member A
  Uniprot ID: Q9BSJ6
  ENST ID: ENST00000576056
  CDS Start-End: 50-766
cttagtggtgtcggggtctagtggacagagaagactcttggccaggcagatggcttctcggtggcagaacatggggacctccgtgcgccggagatctctccagcaccaggagcagctggaggacagcaaggagctgcagcctgtggtcagccatcaggagacctctgtaggggccctggggtccctgtgcagacagttccaaaggaggctgcccctgagagccgtcaacctcaacctccgcgcagggccctcctggaaacgcctggaaaccccagagccaggtcagcagggcctccaggctgcagctcgctcagctaagagtgctttgggtgccgtgtcccagagaatccaggagtcctgccaaagtggcaccaagtggctggtggagacccaggtgaaggccaggaggcggaagagaggagcacagaagggcagtggatccccaactcacagcctgagccagaagagcacccggctgtctggagccgcccctgcccactcagccgcagacccctgggagaaggagcatcaccgcctctctgtccggatgggctcacatgcccacccattacggcgatcaaggcgggaggctgccttccggagcccctactcctcaacagagcccctctgctctcccagcgagtctgacagtgacctagagcctgtgggggcgggaattcagcatctccagaagctgtcccaagagctagatgaagccattatggcggaagagagtggtgacatcgtctctctcattcatgactgaggaagtgcctgcagcacgctgggggccccaagtagctacagccaccttccagcaccccccaccccgc

SEQ ID NO: 132808 - DNA, 1551 bp, Homo sapiens
  Payload ID: 5948
  Gene Symbol: FAM64A
  Gene Name: family with sequence similarity 64, member A
  ENST ID: ENST00000572595
  CDS Start-End: 79-918
ggagcagctgtgctgcggctgtgctcggccttagtggtgtcggggtctagtggacagagaagactcttggccaggcagatggcttctcggtggcagaacatggggacctccgtgcgccggagatctctccagcaccaggagcagctggaggacagcaaggagctgcagcctgtggtcagccatcaggagacctctgtaggggccctggggtccctgtgcagacagttccaaaggaggctgcccctgagagccgtcaacctcaacctccgcgcagggccctcctggaaacgcctggaaaccccagagccaggtcagcagggcctccaggctgcagctcgctcagctaagagtgctttgggtgccgtgtcccaggggataaacttcaggagctgccgagaaggtccagttagaggggatttgctgtcaaatgagagctgctgtcaggaagacgtccttatattggatagaatccaggagtcctgccaaagtggcaccaagtggctggtggagacccaggtgaaggccaggaggcggaagagaggagcacagaagggcagtggatccccaactcacagcctgagccagaagagcacccggctgtctggagccgcccctgcccactcagccgcagacccctgggagaaggagcatcaccgcctctctgtccggatgggctcacatgcccacccattacggcgatcaaggcgggaggctgccttccggagcccctactcctcaacagagcccctctgctctcccagcgagtctgacagtgacctagagcctgtgggggcgggaattcagcatctccagaagctgtcccaagagctagatgaagccattatggcggaagagaggaaacaagccctgtctgaccgccaaggcttcatactcaaggatgtctatgcttccccgtgagcttcctggaaaaaacccccgggagtcgtcagtacccctgggccactgctaacaagcacctaacaaggggcccagagccccctgctccagccacatctggacccatcagtgactgcctgccatagcctgagagtgtcttggggagaccttgcagagggggagaattgttccttctgctttcctaggggactcttgagcttagaaactcatcgtacacttgaccttgagccttctatttgcctcatctataacatgaagtgctagcatcagatatttgagagctcttagctctgtacccgggtgcctggtttttggggagtcatccgcagagtcactcacccactgtgtttctggtgccaaggctcttgagggccccactctcatccctcctttccctaccagggactcggaggaaggcataggagatatttccaggcttacgaccctgggctcacgggtacctatttatatgctcagtgcagagcactgtggatgtgccaggaggggtagccctgttcaagagcaatttctgccctttgtaaattatttaagaaacctgctttgtcattttattagaaagaaaccagcgtgtgactttcctagataacactgctttctcataataaagactat

SEQ ID NO: 132809 - DNA, 1948 bp, Homo sapiens
  Payload ID: 5948
  Gene Symbol: FAM64A
  Gene Name: family with sequence similarity 64, member A
  Uniprot ID: Q9BSJ6
  ENST ID: ENST00000572447
  CDS Start-End: 110-826
cgcagagtttcaaatcggctgcggtgggcgaggagcagctgtgctgcggctgtgctcggccttagtggtgtcggggtctagtggacagagaagactcttggccaggcagatggcttctcggtggcagaacatggggacctccgtgcgccggagatctctccagcaccaggagcagctggaggacagcaaggagctgcagcctgtggtcagccatcaggagacctctgtaggggccctggggtccctgtgcagacagttccaaaggaggctgcccctgagagccgtcaacctcaacctccgcgcagggccctcctggaaacgcctggaaaccccagagccaggtcagcagggcctccaggctgcagctcgctcagctaagagtgctttgggtgccgtgtcccagagaatccaggagtcctgccaaagtggcaccaagtggctggtggagacccaggtgaaggccaggaggcggaagagaggagcacagaagggcagtggatccccaactcacagcctgagccagaagagcacccggctgtctggagccgcccctgcccactcagccgcagacccctgggagaaggagcatcaccgcctctctgtccggatgggctcacatgcccacccattacggcgatcaaggcgggaggctgccttccggagcccctactcctcaacagagcccctctgctctcccagcgagtctgacagtgacctagagcctgtgggggcgggaattcagcatctccagaagctgtcccaagagctagatgaagccattatggcggaagagagtggtgacatcgtctctctcattcatgactgaggaagtgcctgcaggaaacaagccctgtctgaccgccaaggcttcatactcaaggatgtctatgcttccccgtgagcttcctggaaaaaacccccgggagtcgtcagtacccctgggccactgctaacaagcacctaacaaggggcccagagccccctgctccagccacatctggacccatcagtgactgcctgccatagcctgagagtgtcttggggagaccttgcagagggggagaattgttccttctgctttcctaggggactcttgagcttagaaactcatcgtacacttgaccttgagccttctatttgcctcatctataacatgaagtgctagcatcagatatttgagagctcttagctctgtacccgggtgcctggtttttggggagtcatccgcagagtcactcacccactgtgtttctggtgccaaggctcttgagggccccactctcatccctcctttccctaccagggactcggaggaaggcataggagatatttccaggcttacgaccctgggctcacgggtacctatttatatgctcagtgcagagcactgtggatgtgccaggaggggtagccctgttcaagagcaatttctgccctttgtaaattatttaagaaacctgctttgtcattttattagaaagaaaccagcgtgtgactttcctagataacactgctttctcataataaagactatttgcatttgacatctgttccctttcaccggcaacctccaacctcccccgccctcccacaccactctgggctatagatttgtaatttgtggtttggggtctggccctcatccacctctgctccgagccagtctgcccccaatcccaccccagggagaacatgtagaaagggaaaggtttctcaacttagttcagaccaaaacacattgtaaaggcaaagaaggtttttatttaagtgacaacatttgagagctaaaaaccagctcacatcaaaatcaagacccagttgtaaaaatcttttaactccataatgctgtttttgtcttgttagaaatctgatatcttacattagcgtttctaacggattttgtacaaggcagccataaggaatataataaacctttttcaccacagaa

SEQ ID NO: 132810 - DNA, 1002 bp, Homo sapiens
  Payload ID: 5948
  Gene Symbol: FAM64A
  Gene Name: family with sequence similarity 64, member A
  ENST ID: ENST00000571373
  CDS Start-End: 82-825
cgaggagcagctgtgctgcggctgtgctcggccttagtggtgtcggggtctagtggacagagaagactcttggccaggcagatggcttctcggtggcagaacatggggacctccgtgcgccggagatctctccagcaccaggagcagctggaggacagcaaggagctgcagcctgtggtcagccatcaggagacctctgtaggggccctggggtccctgtgcagacagttccaaaggaggctgcccctgagagccgtcaacctcaacctccgcgcagggccctcctggaaacgcctggaaaccccagagccaggtcagcagggcctccaggctgcagctcgctcagctaagagtgctttgggtgccgtgtcccagagaatccaggagtcctgccaaagtggcaccaagtggctggtggagacccaggtgaaggccaggaggcggaagagaggagcacagaagggcagtggatccccaactcacagcctgagccagaagagcacccggctgtctggagccgcccctgcccactcagccgcagacccctgggagaaggagcatcaccgcctctctgtccggatgggctcacatgcccacccattacggcgatcaaggcgggaggctgccttccggagcccctactcctcaacagagcccctctgctctcccagcgagtctgacagtgacctagagcctgtgggggcgggaattcagcatctccagaagctgtcccaagagctagatgaagccattatggcggaagagagaactctccgtggctcgtctgtgccctgcctgcctatggaattgggaaaagcaacctgactgctatggagttcctggtctgtctgctcatggccccatcctgggggcagggcctcggttgtggacctcccctaacttggggctgtttccccattccacttgtataatggccatgatgggctctaaggctgggccctgccagctctatgtgttgaggggccatattcctaccacatt

SEQ ID NO: 132811 - DNA, 928 bp, Homo sapiens
  Payload ID: 5948
  Gene Symbol: FAM64A
  Gene Name: family with sequence similarity 64, member A
  ENST ID: ENST00000571572
  CDS Start-End: 1-391
gtggctggtggagacccaggtgaaggccaggaggcggaagagaggagcacagaagggcagtggatccccaactcacagcctgagccagaagagcacccggctgtctggagccgcccctgcccactcagccgcagacccctgggagaaggagcatcaccgcctctctgtccggatgggctcacatgcccacccattacggcgatcaaggcgggaggctgccttccggagcccctactcctcaacagagcccctctgctctcccagcgagtctgacagtgacctagagcctgtgggggcgggaattcagcatctccagaagctgtcccaagagctagatgaagccattatggcggaagagagtggtgacatcgtctctctcattcatgactgaggaagtgcctgcaggtaatgcccacctcccaagagtctttctcactgtccttctcctccatctcatgcatgagcaagttaaagaaaaagcccacagagctgatgggcacagcagagtaggtagtacctacttgccgcttgaagccagagctgctaacctcactgaccccgtcattaacagcacgctgggggccccaagtagctacagccaccttccagcaccccccaccccgcagtgagcagggaaaggcatccctacttctcctaccttgagcacagtgaaaaaggcagctctgtcttgaaggaaacaagccctgtctgaccgccaaggcttcatactcaaggatgtctatgcttccccgtgagcttcctggaaaaaacccccgggagtcgtcagtacccctgggccactgctaacaagcacctaacaaggggcccagagccccctgctccagccacatctggacccatcagtgactgcctgccatagcctgagagtgtcttggggagaccttgcagagggggagaattgttcctt

SEQ ID NO: 132812 - DNA, 891 bp, Homo sapiens
  Payload ID: 5948
  Gene Symbol: FAM64A
  Gene Name: family with sequence similarity 64, member A
  ENST ID: ENST00000570337
  CDS Start-End: 82-825
cgaggagcagctgtgctgcggctgtgctcggccttagtggtgtcggggtctagtggacagagaagactcttggccaggcagatggcttctcggtggcagaacatggggacctccgtgcgccggagatctctccagcaccaggagcagctggaggacagcaaggagctgcagcctgtggtcagccatcaggagacctctgtaggggccctggggtccctgtgcagacagttccaaaggaggctgcccctgagagccgtcaacctcaacctccgcgcagggccctcctggaaacgcctggaaaccccagagccaggtcagcagggcctccaggctgcagctcgctcagctaagagtgctttgggtgccgtgtcccagagaatccaggagtcctgccaaagtggcaccaagtggctggtggagacccaggtgaaggccaggaggcggaagagaggagcacagaagggcagtggatccccaactcacagcctgagccagaagagcacccggctgtctggagccgcccctgcccactcagccgcagacccctgggagaaggagcatcaccgcctctctgtccggatgggctcacatgcccacccattacggcgatcaaggcgggaggctgccttccggagcccctactcctcaacagagcccctctgctctcccagcgagtctgacagtgacctagagcctgtgggggcgggaattcagcatctccagaagctgtcccaagagctagatgaagccattatggcggaagagagaactctccgtggctcgtctgtgccctgcctgcctatggaattgggaaaagcaacctgactgctatggagttcctgtggtgacatcgtctctctcattcatgactgaggaagtgcctgcaggaaa

SEQ ID NO: 132813 - DNA, 831 bp, Homo sapiens
  Payload ID: 5948
  Gene Symbol: FAM64A
  Gene Name: family with sequence similarity 64, member A
  ENST ID: ENST00000573557
  CDS Start-End: 83-619
gcgaggagcagctgtgctgcggctgtgctcggccttagtggtgtcggggtctagtggacagagaagactcttggccaggcagatggcttctcggtggcagaacatggggacctccgtgcgccggagatctctccagcaccaggagcagctggaggacagcaaggagctgcagcctgtggtcagccatcaggagacctctgtaggggccctggggtccctgtgcagacagttccaaaggaggctgcccctgagagccgtcaacctcaacctccgcgcagggccctcctggaaacgcctggaaaccccagagccagagaatccaggagtcctgccaaagtggcaccaagtggctggtggagacccaggtgaaggccaggaggcggaagagaggagcacagaagggcagtggatccccaactcacagcctgagccagaagagcacccggctgtctggagccgcccctgcccactcagccgcagacccctgggagaaggagcatcaccgcctctctgtccggatgggctcacatgcccacccattacggcgatcaaggcgggaggctgccttccggagcccctactcctcaacagagcccctctgctctcccagcgagtctgacagtgacctagagcctgtgggggcgggaattcagcatctccagaagctgtcccaagagctagatgaagccattatggcggaagagagtggtgacatcgtctctctcattcatgactgaggaagtgcctgcaggaaacaagccctgtctgaccgccaaggcttcatactcaaggatgtctatgcttccccgtgagcttcctggaaaaaacccc

SEQ ID NO: 132814 - DNA, 4051 bp, Homo sapiens
  Payload ID: 5949
  Gene Symbol: FAM65A
  Gene Name: family with sequence similarity 65, member A
  Uniprot ID: Q6ZS17
  ENST ID: ENST00000042381
  CDS Start-End: 69-3728
cgagcgcaaggacagcgcgaggtccgcgcagcccagcgcagccatggagccccgcgcggactcactctatgatgtccctgtcggtgcggccgcagcgccgtctgctcagcgcccgggtcaataggagccagtccttcgcaggcgtcctcggcagccacgagcgggggcccaggagtttcccggtcttcagcccgccggggcccccacggaagccccccgcgctctcccgagtgtccaggatgttttccgtggctcacccagccgccaaggtgccgcagcccgagcggctggacctggtgtacacggcgctgaagcggggcctgacggcctacttggaagtgcaccagcaggagcaagagaaactccaggggcagataagggagtccaagaggaattcccgcttgggcttcctgtatgatctggacaagcaagtcaagtccattgaacgcttcctgcgacgactggagttccatgccagcaagatcgatgagctgtatgaggcatactgtgtccagcggcgtctccgggatggtgcctacaacatggtccgtgcctacaccactgggtccccgggaagccgagaggcccgggacagcctggcagaggccactcgggggcatcgcgagtacacggagagcatgtgtctgctggagagcgagctggaggcacagctgggcgagtttcatctccgaatgaaagggctggctggcttcgccaggctgtgtgtaggcgatcagtatgagatctgcatgaaatatgggcgtcagcgctggaaactacggggccgaattgagggtagtggaaagcaggtgtgggacagtgaagaaaccatctttctccctctactcacggaatttctgtctattaaggtgacagaactgaagggcctggccaaccatgtggttgtgggcagtgtctcctgtgagaccaaggacctgtttgccgccctgccccaggttgtggctgtggatatcaatgaccttggtaccatcaagctcagcctggaagtcacatggagccccttcgacaaggatgaccagccctcagctgcttcttctgtcaacaaggcctccacagtcaccaagcgcttctccacctatagccagagcccaccggacacaccctcacttcgggaacaggctttctataacatgctgcgacggcaggaggagctggagaatgggacagcatggtccctgtcatctgaatcttcagacgactcatccagcccacagctctcaggcactgcccgccactcaccagcccctaggcccctggtgcagcagcccgagccccttcccatccaagttgccttccgcaggcctgagacccccagctctgggcccttggatgaggagggggccgtggccccagtcctggcaaatgggcatgcaccctacagtcggactctgagccacatcagtgaggctagtgtagatgctgccttggctgaggcttcagtggaggccgttggcccagaaagcctagcctggggacctagcccacctacacacccagctcccacccatggagagcaccccagtcctgttcctcctgccctggaccctggccactctgccacaagctctaccctcggtacaacaggctctgtccccacatctacagaccctgccccatctgcacacctagactcagttcataagtccacagactctggcccttcagaactgccaggccccactcacaccactacaggctctacctatagtgccattaccactacccacagtgctccaagccccctcactcacactactacaggctccacccacaagcccataatctctacccttactactacaggccctaccctcaatatcataggcccagtccagactaccacaagccccacccacactatgccaagccctacccataccacagcaagccccactcatacttccacaagccccacccatacccccacaagtcccacccacaaaaccagtatgtcacctcccaccactacaagtcctacccccagtggtatgggcctagtccagactgccacaagtcccacccatcctaccacaagccccacccatcccaccacaagccccatccttataaatgtaagcccttccacttctctagaacttgctaccctctccagcccctccaaacactcagaccccaccctcccaggcactgactcccttccctgtagtcccccagtctccaattcctacactcaggcagaccctatggcccccagaactccccacccaagtcctgcccattccagtaggaaacccctcacaagccctgccccagatccctcagagtctacggttcagagtctaagccccactccctcacccccaacccctgcaccccagcattcagacctttgcctggccatggctgtccagaccccagtcccaacggcagccggagggtctggggacaggagcctggaggaggcactgggggccctaatggctgccctggatgactaccgtggccagtttcctgagctgcagggcctggagcaggaggtgacccgcctagaaagtctgctcatgcagagacaaggtctgactcgcagccgggcctccagtctcagcatcactgtggagcatgccttggagagcttcagcttcctcaatgaagacgaagatgaagacaatgatgttcctggggacaggcctccaagcagcccggaggctggggctgaggacagcatagactcacccagtgcccgccccctcagcacggggtgtccagctctggatgctgccttggtccggcacctgtaccactgcagtcgcctcctgctgaaactgggcacatttgggcccctgcgctgccaggaggcatgggccctggagcggctgctgcgggaagcccgagtactggaggcagtatgcgagttcagcaggcggtgggagatcccggccagctctgcccaggaagtggtgcagttctcggcctctcggcctggcttcctgaccttctgggaccagtgcacagagagactcagctgcttcctctgcccggtggagcgggtgcttctcaccttctgcaaccagtatggtgcccgcctctccctgcgccagccaggcttggctgaggctgtgtgtgtgaagttcctggaggatgccctggggcagaagctgcccagaaggccccagccagggcctggagagcagctcacagtcttccagttctggagttttgtggaaaccttggacagccccaccatggaggcctacgtgactgagaccgctgaggaggtgctactggtgcggaatctgaactcggatgatcaggctgttgtgctgaaggccctgagattggcgcccgaggggcgtctgcgaagggacgggctgcgggccctcagctccctgctcgtccatggcaacaacaaggtcatggctgctgtcagcacccagctccggagcctgtcactgggccctaccttccgggagagggccctcctgtgcttcctggaccagctggaggatgaggacgtgcagactcgagtggctggctgcctggccctaggctgcatcaaggctcccgagggcattgagcccctggtgtacctctgccaaactgacacagaagctgtgagggaagctgcccggcaaagcctacagcagtgtggagaagagggacagtctgcccatcgacggctggaggagtccctggacgccctgccccgcatctttgggcctggcagcatggccagcacagcattctaaactattcacccatgggttcctggtgcccctttccccccactttcagggctcaccaggcactggcagggagggtaagggctggctccagatacccctcccccacagattcctagcaatgaaaatctaatatattcttctgttgcccctggggttggagagtcagtgcctgcagtcaagtgcctcccagcctcggctcagcacatcccttgccacaaatcagtgtctggggcttggccaccctgccgctgcccagccacatcccttggttttgtattttatttacagagttttacagaaaataaaaaagcaaaatgtctttccta

SEQ ID NO: 132815 - DNA, 4116 bp, Homo sapiens
  Payload ID: 5949
  Gene Symbol: FAM65A
  Gene Name: family with sequence similarity 65, member A
  Uniprot ID: Q6ZS17
  ENST ID: ENST00000379312
  CDS Start-End: 122-3793
ggcgcctgcggcggcgacagcggcagctgcggcgcgaccaggccgggcacctccgagcgcaaggacagcgcgaggtccgcgcagcccagcgcagccatggagccccgcgcggactcactctatgatgtccctgtcggtgcggccgcagcgccgtctgctcagcgcccgggtcaataggagccagtccttcgcaggcgtcctcggcagccacgagcgggggcccagcctctccttcaggagtttcccggtcttcagcccgccggggcccccacggaagccccccgcgctctcccgagtgtccaggatgttttccgtggctcacccagccgccaaggtgccgcagcccgagcggctggacctggtgtacacggcgctgaagcggggcctgacggcctacttggaagtgcaccagcaggagcaagagaaactccaggggcagataagggagtccaagaggaattcccgcttgggcttcctgtatgatctggacaagcaagtcaagtccattgaacgcttcctgcgacgactggagttccatgccagcaagatcgatgagctgtatgaggcatactgtgtccagcggcgtctccgggatggtgcctacaacatggtccgtgcctacaccactgggtccccgggaagccgagaggcccgggacagcctggcagaggccactcgggggcatcgcgagtacacggagagcatgtgtctgctggagagcgagctggaggcacagctgggcgagtttcatctccgaatgaaagggctggctggcttcgccaggctgtgtgtaggcgatcagtatgagatctgcatgaaatatgggcgtcagcgctggaaactacggggccgaattgagggtagtggaaagcaggtgtgggacagtgaagaaaccatctttctccctctactcacggaatttctgtctattaaggtgacagaactgaagggcctggccaaccatgtggttgtgggcagtgtctcctgtgagaccaaggacctgtttgccgccctgccccaggttgtggctgtggatatcaatgaccttggtaccatcaagctcagcctggaagtcacatggagccccttcgacaaggatgaccagccctcagctgcttcttctgtcaacaaggcctccacagtcaccaagcgcttctccacctatagccagagcccaccggacacaccctcacttcgggaacaggctttctataacatgctgcgacggcaggaggagctggagaatgggacagcatggtccctgtcatctgaatcttcagacgactcatccagcccacagctctcaggcactgcccgccactcaccagcccctaggcccctggtgcagcagcccgagccccttcccatccaagttgccttccgcaggcctgagacccccagctctgggcccttggatgaggagggggccgtggccccagtcctggcaaatgggcatgcaccctacagtcggactctgagccacatcagtgaggctagtgtagatgctgccttggctgaggcttcagtggaggccgttggcccagaaagcctagcctggggacctagcccacctacacacccagctcccacccatggagagcaccccagtcctgttcctcctgccctggaccctggccactctgccacaagctctaccctcggtacaacaggctctgtccccacatctacagaccctgccccatctgcacacctagactcagttcataagtccacagactctggcccttcagaactgccaggccccactcacaccactacaggctctacctatagtgccattaccactacccacagtgctccaagccccctcactcacactactacaggctccacccacaagcccataatctctacccttactactacaggccctaccctcaatatcataggcccagtccagactaccacaagccccacccacactatgccaagccctacccataccacagcaagccccactcatacttccacaagccccacccatacccccacaagtcccacccacaaaaccagtatgtcacctcccaccactacaagtcctacccccagtggtatgggcctagtccagactgccacaagtcccacccatcctaccacaagccccacccatcccaccacaagccccatccttataaatgtaagcccttccacttctctagaacttgctaccctctccagcccctccaaacactcagaccccaccctcccaggcactgactcccttccctgtagtcccccagtctccaattcctacactcaggcagaccctatggcccccagaactccccacccaagtcctgcccattccagtaggaaacccctcacaagccctgccccagatccctcagagtctacggttcagagtctaagccccactccctcacccccaacccctgcaccccagcattcagacctttgcctggccatggctgtccagaccccagtcccaacggcagccggagggtctggggacaggagcctggaggaggcactgggggccctaatggctgccctggatgactaccgtggccagtttcctgagctgcagggcctggagcaggaggtgacccgcctagaaagtctgctcatgcagagacaaggtctgactcgcagccgggcctccagtctcagcatcactgtggagcatgccttggagagcttcagcttcctcaatgaagacgaagatgaagacaatgatgttcctggggacaggcctccaagcagcccggaggctggggctgaggacagcatagactcacccagtgcccgccccctcagcacggggtgtccagctctggatgctgccttggtccggcacctgtaccactgcagtcgcctcctgctgaaactgggcacatttgggcccctgcgctgccaggaggcatgggccctggagcggctgctgcgggaagcccgagtactggaggcagtatgcgagttcagcaggcggtgggagatcccggccagctctgcccaggaagtggtgcagttctcggcctctcggcctggcttcctgaccttctgggaccagtgcacagagagactcagctgcttcctctgcccggtggagcgggtgcttctcaccttctgcaaccagtatggtgcccgcctctccctgcgccagccaggcttggctgaggctgtgtgtgtgaagttcctggaggatgccctggggcagaagctgcccagaaggccccagccagggcctggagagcagctcacagtcttccagttctggagttttgtggaaaccttggacagccccaccatggaggcctacgtgactgagaccgctgaggaggtgctactggtgcggaatctgaactcggatgatcaggctgttgtgctgaaggccctgagattggcgcccgaggggcgtctgcgaagggacgggctgcgggccctcagctccctgctcgtccatggcaacaacaaggtcatggctgctgtcagcacccagctccggagcctgtcactgggccctaccttccgggagagggccctcctgtgcttcctggaccagctggaggatgaggacgtgcagactcgagtggctggctgcctggccctaggctgcatcaaggctcccgagggcattgagcccctggtgtacctctgccaaactgacacagaagctgtgagggaagctgcccggcaaagcctacagcagtgtggagaagagggacagtctgcccatcgacggctggaggagtccctggacgccctgccccgcatctttgggcctggcagcatggccagcacagcattctaaactattcacccatgggttcctggtgcccctttccccccactttcagggctcaccaggcactggcagggagggtaagggctggctccagatacccctcccccacagattcctagcaatgaaaatctaatatattcttctgttgcccctggggttggagagtcagtgcctgcagtcaagtgcctcccagcctcggctcagcacatcccttgccacaaatcagtgtctggggcttggccaccctgccgctgcccagccacatcccttggttttgtattttatttacagagttttacagaaaataaaaaagcaaaatgtctttccta

SEQ ID NO: 132816 - DNA, 4152 bp, Homo sapiens
  Payload ID: 5949
  Gene Symbol: FAM65A
  Gene Name: family with sequence similarity 65, member A
  Uniprot ID: Q6ZS17
  ENST ID: ENST00000428437
  CDS Start-End: 126-3827
gaggagccgaagccgagccagagccgctgggagcgagcccggagcccagccgggcggctcgaagtggccagggccggaaggtccgcggggggcgagcgcgggtcgggggccgtcccggacccaccatgaacaccaagaagagagggagccccgcgcggactcactctatgatgtccctgtcggtgcggccgcagcgccgtctgctcagcgcccgggtcaataggagccagtccttcgcaggcgtcctcggcagccacgagcgggggcccaggagtttcccggtcttcagcccgccggggcccccacggaagccccccgcgctctcccgagtgtccaggatgttttccgtggctcacccagccgccaaggtgccgcagcccgagcggctggacctggtgtacacggcgctgaagcggggcctgacggcctacttggaagtgcaccagcaggagcaagagaaactccaggggcagataagggagtccaagaggaattcccgcttgggcttcctgtatgatctggacaagcaagtcaagtccattgaacgcttcctgcgacgactggagttccatgccagcaagatcgatgagctgtatgaggcatactgtgtccagcggcgtctccgggatggtgcctacaacatggtccgtgcctacaccactgggtccccgggaagccgagaggcccgggacagcctggcagaggccactcgggggcatcgcgagtacacggagagcatgtgtctgctggagagcgagctggaggcacagctgggcgagtttcatctccgaatgaaagggctggctggcttcgccaggctgtgtgtaggcgatcagtatgagatctgcatgaaatatgggcgtcagcgctggaaactacggggccgaattgagggtagtggaaagcaggtgtgggacagtgaagaaaccatctttctccctctactcacggaatttctgtctattaaggtgacagaactgaagggcctggccaaccatgtggttgtgggcagtgtctcctgtgagaccaaggacctgtttgccgccctgccccaggttgtggctgtggatatcaatgaccttggtaccatcaagctcagcctggaagtcacatggagccccttcgacaaggatgaccagccctcagctgcttcttctgtcaacaaggcctccacagtcaccaagcgcttctccacctatagccagagcccaccggacacaccctcacttcgggaacaggctttctataacatgctgcgacggcaggaggagctggagaatgggacagcatggtccctgtcatctgaatcttcagacgactcatccagcccacagctctcaggcactgcccgccactcaccagcccctaggcccctggtgcagcagcccgagccccttcccatccaagttgccttccgcaggcctgagacccccagctctgggcccttggatgaggagggggccgtggccccagtcctggcaaatgggcatgcaccctacagtcggactctgagccacatcagtgaggctagtgtagatgctgccttggctgaggcttcagtggaggccgttggcccagaaagcctagcctggggacctagcccacctacacacccagctcccacccatggagagcaccccagtcctgttcctcctgccctggaccctggccactctgccacaagctctaccctcggtacaacaggctctgtccccacatctacagaccctgccccatctgcacacctagactcagttcataagtccacagactctggcccttcagaactgccaggccccactcacaccactacaggctctacctatagtgccattaccactacccacagtgctccaagccccctcactcacactactacaggctccacccacaagcccataatctctacccttactactacaggccctaccctcaatatcataggcccagtccagactaccacaagccccacccacactatgccaagccctacccataccacagcaagccccactcatacttccacaagccccacccatacccccacaagtcccacccacaaaaccagtatgtcacctcccaccactacaagtcctacccccagtggtatgggcctagtccagactgccacaagtcccacccatcctaccacaagccccacccatcccaccacaagccccatccttataaatgtaagcccttccacttctctagaacttgctaccctctccagcccctccaaacactcagaccccaccctcccaggcactgactcccttccctgtagtcccccagtctccaattcctacactcaggcagaccctatggcccccagaactccccacccaagtcctgcccattccagtaggaaacccctcacaagccctgccccagatccctcagagtctacggttcagagtctaagccccactccctcacccccaacccctgcaccccagcattcagacctttgcctggccatggctgtccagaccccagtcccaacggcagccggagggtctggggacaggagcctggaggaggcactgggggccctaatggctgccctggatgactaccgtggccagtttcctgagctgcagggcctggagcaggaggtgacccgcctagaaagtctgctcatgcagagacaaggtctgactcgcagccgggcctccagtctcagcatcactgtggagcatgccttggagagcttcagcttcctcaatgaagacgaagatgaagacaatgatgttcctggggacaggcctccaagcagcccggaggctggggctgaggacagcatagactcacccagtgcccgccccctcagcacggggtgtccagctctggatgctgccttggtccggcacctgtaccactgcagtcgcctcctgctgaaactgggcacatttgggcccctgcgctgccaggaggcatgggccctggagcggctgctgcgggaagcccgagtactggaggcagtatgcgagttcagcaggcggtgggagatcccggccagctctgcccaggaagtggtgcagttctcggcctctcggcctggcttcctgaccttctgggaccagtgcacagagagactcagctgcttcctctgcccggtggagcgggtgcttctcaccttctgcaaccagtatggtgcccgcctctccctgcgccagccaggcttggctgaggctgtgtgtgtgaagttcctggaggatgccctggggcagaagctgcccagaaggccccagccagggcctggagagcagctcacagtcttccagttctggagttttgtggaaaccttggacagccccaccatggaggcctacgtgactgagaccgctgaggaggtgctactggtgcggaatctgaactcggatgatcaggctgttgtgctgaaggccctgagattggcgcccgaggggcgtctgcgaagggacgggctgcgggccctcagctccctgctcgtccatggcaacaacaaggtcatggctgctgtcagcacccagctccggagcctgtcactgggccctaccttccgggagagggccctcctgtgcttcctggaccagctggaggatgaggacgtgcagactcgagtggctggctgcctggccctaggctgcatcaaggctcccgagggcattgagcccctggtgtacctctgccaaactgacacagaagctgtgagggaagctgcccggcaaagcctacagcagtgtggagaagagggacagtctgcccatcgacggctggaggagtccctggacgccctgccccgcatctttgggcctggcagcatggccagcacagcattctaaactattcacccatgggttcctggtgcccctttccccccactttcagggctcaccaggcactggcagggagggtaagggctggctccagatacccctcccccacagattcctagcaatgaaaatctaatatattcttctgttgcccctggggttggagagtcagtgcctgcagtcaagtgcctcccagcctcggctcagcacatcccttgccacaaatcagtgtctggggcttggccaccctgccgctgcccagccacatcccttggttttgtattttatttacagagttttacagaaaataaaaaagcaaaatgtctttcctaca

SEQ ID NO: 132817 - DNA, 4228 bp, Homo sapiens
  Payload ID: 5949
  Gene Symbol: FAM65A
  Gene Name: family with sequence similarity 65, member A
  Uniprot ID: Q6ZS17
  ENST ID: ENST00000422602
  CDS Start-End: 187-3906
ggtgagccctgagtccggcctcccctacagaccctccccagccagttctaacgtgtgtccaggctggccgccccagcacctactgtgcgcagcctcgtgtaacaatacttgtgccctggctgcagtctgcggggccgcgccctgggcctgccgcattcggccaacgcacagcatctgaggagggttatgaccatctggcagatgcagaaacaggcccagagagggagccccgcgcggactcactctatgatgtccctgtcggtgcggccgcagcgccgtctgctcagcgcccgggtcaataggagccagtccttcgcaggcgtcctcggcagccacgagcgggggcccaggagtttcccggtcttcagcccgccggggcccccacggaagccccccgcgctctcccgagtgtccaggatgttttccgtggctcacccagccgccaaggtgccgcagcccgagcggctggacctggtgtacacggcgctgaagcggggcctgacggcctacttggaagtgcaccagcaggagcaagagaaactccaggggcagataagggagtccaagaggaattcccgcttgggcttcctgtatgatctggacaagcaagtcaagtccattgaacgcttcctgcgacgactggagttccatgccagcaagatcgatgagctgtatgaggcatactgtgtccagcggcgtctccgggatggtgcctacaacatggtccgtgcctacaccactgggtccccgggaagccgagaggcccgggacagcctggcagaggccactcgggggcatcgcgagtacacggagagcatgtgtctgctggagagcgagctggaggcacagctgggcgagtttcatctccgaatgaaagggctggctggcttcgccaggctgtgtgtaggcgatcagtatgagatctgcatgaaatatgggcgtcagcgctggaaactacggggccgaattgagggtagtggaaagcaggtgtgggacagtgaagaaaccatctttctccctctactcacggaatttctgtctattaaggtgacagaactgaagggcctggccaaccatgtggttgtgggcagtgtctcctgtgagaccaaggacctgtttgccgccctgccccaggttgtggctgtggatatcaatgaccttggtaccatcaagctcagcctggaagtcacatggagccccttcgacaaggatgaccagccctcagctgcttcttctgtcaacaaggcctccacagtcaccaagcgcttctccacctatagccagagcccaccggacacaccctcacttcgggaacaggctttctataacatgctgcgacggcaggaggagctggagaatgggacagcatggtccctgtcatctgaatcttcagacgactcatccagcccacagctctcaggcactgcccgccactcaccagcccctaggcccctggtgcagcagcccgagccccttcccatccaagttgccttccgcaggcctgagacccccagctctgggcccttggatgaggagggggccgtggccccagtcctggcaaatgggcatgcaccctacagtcggactctgagccacatcagtgaggctagtgtagatgctgccttggctgaggcttcagtggaggccgttggcccagaaagcctagcctggggacctagcccacctacacacccagctcccacccatggagagcaccccagtcctgttcctcctgccctggaccctggccactctgccacaagctctaccctcggtacaacaggctctgtccccacatctacagaccctgccccatctgcacacctagactcagttcataagtccacagactctggcccttcagaactgccaggccccactcacaccactacaggctctacctatagtgccattaccactacccacagtgctccaagccccctcactcacactactacaggctccacccacaagcccataatctctacccttactactacaggccctaccctcaatatcataggcccagtccagactaccacaagccccacccacactatgccaagccctacccataccacagcaagccccactcatacttccacaagccccacccatacccccacaagtcccacccacaaaaccagtatgtcacctcccaccactacaagtcctacccccagtggtatgggcctagtccagactgccacaagtcccacccatcctaccacaagccccacccatcccaccacaagccccatccttataaatgtaagcccttccacttctctagaacttgctaccctctccagcccctccaaacactcagaccccaccctcccaggcactgactcccttccctgtagtcccccagtctccaattcctacactcaggcagaccctatggcccccagaactccccacccaagtcctgcccattccagtaggaaacccctcacaagccctgccccagatccctcagagtctacggttcagagtctaagccccactccctcacccccaacccctgcaccccagcattcagacctttgcctggccatggctgtccagaccccagtcccaacggcagccggagggtctggggacaggagcctggaggaggcactgggggccctaatggctgccctggatgactaccgtggccagtttcctgagctgcagggcctggagcaggaggtgacccgcctagaaagtctgctcatgcagagacaaggtctgactcgcagccgggcctccagtctcagcatcactgtggagcatgccttggagagcttcagcttcctcaatgaagacgaagatgaagacaatgatgttcctggggacaggcctccaagcagcccggaggctggggctgaggacagcatagactcacccagtgcccgccccctcagcacggggtgtccagctctggatgctgccttggtccggcacctgtaccactgcagtcgcctcctgctgaaactgggcacatttgggcccctgcgctgccaggaggcatgggccctggagcggctgctgcgggaagcccgagtactggaggcagtatgcgagttcagcaggcggtgggagatcccggccagctctgcccaggaagtggtgcagttctcggcctctcggcctggcttcctgaccttctgggaccagtgcacagagagactcagctgcttcctctgcccggtggagcgggtgcttctcaccttctgcaaccagtatggtgcccgcctctccctgcgccagccaggcttggctgaggctgtgtgtgtgaagttcctggaggatgccctggggcagaagctgcccagaaggccccagccagggcctggagagcagctcacagtcttccagttctggagttttgtggaaaccttggacagccccaccatggaggcctacgtgactgagaccgctgaggaggtgctactggtgcggaatctgaactcggatgatcaggctgttgtgctgaaggccctgagattggcgcccgaggggcgtctgcgaagggacgggctgcgggccctcagctccctgctcgtccatggcaacaacaaggtcatggctgctgtcagcacccagctccggagcctgtcactgggccctaccttccgggagagggccctcctgtgcttcctggaccagctggaggatgaggacgtgcagactcgagtggctggctgcctggccctaggctgcatcaaggctcccgagggcattgagcccctggtgtacctctgccaaactgacacagaagctgtgagggaagctgcccggcaaagcctacagcagtgtggagaagagggacagtctgcccatcgacggctggaggagtccctggacgccctgccccgcatctttgggcctggcagcatggccagcacagcattctaaactattcacccatgggttcctggtgcccctttccccccactttcagggctcaccaggcactggcagggagggtaagggctggctccagatacccctcccccacagattcctagcaatgaaaatctaatatattcttctgttgcccctggggttggagagtcagtgcctgcagtcaagtgcctcccagcctcggctcagcacatcccttgccacaaatcagtgtctggggcttggccaccctgccgctgcccagccacatcccttggttttgtattttatttacagagttttacagaaaataaaaaagcaaaatgtctttcct

SEQ ID NO: 132818 - DNA, 4260 bp, Homo sapiens
  Payload ID: 5949
  Gene Symbol: FAM65A
  Gene Name: family with sequence similarity 65, member A
  ENST ID: ENST00000540839
  CDS Start-End: 221-3937
acagcgcgaggtccgcgcagcccagcgcagccatggtgagccctgagtccggcctcccctacagaccctccccagccagttctaacgtgtgtccaggctggccgccccagcacctactgtgcgcagcctcgtgtaacaatacttgtgccctggctgcagtctgcggggccgcgccctgggcctgccgcattcggccaacgcacagcatctgaggagggttatgaccatctggcagatgcagaaacaggcccagagagggagccccgcgcggactcactctatgatgtccctgtcggtgcggccgcagcgccgtctgctcagcgcccgggtcaataggagccagtccttcgcaggcgtcctcggcagccacgagcgggggcccaggagtttcccggtcttcagcccgccggggcccccacggaagccccccgcgctctcccgagtgtccaggatgttttccgtggctcacccagccgccaaggtgccgcagcccgagcggctggacctggtgtacacggcgctgaagcggggcctgacggcctacttggaagtgcaccagcaggagcaagagaaactccaggggcagataagggagtccaagaggaattcccgcttgggcttcctgtatgatctggacaagcaagtcaagtccattgaacgcttcctgcgacgactggagttccatgccagcaagatcgatgagctgtatgaggcatactgtgtccagcggcgtctccgggatggtgcctacaacatggtccgtgcctacaccactgggtccccgggaagccgagaggcccgggacagcctggcagaggccactcgggggcatcgcgagtacacggagagcatgtgtctgctggagagcgagctggaggcacagctgggcgagtttcatctccgaatgaaagggctggctggcttcgccaggctgtgtgtaggcgatcagtatgagatctgcatgaaatatgggcgtcagcgctggaaactacggggccgaattgagggtagtggaaagcaggtgtgggacagtgaagaaaccatctttctccctctactcacggaatttctgtctattaaggtgacagaactgaagggcctggccaaccatgtggttgtgggcagtgtctcctgtgagaccaaggacctgtttgccgccctgccccaggttgtggctgtggatatcaatgaccttggtaccatcaagctcagcctggaagtcacatggagccccttcgacaaggatgaccagccctcagctgcttcttctgtcaacaaggcctccacagtcaccaagcgcttctccacctatagccagagcccaccggacacaccctcacttcgggaacaggctttctataacatgctgcgacggcaggaggagctggagaatgggacagcatggtccctgtcatctgaatcttcagacgactcatccagcccacagctctcaggcactgcccgccactcaccagcccctaggcccctggtgcagcagcccgagccccttcccatccaagttgccttccgcaggcctgagacccccagctctgggcccttggatgaggagggggccgtggccccagtcctggcaaatgggcatgcaccctacagtcggactctgagccacatcagtgaggctagtgtagatgctgccttggctgaggcttcagtggaggccgttggcccagaaagcctagcctggggacctagcccacctacacacccagctcccacccatggagagcaccccagtcctgttcctcctgccctggaccctggccactctgccacaagctctaccctcggtacaacaggctctgtccccacatctacagaccctgccccatctgcacacctagactcagttcataagtccacagactctggcccttcagaactgccaggccccactcacaccactacaggctctacctatagtgccattaccactacccacagtgctccaagccccctcactcacactactacaggctccacccacaagcccataatctctacccttactactacaggccctaccctcaatatcataggcccagtccagactaccacaagccccacccacactatgccaagccctacccataccacagcaagccccactcatacttccacaagccccacccatacccccacaagtcccacccacaaaaccagtatgtcacctcccaccactacaagtcctacccccagtggtatgggcctagtccagactgccacaagtcccacccatcctaccacaagccccacccatcccaccacaagccccatccttataaatgtaagcccttccacttctctagaacttgctaccctctccagcccctccaaacactcagaccccaccctcccaggcactgactcccttccctgtagtcccccagtctccaattcctacactcaggcagaccctatggcccccagaactccccacccaagtcctgcccattccagtaggaaacccctcacaagccctgccccagatccctcagagtctacggttcagagtctaagccccactccctcacccccaacccctgcaccccagcattcagacctttgcctggccatggctgtccagaccccagtcccaacggcagccggagggtctggggacaggagcctggaggaggcactgggggccctaatggctgccctggatgactaccgtggccagtttcctgagctgcagggcctggagcaggaggtgacccgcctagaaagtctgctcatgagacaaggtctgactcgcagccgggcctccagtctcagcatcactgtggagcatgccttggagagcttcagcttcctcaatgaagacgaagatgaagacaatgatgttcctggggacaggcctccaagcagcccggaggctggggctgaggacagcatagactcacccagtgcccgccccctcagcacggggtgtccagctctggatgctgccttggtccggcacctgtaccactgcagtcgcctcctgctgaaactgggcacatttgggcccctgcgctgccaggaggcatgggccctggagcggctgctgcgggaagcccgagtactggaggcagtatgcgagttcagcaggcggtgggagatcccggccagctctgcccaggaagtggtgcagttctcggcctctcggcctggcttcctgaccttctgggaccagtgcacagagagactcagctgcttcctctgcccggtggagcgggtgcttctcaccttctgcaaccagtatggtgcccgcctctccctgcgccagccaggcttggctgaggctgtgtgtgtgaagttcctggaggatgccctggggcagaagctgcccagaaggccccagccagggcctggagagcagctcacagtcttccagttctggagttttgtggaaaccttggacagccccaccatggaggcctacgtgactgagaccgctgaggaggtgctactggtgcggaatctgaactcggatgatcaggctgttgtgctgaaggccctgagattggcgcccgaggggcgtctgcgaagggacgggctgcgggccctcagctccctgctcgtccatggcaacaacaaggtcatggctgctgtcagcacccagctccggagcctgtcactgggccctaccttccgggagagggccctcctgtgcttcctggaccagctggaggatgaggacgtgcagactcgagtggctggctgcctggccctaggctgcatcaaggctcccgagggcattgagcccctggtgtacctctgccaaactgacacagaagctgtgagggaagctgcccggcaaagcctacagcagtgtggagaagagggacagtctgcccatcgacggctggaggagtccctggacgccctgccccgcatctttgggcctggcagcatggccagcacagcattctaaactattcacccatgggttcctggtgcccctttccccccactttcagggctcaccaggcactggcagggagggtaagggctggctccagatacccctcccccacagattcctagcaatgaaaatctaatatattcttctgttgcccctggggttggagagtcagtgcctgcagtcaagtgcctcccagcctcggctcagcacatcccttgccacaaatcagtgtctggggcttggccaccctgccgctgcccagccacatcccttggttttgtattttatttacagagttttacagaaaataaaaaagcaaaatgtctttccta

SEQ ID NO: 132819 - DNA, 1874 bp, Homo sapiens
  Payload ID: 5949
  Gene Symbol: FAM65A
  Gene Name: family with sequence similarity 65, member A
  ENST ID: ENST00000569253
  CDS Start-End: 107-1874
agagccgctgggagcgagcccggagcccagccgggcggctcgaagtggccagggccggaaggtccgcggggggcgagcgcgggtcgggggccgtcccggacccaccatgaacaccaagaagagagggagccccgcgcggactcactctatgatgtccctgtcggtgcggccgcagcgccgtctgctcagcgcccgggtcaataggagccagtccttcgcaggcgtcctcggcagccacgagcgggggcccagggcctacttggaagtgcaccagcaggagcaagagaaactccaggggcagataagggagtccaagaggaattcccgcttgggcttcctgtatgatctggacaagcaagtcaagtccattgaacgcttcctgcgacgactggagttccatgccagcaagatcgatgagctgtatgaggcatactgtgtccagcggcgtctccgggatggtgcctacaacatggtccgtgcctacaccactgggtccccgggaagccgagaggcccgggacagcctggcagaggccactcgggggcatcgcgagtacacggagagcatgtgtctgctggagagcgagctggaggcacagctgggcgagtttcatctccgaatgaaagggctggctggcttcgccaggctgtgtgtaggcgatcagtatgagatctgcatgaaatatgggcgtcagcgctggaaactacggggccgaattgagggtagtggaaagcaggtgtgggacagtgaagaaaccatctttctccctctactcacggaatttctgtctattaaggtgacagaactgaagggcctggccaaccatgtggttgtgggcagtgtctcctgtgagaccaaggacctgtttgccgccctgccccaggttgtggctgtggatatcaatgaccttggtaccatcaagctcagcctggaagtcacatggagccccttcgacaaggatgaccagccctcagctgcttcttctgtcaacaaggcctccacagtcaccaagcgcttctccacctatagccagagcccaccggacacaccctcacttcgggaacaggctttctataacatgctgcgacggcaggaggagctggagaatgggacagcatggtccctgtcatctgaatcttcagacgactcatccagcccacagctctcaggcactgcccgccactcaccagcccctaggcccctggtgcagcagcccgagccccttcccatccaagttgccttccgcaggcctgagacccccagctctgggcccttggatgaggagggggccgtggccccagtcctggcaaatgggcatgcaccctacagtcggactctgagccacatcagtgaggctagtgtagatgctgccttggctgaggcttcagtggaggccgttggcccagaaagcctagcctggggacctagcccacctacacacccagctcccacccatggagagcaccccagtcctgttcctcctgccctggaccctggccactctgccacaagctctaccctcggtacaacaggctctgtccccacatctacagaccctgccccatctgcacacctagactcagttcataagtccacagactctggcccttcagaactgccaggccccactcacaccactacaggctctacctatagtgccattaccactacccacagtgctccaagccccctcactcacactactacaggctccacccacaagcccataatctctacccttactactacaggccctaccctcaatatcataggcccagtccagactaccacaagccccacccacactatgccaagccctacccataccacagcaagccccactcatacttccacaagccccacccataccccca

SEQ ID NO: 132820 - DNA, 418 bp, Homo sapiens
  Payload ID: 5949
  Gene Symbol: FAM65A
  Gene Name: family with sequence similarity 65, member A
  ENST ID: ENST00000569179
  CDS Start-End: 1-418
ccgaatgaaagggctggctggcttcgccaggctgtgtgtaggcgatcagtatgaggctgcctcatcctacctgttcccccagatctgcatgaaatatgggcgtcagcgctggaaactacggggccgaattgagggtagtggaaagcaggtgtgggacagtgaagaaaccatctttctccctctactcacggaatttctgtctattaaggtgacagaactgaagggcctggccaaccatgtggttgtgggcagtgtctcctgtgagaccaaggacctgtttgccgccctgccccaggttgtggctgtggatatcaatgaccttggtaccatcaagctcagcctggaagtcacatggagccccttcgacaaggatgaccagccctcagctgcttcttctgtcaacaaggcctccacagtc

SEQ ID NO: 132821 - DNA, 244 bp, Homo sapiens
  Payload ID: 5949
  Gene Symbol: FAM65A
  Gene Name: family with sequence similarity 65, member A
  ENST ID: ENST00000562116
  CDS Start-End: 220-244
ctgacattggctctcttggcttcctgggacagccctcaccagcatcctgggctctcaagagcctgggctggtggctgccatccccccaggacaggagcccaccaagtcccttctggttgaggacccttgggccctcaaggatcccaactctgctcatgatggcatctgggggagcgcgggagccctggaggggaagggagccccgcgcggactcactctatgatgtccctgtcggtgcggccgc

SEQ ID NO: 132822 - DNA, 562 bp, Homo sapiens
  Payload ID: 5949
  Gene Symbol: FAM65A
  Gene Name: family with sequence similarity 65, member A
  ENST ID: ENST00000565176
  CDS Start-End: 107-562
aggagagggacttggggctgagtagtgggaagaaggaataggagcgatgggggctgccggtcagattctgaagaaccttgcagggagccccgcgcggactcactctatgatgtccctgtcggtgcggccgcagcgccgtctgctcagcgcccgggtcaataggagccagtccttcgcaggcgtcctcggcagccacgagcgggggcccaggagtttcccggtcttcagcccgccggggcccccacggaagccccccgcgctctcccgagtgtccaggatgttttccgtggctcacccagccgccaaggtgccgcagcccgagcggctggacctggtgtacacggcgctgaagcggggcctgacggcctacttggaagtgcaccagcaggagcaagagaaactccaggggcagataagggagtccaagaggaattcccgcttgggcttcctgtatgatctggacaagcaagtcaagtccattgaacgcttcctgcgacgactggagttccatgccagcaagatcgatgagctgtatgaggcatactgtgtccagcggcgtctc

SEQ ID NO: 132823 - DNA, 584 bp, Homo sapiens
  Payload ID: 5949
  Gene Symbol: FAM65A
  Gene Name: family with sequence similarity 65, member A
  ENST ID: ENST00000566920
  CDS Start-End: 321-584
attcggccaacgcacagcatctgaggagggttatgaccatctggcagatgcagaaacaggcccagagaggttagtagtattctcaaggtcacacagctggtttgggagaagcgaggattagatctgagtccttgcccctgcgacacccacctccgtggtattggagggaggagaggaatgataattgggggctgaggtacaaaatactccagcgggacaaggaggactggcatagctccttcttccaccgccctctccggcttgggtcctgtgactgcggcgggagagaggagcaagggagccccgcgcggactcactctatgatgtccctgtcggtgcggccgcagcgccgtctgctcagcgcccgggtcaataggagccagtccttcgcaggcgtcctcggcagccacgagcgggggcccaggagtttcccggtcttcagcccgccggggcccccacggaagccccccgcgctctcccgagtgtccaggatgttttccgtggctcacccagccgccaaggtgccgcagcccgagcggctggacctggtgtacacggcgctgaagcggggcctgacggcctac

SEQ ID NO: 132824 - DNA, 2251 bp, Homo sapiens
  Payload ID: 5949
  Gene Symbol: FAM65A
  Gene Name: family with sequence similarity 65, member A
  ENST ID: ENST00000566559
  CDS Start-End: 370-2251
aaacaggcgcttccgcacattcttcgcgcgcgccgcccctttcctgccccttcccagccggaggagggtccccgcgcgaccccccttcctgccccgcggcaggcggagcccgcacctcggcaggaagtgggggccgagccgaggccacgctgagtccgaggccgagtcgcctgcggctgtcctgtcattagtgcccgggtcggcgggactaggcggacccggccggagcccgctggggcagctgtgcctagcgacaggaaagacctgcgccagccctggatcccgctgcgtgggagagggcttcggggatccgactggtactggacacccccccgatcacccgcagggagccccgcgcggactcactctatgatgtccctgtcggtgcggccgcagcgccgtctgctcagcgcccgggtcaataggagccagtccttcgcaggcgtcctcggcagccacgagcgggggcccaggagtttcccggtcttcagcccgccggggcccccacggaagccccccgcgctctcccgagtgtccaggatgttttccgtggctcacccagccgccaaggtgccgcagcccgagcggctggacctggtgtacacggcgctgaagcggggcctgacggcctacttggaagtgcaccagcaggagcaagagaaactccaggggcagataagggagtccaagaggaattcccgcttgggcttcctgtatgatctggacaagcaagtcaagtccattgaacgcttcctgcgacgactggagttccatgccagcaagatcgatgagctgtatgaggcatactgtgtccagcggcgtctccgggatggtgcctacaacatggtccgtgcctacaccactgggtccccgggaagccgagaggcccgggacagcctggcagaggccactcgggggcatcgcgagtacacggagagcatgtgtctgctggagagcgagctggaggcacagctgggcgagtttcatctccgaatgaaagggctggctggcttcgccaggctgtgtgtaggcgatcagtatgagatctgcatgaaatatgggcgtcagcgctggaaactacggggccgaattgagggtagtggaaagcaggtgtgggacagtgaagaaaccatctttctccctctactcacggaatttctgtctattaaggtgacagaactgaagggcctggccaaccatgtggttgtgggcagtgtctcctgtgagaccaaggacctgtttgccgccctgccccaggttgtggctgtggatatcaatgaccttggtaccatcaagctcagcctggaagtcacatggagccccttcgacaaggatgaccagccctcagctgcttcttctgtcaacaaggcctccacagtcaccaagcgcttctccacctatagccagagcccaccggacacaccctcacttcgggaacaggctttctataacatgctgcgacggcaggaggagctggagaatgggacagcatggtccctgtcatctgaatcttcagacgactcatccagcccacagctctcaggcactgcccgccactcaccagcccctaggcccctggtgcagcagcccgagccccttcccatccaagttgccttccgcaggcctgagacccccagctctgggcccttggatgaggagggggccgtggccccagtcctggcaaatgggcatgcaccctacagtcggactctgagccacatcagtgaggctagtgtagatgctgccttggctgaggcttcagtggaggccgttggcccagaaagcctagcctggggacctagcccacctacacacccagctcccacccatggagagcaccccagtcctgttcctcctgccctggaccctggccactctgccacaagctctaccctcggtacaacaggctctgtccccacatctacagaccctgccccatctgcacacctagactcagttcataagtccacagactctggcccttcagaactgccaggccccactcacaccactacaggctctacctatagtgccattaccactacccacagtgctccaagccccctcactcacactactacaggctccacccacaagcccataatctctacccttactactacaggccctaccctcaatatcataggcccagtccagactaccacaagccccacccacactatgccaagccctacccataccacagcaagccccactcatacttccacaagccccacccatacccccacaa

SEQ ID NO: 132825 - DNA, 467 bp, Homo sapiens
  Payload ID: 5949
  Gene Symbol: FAM65A
  Gene Name: family with sequence similarity 65, member A
  ENST ID: ENST00000568959
  CDS Start-End: 1-467
tggtccggcacctgtaccactgcagtcgcctcctgctgaaactgggcacatttgggcccctgcgctgccaggaggcatgggccctggagcggctgctgcgggaagcccgagtactggaggcagtatgcgagttcagcaggcggtgggagatcccggccagctctgcccaggaagtgtgtgtgaagttcctggaggatgccctggggcagaagctgcccagaaggccccagccagggcctggagagcagctcacagtcttccagttctggagttttgtggaaaccttggacagccccaccatggaggcctacgtgactgagaccgctgaggaggtgctactggtgcggaatctgaactcggatgatcaggctgttgtgctgaaggccctgagattggcgcccgaggggcgtctgcgaagggacgggctgcgggccctcagctccctgctcgtccatggcaacaacaag

SEQ ID NO: 132826 - DNA, 929 bp, Homo sapiens
  Payload ID: 5949
  Gene Symbol: FAM65A
  Gene Name: family with sequence similarity 65, member A
  ENST ID: ENST00000566815
  CDS Start-End: 1-607
gcggccgcagcgccgtctgctcagcgcccgggtcaataggagccagtccttcgcaggcgtcctcggcagccacgagcgggggcccaggagtttcccggtcttcagcccgccggggcccccacggaagccccccgcgctctcccgagtgtccaggatgttttccgtggctcacccagccgccaaggtgccgcagcccgagcggctggacctggtgtacacggcgctgaagcggggcctgacggcctacttggaagtgcaccagcaggagcaagagaaactccaggggcagataagggagtccaagaggaattcccgcttgggcttcctgtatgatctggacaagtcaagtccattgaacgcttcctgcgacgactggagttccatgccagcaagatcgatgagctgtatgaggcatactgtgtccagcggcgtctccgggatggtgcctacaacatggtccgtgcctacaccactgggtccccgggaagccgagaggcccgggacagcctggcagaggccactcgggggcatcgcgagtacacggagagcatgtgtctgctggagagcgagctggaggcacagctgggcgagtttcatctccgaatgaaagggctggctggcttcgccaggctgtgtgtaggcgatcagtatgagatctgcatgaaatatgggcgtcagcgctggaaactacggggccgaattgagggtagtggaaagcaggtgtgggacagtgaagaaaccatctttctccctctactcacggaatttctgtctattaaggtgacagaactgaagggcctggccaaccatgtggttgtgggcagtgtctcctgtgagaccaaggacctgtttgccgccctgccccaggttgtggctgtggatatcaatgaccttggtaccatcaagctcagcctggaagtcacatggag

SEQ ID NO: 132827 - DNA, 538 bp, Homo sapiens
  Payload ID: 5949
  Gene Symbol: FAM65A
  Gene Name: family with sequence similarity 65, member A
  ENST ID: ENST00000562755
  CDS Start-End: 250-538
gcatgacccggctatgagcctggacttaccagccagacagtggcagaaagggcggcctgcctctacagcgacgctgaggctggctgaaatggcagggctgaagggcagcgtctggacccagaaggtgccaggcggcttctggactccccaaggccttcacaacagccctggatcctttccaccaaccagcctaagccagcagtagcagctccaggacctgtttcagggagccccgcgcggactcactctatgatgtccctgtcggtgcggccgcagcgccgtctgctcagcgcccgggtcaataggagccagtccttcgcaggcgtcctcggcagccacgagcgggggcccaggagtttcccggtcttcagcccgccggggcccccacggaagccccccgcgctctcccgagtgtccaggatgttttccgtggctcacccagccgccaaggtgccgcagcccgagcggctggacctggtgtacacggcgctgaagcggggcctgacggcctacttggaagtgcaccagcaggagcaag

SEQ ID NO: 132828 - DNA, 634 bp, Homo sapiens
  Payload ID: 5949
  Gene Symbol: FAM65A
  Gene Name: family with sequence similarity 65, member A
  ENST ID: ENST00000566907
  CDS Start-End: 477-634
gagctaatcctcctagctctaggggccggcctaagcggctttgtggccggccccgaggtgaccgagcctgggctggagccgggctctccgcccaaacctggcgtagccgaagccggagaggatcgtccttgtcggggaacggagcttttccctggaaatggaggttggcgcaaggttcctgcaacagccgggcctgggctctctgcagaactggtttgggcaaggggctgctcaccagggctagaggtcggattcagtccagattcagcaccctttgtcctcctctccagggtgagccctgagtccggcctcccctacagaccctccccagccagttctaacgtgtgtccaggctggccgccccagcacctactgtgcgcagcctcgtgtaacaatacttgtgccctggctgcagtctgcggggccgcgccctgggcctgccgcattcggccaacgcacagcatctgaggagggttatgaccatctggcagatgcagaaacaggcccagagagggagccccgcgcggactcactctatgatgtccctgtcggtgcggccgcagcgccgtctgctcagcgcccgggtcaataggagccagtccttcgcaggcgtcctcggcagccacgagcgggg

SEQ ID NO: 132829 - DNA, 5471 bp, Homo sapiens
  Payload ID: 5950
  Gene Symbol: FAM65B
  Gene Name: family with sequence similarity 65, member B
  Uniprot ID: Q9Y4F9
  ENST ID: ENST00000259698
  CDS Start-End: 177-3383
ccggggtccccttcacccaagtgagccagctcaggctgtctgcaaagccggaggtgcgggcagctccgggcattgcattggtgcggaggcttttatatgccagagaaccctgagtgtgcccctgacatgacaaggagccgtcgtcgttaggactaccgaccagactcccggaaatcatgttggtaggatcccagtctttttcgcctggagggcccaatgggatcattagaagccagtcctttgcgggtttcagcggcctccaggaaaggcgatccaggtgtaactccttcattgaaaattcctccgctctcaagaagcctcaggccaaactgaagaaaatgcacaatttaggccacaaaaacaacaatccccccaaagagcctcagcctaaaagggtggaagaagtctacagggccttgaaaaatggacttgatgaatatctggaggttcaccagacggagctggacaagttgacagctcagttaaaagatatgaaaagaaactctcgcctgggtgtactgtatgacctagacaagcaaattaaaacaattgaaagatacatgagacgcctggagtttcatataagtaaggtagatgaactctatgaagcttattgtatccagcgacgcctccaggatggtgccagcaaaatgaagcaagccttcgcaacatcccctgccagcaaagctgcccgggagagtctgacagagatcaatcggagcttcaaggagtacacagagaatatgtgcaccattgaagtggagctagagaatctgctgggagaattctccatcaagatgaaaggtctggctggctttgcacgcctctgtcctggagatcaatatgaaattttcatgaagtatggccggcagcggtggaaactgaaaggcaaaatagaagtaaatggcaagcagagctgggatggagaagaaacagtttttctgcccctgatagttgggttcatctccatcaaggtcacggagctcaaagggctagcaactcacatcctggtaggtagcgtgacctgtgagaccaaagagctgtttgcagcccgacctcaggtagtggctgtcgacatcaatgaccttggtaccatcaaactgaacctggaaatcacctggtatccatttgacgtggaggacatgaccgcatcctcaggcgctgggaacaaggcagcagcccttcagaggagaatgtccatgtacagccagggtaccccggaaacgcccaccttcaaagaccactccttctttaggtggctgcatccttccccagacaagcccaggcggctgtctgtcttgagtgccttgcaagacactttctttgccaagctgcaccgcagccgctccttcagtgacctgccctccctcaggccgagtcccaaggccgtgctagagctctattcaaatctacctgatgacatctttgaaaatggaaaggcagccgaggagaaaatgccactgtcgctcagcttcagtgacctgcccaacggggactgcgccctcacctcccactcaacaggctccccttccaactcaacaaatccagaaattaccatcacccctgcggagtttaacctcagcagcttggcctcccagaatgagggtatggatgacaccagctcagcatcttccaggaactccctgggagaaggccaagagccaaagtcacacctgaaggaggaagacccagaggagcccagaaaacctgcctcggccccatctgaggcttgccgccgacagtcctcaggtgctggggctgagcacctgttccttgagaatgatgttgcagaagcacttctgcaagagtctgaggaggcctctgagctcaagcctgtggaactggacacttcggaaggaaacatcacaaagcagctggtcaagaggctcacatctgcagaggtgccaatggccacagacaggctgctctctgagggttctgttggtggagaatctgaaggctgcagatcctttctagatggaagcttagaggatgcttttaatgggcttttacttgcattagaaccacataaagagcagtataaagagtttcaggatctgaaccaagaagtcatgaatttggatgatattctaaaatgcaagccagcagtaagccgcagcaggtcttccagtttaagtctcacagttgaaagtgctttagaaagctttgatttcctgaacacctctgattttgacgaggaggaggatggtgatgaggtttgtaatgttggcggaggtgctgactcagtattttcagacactgagactgagaaacacagttacaggtcggttcacccagaagccagggggcatctcagtgaagcgctcactgaagacacaggagttgggaccagtgtggcaggaagtcctctcccactgaccacaggcaacgagagcctggacatcaccatcgtcaggcacctccagtactgcacccaactcgtgcagcaaattgttttctcaagcaaaaccccatttgtggcaagaagtctcttagagaagctttctaggcagatccaagtgatggagaaactcgcagctgtcagtgatgagaacataggaaatatcagttctgttgtggaagccataccagaatttcacaaaaagctgtctttgctgtcattctggaccaagtgctgcagccctgttggtgtctaccacagcccagcggacagagtgatgaagcagctggaggccagctttgccagaactgtcaacaaagaatatccaggacttgcagacccagtgtttcgaaccctggtgtcccaaattctggaccgggctgagcctctgctttcctccagcctgtcctcggaagtcgtcactgttttccagtattacagttacttcaccagccacggcgtcagtgacctggagagttacctgagccagctggccaggcaagtttccatggttcagactctgcaatcactaagagatgaaaaactgctacaaaccatgagtgaccttgctcccagcaacctcctggcccagcaggaagtactcaggactctggctctgctattaaccagagaggacaacgaagttagtgaggctgtgacgctttacttggcagcagcctccaaaaatcagcatttcagggaaaaggccttgctctattactgtgaagcactaacaaagacaaacctccagctccagaaagcagcttgcctggctctgaaaatccttgaggctactgaaagcattaaaatgctggtgacattgtgtcaatctgatactgaagaaatcagaaatgtggcctcagaaaccctcttgtctctgggagaagatgggcggctggcatatgaacaattggacaaatttcctcgagactgtgttaaagtcggaggtcgtcatggaactgaagttgccacagccttttaattacaggttaactgcctaacagctgtcttaatatctggcccttttcatcaggatggtgctgtggtttgggctggaaattgtttagagcctgagagacacgacaactgaaataaaaatgtaggccaggtgcagtggctcatgcctgtaatcccagtactttgggaggccaacgcaggagaattgcttaagcccaggaggttcaagaccaacctgggcaacatagcaaggccctgtctctacaaaaaaaatagtttaattagtcaggcgtggtggcatgcacctgtagtcccagctacttgggaggctaaggtgggaggattgcttgagcccagaagattcaggctgcagtgagccataattgccccactgcactccagactgggtgacagagcaaaaccctgtctcaaaaaacaaaacaacaacaacaactaaaaaaacatgttatagaaagaattcagagtctcgtttcacagtacctatctacttttcctttggccaatatagaatagggctatggtataattcaaatatattacatcgtcgattgtgtctaataatactcagtgaaagagtccatcttatcttaatatgtatgaaatttaaaaatagccatctttgtacttttttgcaagtttctctataagcttgaaatagtcatgtgatacttcgacaaacatcatatgccttgcagtttttctcggtcgtgttctcagggttgagtagtccccttagctacctaactttactttcaatacaaagcacaaaaaagaatatcttcaaataaaagtttgcctgcagaacctggcaaaatgacccattaggagagtttagatgttttaattttatgtgctcccagctactctggagtctgaggtgggaggatcacttgaggcagaggttgcagtaagctgagattacactactgcactccagcccatgtgacagaggaatgagagccagtctcaaaaaaaaaaacaaaaaactcccataatttattttgtttcttttccccatcctgaaaattcccaaatcatgtttccattatggaaaaatgataagtaaatgactaagaactacattaagattatgcctatacacttaaacaaaaaactcaaagcttatgcttttttttttttaattaatgagagctattttttatgatattcttaccataggggtgttttgctgctaagacaaatcaaaaccaaaagctgtagattcacaaacctgtgatgctctttgaggtggaggaacctagaagtcagagaaatcctaatggagtaggagtggaggaacatttaaagtggtccctccttctgtaaaaatgaccgtgggattagaaagaaggacatcctgaggggtggttactgcccccagggaaatcactcactggtaggattccctggccaaatagttcaaacatcaggtcccattattgcttcagtatcagagatgcaagttcattaagcaaagtacaagaccattcagtagctcttattaaaatatcttttcttcctctaaagagtgtacaaggtggggtatgccaaggtatcaaaacaatatatgtgagtgtaatttaaactgtggaatatcaactgtactatggacgtgtttgtatcatttagatgtcattttaaatatttacattttagcaagacttttaaaaaggactcatttcatttcaaagtgcaaattgtttgccaggcttctggcaaatggttctttcaactgtgaacttatcgtgtacatatctgtatatttataaatattatatatattcatacatccttcactttaaaggtacattgtacagtctgtagttaggaggtatagcctatagcttatgttaaatggttgaaatggttctttttatagaaagtcaaacacagatgttacaggattttgtgtttggtttgtcatttttttattttttattttgactattgcatgagtaattaattccagatcttttgtattcacttctgtattttatgtttggttgaggggtgcttttagttgtgtggcatttgtattcattgatctttcagtcatgtaagttaaaataaaaattatttttgaattactagc

SEQ ID NO: 132830 - DNA, 2442 bp, Homo sapiens
  Payload ID: 5950
  Gene Symbol: FAM65B
  Gene Name: family with sequence similarity 65, member B
  Uniprot ID: Q9Y4F9
  ENST ID: ENST00000378023
  CDS Start-End: 432-2207
cgcaagaatgcatacaaactccagggctgctctctcctggagagggagggaggggatttaaaaacctgcagcaacatgggggaggaggctgtttgtccttctctctctggggaagtaactcgctcaaactgccttccttgctgagctgcttcgcgtagctttgaggaaggtctagtgaaattggtctttccattacatctggatgtactaccagagagttctgctgctgttgttttttttagcttttctttctttgagtctttaaagggcaattgtcgacactctgcaaacataccgatttgttgtctgcccactttggagtcttcaatctgggcagtaactatttaccctttttcctgctagcctgtccccctctctggattgaagtcacctgctaagacaatggactaccgaccagactcccggaaatcatgttggtaggatcccagtctttttcgcctggagggcccaatgggatcattagaagccagtcctttgcgggtttcagcggcctccaggaaaggcgatccaggtgtaactccttcattgaaaattcctccgctctcaagaagcctcaggccaaactgaagaaaatgcacaatttaggccacaaaaacaacaatccccccaaagagcctcagcctaaaagggtggaagaagtctacagggccttgaaaaatggacttgatgaatatctggaggttcaccagacggagctggacaagttgacagctcagttaaaagatatgaaaagaaactctcgcctgggtgtactgtatgacctagacaagcaaattaaaacaattgaaagatacatgagacgcctggagtttcatataagtaaggtagatgaactctatgaagcttattgtatccagcgacgcctccaggatggtgccagcaaaatgaagcaagccttcgcaacatcccctgccagcaaagctgcccgggagagtctgacagagatcaatcggagcttcaaggagtacacagagaatatgtgcaccattgaagtggagctagagaatctgctgggagaattctccatcaagatgaaaggtctggctggctttgcacgcctctgtcctggagatcaatatgaaattttcatgaagtatggccggcagcggtggaaactgaaaggcaaaatagaagtaaatggcaagcagagctgggatggagaagaaacagtttttctgcccctgatagttgggttcatctccatcaaggtcacggagctcaaagggctagcaactcacatcctggtaggtagcgtgacctgtgagaccaaagagctgtttgcagcccgacctcaggtagtggctgtcgacatcaatgaccttggtaccatcaaactgaacctggaaatcacctggtatccatttgacgtggaggacatgaccgcatcctcaggcgctgggaacaaggcagcagcccttcagaggagaatgtccatgtacagccagggtaccccggaaacgcccaccttcaaagaccactccttcttttcaaatctacctgatgacatctttgaaaatggaaaggcagccgaggagaaaatgccactgtcgctcagcttcagtgacctgcccaacggggactgcgccctcacctcccactcaacaggctccccttccaactcaacaaatccagaaattaccatcacccctgcggagtttaacctcagcagcttggcctcccagaatgagggtatggatgacaccagctcagcatcttccaggaactccctgggagaaggccaagagccaaagtcacacctgaaggaggaagacccagaggagcccagaaaacctgcctcggccccatctgaggcttgccgccgacagtcctcaggtgctggggctgagcacctgttccttgagaatgatgttgcagaagcacttctgcaagagtctgaggaggcctctgagctcaagcctgtggaactggacacttcggaaggaaacatcacaaagcagctggtcaagaggctcacatctgcagaggtgccaatggccacagacaggctgctctctgagggttctgttggtggagaatctgaaggctgcagatcctttctagatggaagcttagaggatgcttttaatgggcttttacttgcattagaaccacataaagagcagtataaagagtttcaggatctgaaccaagaagtcatgaatttggatgatattctaaaaaagtagagaagatcctctaatggatcccagtgtgcccatccctcaacctcctcagtgatcaactcatggccaatcttgtttcctattcttcaacctgctgacttccctctggattcttctgcaaccagtcccagatattgtgccattttatccatggttgtacttcttttttggatataaagatttttaaatgcattttttaaatgctaacaaaaaataaaaacttgaaacaaaaaaaaaa

SEQ ID NO: 132831 - DNA, 3614 bp, Homo sapiens
  Payload ID: 5950
  Gene Symbol: FAM65B
  Gene Name: family with sequence similarity 65, member B
  ENST ID: ENST00000540914
  CDS Start-End: 442-2283
acctgtacctcgcaagaatgcatacaaactccagggctgctctctcctggagagggagggaggggatttaaaaacctgcagcaacatgggggaggaggctgtttgtccttctctctctggggaagtaactcgctcaaactgccttccttgctgagctgcttcgcgtagctttgaggaaggtctagtgaaattggtctttccattacatctggatgtactaccagagagttctgctgctgttgttttttttagcttttctttctttgagtctttaaagggcaattgtcgacactctgcaaacataccgatttgttgtctgcccactttggagtcttcaatctgggcagtaactatttaccctttttcctgctagcctgtccccctctctggattgaagtcacctgctaagacaatggactaccgaccagactcccggaaatcatgttggtaggatcccagtctttttcgcctggagggcccaatgggatcattagaagccagtcctttgcgggtttcagcggcctccaggaaaggcgatccaggtgtaactccttcattgaaaattcctccgctctcaagaagcctcaggccaaactgaagaaaatgcacaatttaggccacaaaaacaacaatccccccaaagagcctcagcctaaaagggtggaagaagtctacagggccttgaaaaatggacttgatgaatatctggaggttcaccagacggagctggacaagttgacagctcagttaaaagatatgaaaagaaactctcgcctgggtgtactgtatgacctagacaagcaaattaaaacaattgaaagatacatgagacgcctggagtttcatataagtaaggtagatgaactctatgaagcttattgtatccagcgacgcctccaggatggtgccagcaaaatgaagcaagccttcgcaacatcccctgccagcaaagctgcccgggagagtctgacagagatcaatcggagcttcaaggagtacacagagaatatgtgcaccattgaagtggagctagagaatctgctgggagaattctccatcaagatgaaaggtctggctggctttgcacgcctctgtcctggagatcaatatgaaattttcatgaagtatggccggcagcggtggaaactgaaaggcaaaatagaagtaaatggcaagcagagctgggatggagaagaaacagtttttctgcccctgatagttgggttcatctccatcaaggtcacggagctcaaagggctagcaactcacatcctggtaggtagcgtgacctgtgagaccaaagagctgtttgcagcccgacctcaggtagtggctgtcgacatcaatgaccttggtaccatcaaactgaacctggaaatcacctggtatccatttgacgtggaggacatgaccgcatcctcaggcgctgggaacaaggcagcagcccttcagaggagaatgtccatgtacagccagggtaccccggaaacgcccaccttcaaagaccactccttcttttcaaatctacctgatgacatctttgaaaatggaaaggcagccgaggagaaaatgccactgtcgctcagcttcagtgacctgcccaacggggactgcgccctcacctcccactcaacaggctccccttccaactcaacaaatccagaaattaccatcacccctgcggagtttaacctcagcagcttggcctcccagaatgagggtatggatgacaccagctcagcatcttccaggaactccctgggagaaggccaagagccaaagtcacacctgaaggaggaagacccagaggagcccagaaaacctgcctcggccccatctgaggcttgccgccgacagtcctcaggtgctggggctgagcacctgttccttgagaatgatgttgcagaagcacttctgcaagagtctgaggaggcctctgagctcaagcctgtggaactggacacttcggaaggaaacatcacaaagcagctggtcaagaggctcacatctgcagaggtgccaatggccacagacaggctgctctctgagggttctgttggtggagaatctgaaggctgcagatcctttctagatggaagcttagaggatgcttttaatgggcttttacttgcattagaaccacataaagagcagtataaagagtttcaggatctgaaccaagaagtcatgaatttggatgatattctaaaagatgctaaacaccttgacgatcagaaactaaatggtgctgcctcttggacggagatcactgagggtgaatgagacaactgtgatttaaaagaccgaaagacgttttcccatgtgcttttgtgccatcttgagtgtcagagacagatccctgcaaggcccttcctaccttgcgctaagaaatcagcaaggagtgtcacctaactggatggaggacatttagtgcttctaacttgcagaatttgtcccattcgacccaccccagcatcctcttgaatatttggaaatacttctctccaactctgtgcccatagcaactggcattgttttgcttgtaatgtttctgcatgtggccagcattatagaatgctccaggccagagaatgggattgctcccatgatgccagggcctggtcagggaagtggtgggacttgttccctttgaggcagagctccagaggaagcagggctgcttcttgtcatgcccaaggcattcattctttcctcagtcctcagaggaaaaattatatgctgtgagcaggtgcggtggctcatgcctgtaatcccaacactttgggaagcccaggattgctggagcccaagagttcaagaccggtatggtcaacatagggagaccctgtctctgcaataaaagaaaaaaattagcctggtgtggtggcacatgcctgtggtctcagctacctgggaggctaaggtgagaggattgcttaagcccgggagattgaggctgcagtgagctgtgatcacaccactgcactccagcctgagtgacagagcaagaccttgtctcaaaaaaaaaaaaaaaaaaaaaaaaaaaaaaaagatgcagggcttcttacctagggaacatgggctaggtgaatttgaaccacttcctgtttctgggatttgttttgttagtcctttagagcagatgccttagatagctagcgccttttgtaaaacaccgaagacattgccacttggaattagagattggtcagtattcagcattgactcactgacttaaaatttgtctgcttgtggtattttattttggggtgagcactaggcagagggatatagcagttctgtttcccaaggctttgtggttgacatggttttgttttttgttttttttgttttttttcaactttttgttataaaaatttcaaacagaagtagagaagatcctctaatggatcccagtgtgcccatccctcaacctcctcagtgatcaactcatggccaatcttgtttcctattcttcaacctgctgacttccctctggattcttctgcaaccagtcccagatattgtgccattttatccatggttgtacttcttttttggatataaagatttttaaatgcattttttaaatgctaacaaaaaataaaaacttg

SEQ ID NO: 132832 - DNA, 5389 bp, Homo sapiens
  Payload ID: 5950
  Gene Symbol: FAM65B
  Gene Name: family with sequence similarity 65, member B
  ENST ID: ENST00000538035
  CDS Start-End: 155-3298
atatgaatgaaactgctttcttcagggcagatgcggaagctgccctccagagggcttgggcaacccaaggaaaggaaatcacctcggtcggcagtgtgactgctgagactgccggggctgctgcctgctgcttctcgcgcctgtcctctccaagatgcagttttttgatgctgaggagctcctggtcgatgaagaggatgatgtttttggtgaaggactaccgaccagactcccggaaatcatgttggtaggatcccagtctttttcgcctggagggcccaatgggatcattagaagccagtcctttgcgggtttcagcggcctccaggaaaggcgatccaggtgtaactccttcattgaaaattcctccgctctcaagaagcctcaggccaaactgaagaaaatgcacaatttaggccacaaaaacaacaatccccccaaagagcctcagcctaaaagggtggaagaagtctacagggccttgaaaaatggacttgatgaatatctggaggttcaccagacggagctggacaagttgacagctcagttaaaagatatgaaaagaaactctcgcctgggtgtactgtatgacctagacaagcaaattaaaacaattgaaagatacatgagacgcctggagtttcatataagtaaggtagatgaactctatgaagcttattgtatccagcgacgcctccaggatggtgccagcaaaatgaagcaagccttcgcaacatcccctgccagcaaagctgcccgggagagtctgacagagatcaatcggagcttcaaggagtacacagagaatatgtgcaccattgaagtggagctagagaatctgctgggagaattctccatcaagatgaaaggtctggctggctttgcacgcctctgtcctggagatcaatatgaaattttcatgaagtatggccggcagcggtggaaactgaaaggcaaaatagaagtaaatggcaagcagagctgggatggagaagaaacagtttttctgcccctgatagttgggttcatctccatcaaggtcacggagctcaaagggctagcaactcacatcctggtaggtagcgtgacctgtgagaccaaagagctgtttgcagcccgacctcaggtagtggctgtcgacatcaatgaccttggtaccatcaaactgaacctggaaatcacctggtatccatttgacgtggaggacatgaccgcatcctcaggcgctgggaacaaggcagcagcccttcagaggagaatgtccatgtacagccagggtaccccggaaacgcccaccttcaaagaccactccttcttttcaaatctacctgatgacatctttgaaaatggaaaggcagccgaggagaaaatgccactgtcgctcagcttcagtgacctgcccaacggggactgcgccctcacctcccactcaacaggctccccttccaactcaacaaatccagaaattaccatcacccctgcggagtttaacctcagcagcttggcctcccagaatgagggtatggatgacaccagctcagcatcttccaggaactccctgggagaaggccaagagccaaagtcacacctgaaggaggaagacccagaggagcccagaaaacctgcctcggccccatctgaggcttgccgccgacagtcctcaggtgctggggctgagcacctgttccttgagaatgatgttgcagaagcacttctgcaagagtctgaggaggcctctgagctcaagcctgtggaactggacacttcggaaggaaacatcacaaagcagctggtcaagaggctcacatctgcagaggtgccaatggccacagacaggctgctctctgagggttctgttggtggagaatctgaaggctgcagatcctttctagatggaagcttagaggatgcttttaatgggcttttacttgcattagaaccacataaagagcagtataaagagtttcaggatctgaaccaagaagtcatgaatttggatgatattctaaaatgcaagccagcagtaagccgcagcaggtcttccagtttaagtctcacagttgaaagtgctttagaaagctttgatttcctgaacacctctgattttgacgaggaggaggatggtgatgaggtttgtaatgttggcggaggtgctgactcagtattttcagacactgagactgagaaacacagttacaggtcggttcacccagaagccagggggcatctcagtgaagcgctcactgaagacacaggagttgggaccagtgtggcaggaagtcctctcccactgaccacaggcaacgagagcctggacatcaccatcgtcaggcacctccagtactgcacccaactcgtgcagcaaattgttttctcaagcaaaaccccatttgtggcaagaagtctcttagagaagctttctaggcagatccaagtgatggagaaactcgcagctgtcagtgatgagaacataggaaatatcagttctgttgtggaagccataccagaatttcacaaaaagctgtctttgctgtcattctggaccaagtgctgcagccctgttggtgtctaccacagcccagcggacagagtgatgaagcagctggaggccagctttgccagaactgtcaacaaagaatatccaggacttgcagacccagtgtttcgaaccctggtgtcccaaattctggaccgggctgagcctctgctttcctccagcctgtcctcggaagtcgtcactgttttccagtattacagttacttcaccagccacggcgtcagtgacctggagagttacctgagccagctggccaggcaagtttccatggttcagactctgcaatcactaagagatgaaaaactgctacaaaccatgagtgaccttgctcccagcaacctcctggcccagcaggaagtactcaggactctggctctgctattaaccagagaggacaacgaagttagtgaggctgtgacgctttacttggcagcagcctccaaaaatcagcatttcagggaaaaggccttgctctattactgtgaagcactaacaaagacaaacctccagctccagaaagcagcttgcctggctctgaaaatccttgaggctactgaaagcattaaaatgctggtgacattgtgtcaatctgatactgaagaaatcagaaatgtggcctcagaaaccctcttgtctctgggagaagatgggcggctggcatatgaacaattggacaaatttcctcgagactgtgttaaagtcggaggtcgtcatggaactgaagttgccacagccttttaattacaggttaactgcctaacagctgtcttaatatctggcccttttcatcaggatggtgctgtggtttgggctggaaattgtttagagcctgagagacacgacaactgaaataaaaatgtaggccaggtgcagtggctcatgcctgtaatcccagtactttgggaggccaacgcaggagaattgcttaagcccaggaggttcaagaccaacctgggcaacatagcaaggccctgtctctacaaaaaaaatagtttaattagtcaggcgtggtggcatgcacctgtagtcccagctacttgggaggctaaggtgggaggattgcttgagcccagaagattcaggctgcagtgagccataattgccccactgcactccagactgggtgacagagcaaaaccctgtctcaaaaaacaaaacaacaacaacaactaaaaaaacatgttatagaaagaattcagagtctcgtttcacagtacctatctacttttcctttggccaatatagaatagggctatggtataattcaaatatattacatcgtcgattgtgtctaataatactcagtgaaagagtccatcttatcttaatatgtatgaaatttaaaaatagccatctttgtacttttttgcaagtttctctataagcttgaaatagtcatgtgatacttcgacaaacatcatatgccttgcagtttttctcggtcgtgttctcagggttgagtagtccccttagctacctaactttactttcaatacaaagcacaaaaaagaatatcttcaaataaaagtttgcctgcagaacctggcaaaatgacccattaggagagtttagatgttttaattttatgtgctcccagctactctggagtctgaggtgggaggatcacttgaggcagaggttgcagtaagctgagattacactactgcactccagcccatgtgacagaggaatgagagccagtctcaaaaaaaaaaacaaaaaactcccataatttattttgtttcttttccccatcctgaaaattcccaaatcatgtttccattatggaaaaatgataagtaaatgactaagaactacattaagattatgcctatacacttaaacaaaaaactcaaagcttatgcttttttttttttaattaatgagagctattttttatgatattcttaccataggggtgttttgctgctaagacaaatcaaaaccaaaagctgtagattcacaaacctgtgatgctctttgaggtggaggaacctagaagtcagagaaatcctaatggagtaggagtggaggaacatttaaagtggtccctccttctgtaaaaatgaccgtgggattagaaagaaggacatcctgaggggtggttactgcccccagggaaatcactcactggtaggattccctggccaaatagttcaaacatcaggtcccattattgcttcagtatcagagatgcaagttcattaagcaaagtacaagaccattcagtagctcttattaaaatatcttttcttcctctaaagagtgtacaaggtggggtatgccaaggtatcaaaacaatatatgtgagtgtaatttaaactgtggaatatcaactgtactatggacgtgtttgtatcatttagatgtcattttaaatatttacattttagcaagacttttaaaaaggactcatttcatttcaaagtgcaaattgtttgccaggcttctggcaaatggttctttcaactgtgaacttatcgtgtacatatctgtatatttataaatattatatatattcatacatccttcactttaaaggtacattgtacagtctgtagttaggaggtatagcctatagcttatgttaaatggttgaaatggttctttttatagaaagtcaaacacagatgttacaggattttgtgtttggtttgtcatttttttattttttattttgactattgcatgagtaattaattccagatcttttgtattcacttctgtattttatgtttggttgaggggtgcttttagttgtgtggcatttgtattcattgatctttcagtcatgtaagttaaaataaaaattatttttgaattactagcatc

SEQ ID NO: 132833 - DNA, 3517 bp, Homo sapiens
  Payload ID: 5950
  Gene Symbol: FAM65B
  Gene Name: family with sequence similarity 65, member B
  ENST ID: ENST00000510784
  CDS Start-End: 243-2186
agcacagcagctgccttcgggccagtcggaagttaagggaaggaaaggcaaggcaagttacaagataaaagaagtcaacggaagcctcaaatactcttttttttttttttaagaaaagaacaaaaaggggggggttaagttttctttttcatttttatacgtctggacttaacttccaggatagctgcaagacccttttgttcctttgccatgagcaggttttaggccgctctgttgggaccatggtgttaccttcgcgattacactggatcagaaacaggccatggagggacaggatccggaggcgccagctcaaccgactaccgaccagactcccggaaatcatgttggtaggatcccagtctttttcgcctggagggcccaatgggatcattagaagccagtcctttgcgggtttcagcggcctccaggaaaggcgatccaggtgtaactccttcattgaaaattcctccgctctcaagaagcctcaggccaaactgaagaaaatgcacaatttaggccacaaaaacaacaatccccccaaagagcctcagcctaaaagggtggaagaagtctacagggccttgaaaaatggacttgatgaatatctggaggttcaccagacggagctggacaagttgacagctcagttaaaagatatgaaaagaaactctcgcctgggtgtactgtatgacctagacaagcaaattaaaacaattgaaagatacatgagacgcctggagtttcatataagtaaggtagatgaactctatgaagcttattgtatccagcgacgcctccaggatggtgccagcaaaatgaagcaagccttcgcaacatcccctgccagcaaagctgcccgggagagtctgacagagatcaatcggagcttcaaggagtacacagagaatatgtgcaccattgaagtggagctagagaatctgctgggagaattctccatcaagatgaaaggtctggctggctttgcacgcctctgtcctggagatcaatatgaaattttcatgaagtatggccggcagcggtggaaactgaaaggcaaaatagaagtaaatggcaagcagagctgggatggagaagaaacagtttttctgcccctgatagttgggttcatctccatcaaggtcacggagctcaaagggctagcaactcacatcctggtaggtagcgtgacctgtgagaccaaagagctgtttgcagcccgacctcaggtagtggctgtcgacatcaatgaccttggtaccatcaaactgaacctggaaatcacctggtatccatttgacgtggaggacatgaccgcatcctcaggcgctgggaacaaggcagcagcccttcagaggagaatgtccatgtacagccagggtaccccggaaacgcccaccttcaaagaccactccttcttttcaaatctacctgatgacatctttgaaaatggaaaggcagccgaggagaaaatgccactgtcgctcagcttcagtgacctgcccaacggggactgcgccctcacctcccactcaacaggctccccttccaactcaacaaatccagaaattaccatcacccctgcggagtttaacctcagcagcttggcctcccagaatgagggtatggatgacaccagctcagcatcttccaggaactccctgggagaaggccaagagccaaagtcacacctgaaggaggaagacccagaggagcccagaaaacctgcctcggccccatctgaggcttgccgccgacagtcctcaggtgctggggctgagcacctgttccttgagaatgatgttgcagaagcacttctgcaagagtctgaggaggcctctgagctcaagcctgtggaactggacacttcggaaggaaacatcacaaagcagctggtcaagaggctcacatctgcagaggtgccaatggccacagacaggctgctctctgagggttctgttggtggagaatctgaaggctgcagatcctttctagatggaagcttagaggatgcttttaatgggcttttacttgcattagaaccacataaagagcagtataaagagtttcaggatctgaaccaagaagtcatgaatttggatgatattctaaaagatgctaaacaccttgacgatcagaaactaaatggtgctgcctcttggacggagatcactgagggtgaatgagacaactgtgatttaaaagaccgaaagacgttttcccatgtgcttttgtgccatcttgagtgtcagagacagatccctgcaaggcccttcctaccttgcgctaagaaatcagcaaggagtgtcacctaactggatggaggacatttagtgcttctaacttgcagaatttgtcccattcgacccaccccagcatcctcttgaatatttggaaatacttctctccaactctgtgcccatagcaactggcattgttttgcttgtaatgtttctgcatgtggccagcattatagaatgctccaggccagagaatgggattgctcccatgatgccagggcctggtcagggaagtggtgggacttgttccctttgaggcagagctccagaggaagcagggctgcttcttgtcatgcccaaggcattcattctttcctcagtcctcagaggaaaaattatatgctgtgagcaggtgcggtggctcatgcctgtaatcccaacactttgggaagcccaggattgctggagcccaagagttcaagaccggtatggtcaacatagggagaccctgtctctgcaataaaagaaaaaaattagcctggtgtggtggcacatgcctgtggtctcagctacctgggaggctaaggtgagaggattgcttaagcccgggagattgaggctgcagtgagctgtgatcacaccactgcactccagcctgagtgacagagcaagaccttgtctcaaaaaaaaaaaaaaaaaaaaaaaaaaaaaaaagatgcagggcttcttacctagggaacatgggctaggtgaatttgaaccacttcctgtttctgggatttgttttgttagtcctttagagcagatgccttagatagctagcgccttttgtaaaacaccgaagacattgccacttggaattagagattggtcagtattcagcattgactcactgacttaaaatttgtctgcttgtggtattttattttggggtgagcactaggcagagggatatagcagttctgtttcccaaggctttgtggttgacatggttttgttttttgttttttttgttttttttcaactttttgttataaaaatttcaaacagaagtagagaagatcctctaatggatcccagtgtgcccatccctcaacctcctcagtgatcaactcatggccaatcttgtttcctattcttcaacctgctgacttccctctggattcttctgcaaccagtcccagatattgtgccattttatccatggttgtacttcttttttggatataaagatttttaaatgcattttttaaatgctaacaaaaaataaaaacttg

SEQ ID NO: 132834 - DNA, 2277 bp, Homo sapiens
  Payload ID: 5950
  Gene Symbol: FAM65B
  Gene Name: family with sequence similarity 65, member B
  ENST ID: ENST00000612873
  CDS Start-End: 465-2075
tgccttccttgctgagctgcttcgcgtagctttgaggaaggtctagtgaaattggtctttccattacatctggatgtactaccagagagttctgctgctgttgttttttttagcttttctttctttgagtctttaaagggcaattgtcgacactctgcaaacataccgatttgttgtctgcccactttggagtcttcaatctgggcagtaactatttaccctttttcctgctagcctgtccccctctctggattgaagtcacctgctaagacaatggactaccgaccagactcccggaaatcatgttggtaggatcccagtctttttcgcctggagggcccaatgggatcattagaagccagtcctttgcgggtttcagcggcctccaggaaaggcgatccaggtgtaactccttcattgaaaattcctccgctctcaagaagcctcaggccaaactgaagaaaatgcacaatttaggccacaaaaacaacaatccccccaaagagcctcagcctaaaagggtggaagaagtctacagggccttgaaaaatggacttgatgaatatctggaggttcaccagacggagctggacaagttgacagctcagttaaaagatatgaaaagaaactctcgcctgggtgtactgtatgacctagacaagcaaattaaaacaattgaaagatacatgagacgcctggagtttcatataagtaaggtagatgaactctatgaagcttattgtatccagcgacgcctccaggatggtgccagcaaaatgaagcaagccttcgcaacatcccctgccagcaaagctgcccgggagagtctgacagagatcaatcggagcttcaaggagtacacagagaatatgtgcaccattgaagtggagctagagaatctgctgggagaattctccatcaagatgaaaggtctggctggctttgcacgcctctgtcctggagatcaatatgaaattttcatgaagtatggccggcagcggtggaaactgaaaggcaaaatagaagtaaatggcaagcagagctgggatggagaagaaacagtttttctgcccctgatagttgggttcatctccatcaaggtcacggagctcaaagggctagcaactcacatcctggtaggtagcgtgacctgtgagaccaaagagctgtttgcagcccgacctcaggtagtggctgtcgacatcaatgaccttggtaccatcaaactgaacctggaaatcacctggtatccatttgacgtggaggacatgaccgcatcctcaggcgctgggaacaaggcagcagcccttcagaggagaatgtccatgtacagccagggtaccccggaaacgcccaccttcaaagaccactccttcttttcaaatctacctgatgacatctttgaaaatggaaaggcagccgaggagaaaatgccactgtcgctcagcttcagtgacctgccaacggactgcgccctcacctcccactcaacaggctccccttccaactcaacaaatccagaaattaccatcacccctgcggagtttaacctcagcagcttggcctcccagaatgagggtatggatgacaccagctcagcatcttccaggaactccctgggagaaggccaagagccaaagtcacacctgaaggaggaagacccagaggagcccagaaaacctgcctcggccccatctgaggcttgccgccgacagtcctcaggtgctggggctgagcacctgttccttgagaatgatgttgcagaagcacttctgcaagagtctgaggaggcctctgagctcaagcctgtggaactggacacttcggaaggaaacatcacaaagcagctggtcaagaggctcacatctgcagaggtgccaatggccacagacaggctgctctctgagggttctgttggtggagaatctgaaggctgcagatcctttctagatggaagcttagaggatgcttttaatgggcttttacttgcattagaaccacataaagagcagtataaagagtttcaggatctgaaccaagaagtcatgaatttggatgatattctaaaaaagtagagaagatcctctaatggatcccagtgtgcccatccctcaacctcctcagtgatcaactcatggccaatcttgtttcctattcttcaacctgctgacttccctctggattcttctgcaaccagtcccagatattgtgccattttatccatggttgtacttcttttttggatataaagatttttaaatgcattttttaaatgct

SEQ ID NO: 132835 - DNA, 5539 bp, Homo sapiens
  Payload ID: 5950
  Gene Symbol: FAM65B
  Gene Name: family with sequence similarity 65, member B
  Uniprot ID: Q9Y4F9
  ENST ID: ENST00000613507
  CDS Start-End: 242-3448
atatgaatgaaactgctttcttcagggcagatgcggaagctgccctccagagggcttgggcaacccaaggaaaggaaatcacctcggtcggcagtgtgactgctgagactgccggggctgctgcctgctgcttctcgcgcctgtcctctccaagatgcagttttttgatgctgaggagctcctggtcgatgaagaggatgatgtttttggtgaaggactaccgaccagactcccggaaatcatgttggtaggatcccagtctttttcgcctggagggcccaatgggatcattagaagccagtcctttgcgggtttcagcggcctccaggaaaggcgatccaggtgtaactccttcattgaaaattcctccgctctcaagaagcctcaggccaaactgaagaaaatgcacaatttaggccacaaaaacaacaatccccccaaagagcctcagcctaaaagggtggaagaagtctacagggccttgaaaaatggacttgatgaatatctggaggttcaccagacggagctggacaagttgacagctcagttaaaagatatgaaaagaaactctcgcctgggtgtactgtatgacctagacaagcaaattaaaacaattgaaagatacatgagacgcctggagtttcatataagtaaggtagatgaactctatgaagcttattgtatccagcgacgcctccaggatggtgccagcaaaatgaagcaagccttcgcaacatcccctgccagcaaagctgcccgggagagtctgacagagatcaatcggagcttcaaggagtacacagagaatatgtgcaccattgaagtggagctagagaatctgctgggagaattctccatcaagatgaaaggtctggctggctttgcacgcctctgtcctggagatcaatatgaaattttcatgaagtatggccggcagcggtggaaactgaaaggcaaaatagaagtaaatggcaagcagagctgggatggagaagaaacagtttttctgcccctgatagttgggttcatctccatcaaggtcacggagctcaaagggctagcaactcacatcctggtaggtagcgtgacctgtgagaccaaagagctgtttgcagcccgacctcaggtagtggctgtcgacatcaatgaccttggtaccatcaaactgaacctggaaatcacctggtatccatttgacgtggaggacatgaccgcatcctcaggcgctgggaacaaggcagcagcccttcagaggagaatgtccatgtacagccagggtaccccggaaacgcccaccttcaaagaccactccttctttaggtggctgcatccttccccagacaagcccaggcggctgtctgtcttgagtgccttgcaagacactttctttgccaagctgcaccgcagccgctccttcagtgacctgccctccctcaggccgagtcccaaggccgtgctagagctctattcaaatctacctgatgacatctttgaaaatggaaaggcagccgaggagaaaatgccactgtcgctcagcttcagtgacctgcccaacggggactgcgccctcacctcccactcaacaggctccccttccaactcaacaaatccagaaattaccatcacccctgcggagtttaacctcagcagcttggcctcccagaatgagggtatggatgacaccagctcagcatcttccaggaactccctgggagaaggccaagagccaaagtcacacctgaaggaggaagacccagaggagcccagaaaacctgcctcggccccatctgaggcttgccgccgacagtcctcaggtgctggggctgagcacctgttccttgagaatgatgttgcagaagcacttctgcaagagtctgaggaggcctctgagctcaagcctgtggaactggacacttcggaaggaaacatcacaaagcagctggtcaagaggctcacatctgcagaggtgccaatggccacagacaggctgctctctgagggttctgttggtggagaatctgaaggctgcagatcctttctagatggaagcttagaggatgcttttaatgggcttttacttgcattagaaccacataaagagcagtataaagagtttcaggatctgaaccaagaagtcatgaatttggatgatattctaaaatgcaagccagcagtaagccgcagcaggtcttccagtttaagtctcacagttgaaagtgctttagaaagctttgatttcctgaacacctctgattttgacgaggaggaggatggtgatgaggtttgtaatgttggcggaggtgctgactcagtattttcagacactgagactgagaaacacagttacaggtcggttcacccagaagccagggggcatctcagtgaagcgctcactgaagacacaggagttgggaccagtgtggcaggaagtcctctcccactgaccacaggcaacgagagcctggacatcaccatcgtcaggcacctccagtactgcacccaactcgtgcagcaaattgttttctcaagcaaaaccccatttgtggcaagaagtctcttagagaagctttctaggcagatccaagtgatggagaaactcgcagctgtcagtgatgagaacataggaaatatcagttctgttgtggaagccataccagaatttcacaaaaagctgtctttgctgtcattctggaccaagtgctgcagccctgttggtgtctaccacagcccagcggacagagtgatgaagcagctggaggccagctttgccagaactgtcaacaaagaatatccaggacttgcagacccagtgtttcgaaccctggtgtcccaaattctggaccgggctgagcctctgctttcctccagcctgtcctcggaagtcgtcactgttttccagtattacagttacttcaccagccacggcgtcagtgacctggagagttacctgagccagctggccaggcaagtttccatggttcagactctgcaatcactaagagatgaaaaactgctacaaaccatgagtgaccttgctcccagcaacctcctggcccagcaggaagtactcaggactctggctctgctattaaccagagaggacaacgaagttagtgaggctgtgacgctttacttggcagcagcctccaaaaatcagcatttcagggaaaaggccttgctctattactgtgaagcactaacaaagacaaacctccagctccagaaagcagcttgcctggctctgaaaatccttgaggctactgaaagcattaaaatgctggtgacattgtgtcaatctgatactgaagaaatcagaaatgtggcctcagaaaccctcttgtctctgggagaagatgggcggctggcatatgaacaattggacaaatttcctcgagactgtgttaaagtcggaggtcgtcatggaactgaagttgccacagccttttaattacaggttaactgcctaacagctgtcttaatatctggcccttttcatcaggatggtgctgtggtttgggctggaaattgtttagagcctgagagacacgacaactgaaataaaaatgtaggccaggtgcagtggctcatgcctgtaatcccagtactttgggaggccaacgcaggagaattgcttaagcccaggaggttcaagaccaacctgggcaacatagcaaggccctgtctctacaaaaaaaatagtttaattagtcaggcgtggtggcatgcacctgtagtcccagctacttgggaggctaaggtgggaggattgcttgagcccagaagattcaggctgcagtgagccataattgccccactgcactccagactgggtgacagagcaaaaccctgtctcaaaaaacaaaacaacaacaacaactaaaaaaacatgttatagaaagaattcagagtctcgtttcacagtacctatctacttttcctttggccaatatagaatagggctatggtataattcaaatatattacatcgtcgattgtgtctaataatactcagtgaaagagtccatcttatcttaatatgtatgaaatttaaaaatagccatctttgtacttttttgcaagtttctctataagcttgaaatagtcatgtgatacttcgacaaacatcatatgccttgcagtttttctcggtcgtgttctcagggttgagtagtccccttagctacctaactttactttcaatacaaagcacaaaaaagaatatcttcaaataaaagtttgcctgcagaacctggcaaaatgacccattaggagagtttagatgttttaattttatgtgctcccagctactctggagtctgaggtgggaggatcacttgaggcagaggttgcagtaagctgagattacactactgcactccagcccatgtgacagaggaatgagagccagtctcaaaaaaaaaaacaaaaaactcccataatttattttgtttcttttccccatcctgaaaattcccaaatcatgtttccattatggaaaaatgataagtaaatgactaagaactacattaagattatgcctatacacttaaacaaaaaactcaaagcttatgcttttttttttttaattaatgagagctattttttatgatattcttaccataggggtgttttgctgctaagacaaatcaaaaccaaaagctgtagattcacaaacctgtgatgctctttgaggtggaggaacctagaagtcagagaaatcctaatggagtaggagtggaggaacatttaaagtggtccctccttctgtaaaaatgaccgtgggattagaaagaaggacatcctgaggggtggttactgcccccagggaaatcactcactggtaggattccctggccaaatagttcaaacatcaggtcccattattgcttcagtatcagagatgcaagttcattaagcaaagtacaagaccattcagtagctcttattaaaatatcttttcttcctctaaagagtgtacaaggtggggtatgccaaggtatcaaaacaatatatgtgagtgtaatttaaactgtggaatatcaactgtactatggacgtgtttgtatcatttagatgtcattttaaatatttacattttagcaagacttttaaaaaggactcatttcatttcaaagtgcaaattgtttgccaggcttctggcaaatggttctttcaactgtgaacttatcgtgtacatatctgtatatttataaatattatatatattcatacatccttcactttaaaggtacattgtacagtctgtagttaggaggtatagcctatagcttatgttaaatggttgaaatggttctttttatagaaagtcaaacacagatgttacaggattttgtgtttggtttgtcatttttttattttttattttgactattgcatgagtaattaattccagatcttttgtattcacttctgtattttatgtttggttgaggggtgcttttagttgtgtggcatttgtattcattgatctttcagtcatgtaagttaaaataaaaattatttttgaattactagcatc

SEQ ID NO: 132836 - DNA, 4279 bp, Homo sapiens
  Payload ID: 5951
  Gene Symbol: FAM65C
  Gene Name: family with sequence similarity 65, member C
  Uniprot ID: Q96MK2
  ENST ID: ENST00000045083
  CDS Start-End: 319-3159
aacgttaaatttagatgttttacctctaaatgaggtgaaattgcaggttccctctggctggcggtggggaggagacgcagggcagctttggccagcagtgagcggacagacttagcgggagtagactctgcttcctccagccacaccttggggacggaggcccaggacagtccccagtgtctgggagcatctggcttcctctccctgcacacaccagccgggtctgaacggcatcagttctaagtgccaggccagagagaggcagcgagggacacggagtagaagaggctgtcctgtctgccaccaaaggtgaccaccatgtcggtgaggttgcggttcctgtcccctggggacacaggggccgtgggggtcgtgggccggagcgcctccttcgcaggcttcagcagtgcacagagccggaggatcgcaaagtccatcaacaggaactccgtgagatcgcgaatgcctgcaaaatcctccaagatgtacggcacgctgcggaaggggtcggtctgtgcagacccgaagccccagcaggtgaagaagatcttcgaagcattgaaaagaggcctcaaggagtatctgtgtgtgcagcaggctgagctggaccacctgtctggacgccacaaagacaccaggaggaattccaggctggctttctattatgacctggacaagcaaacgcgctgtgtggaaaggcacattcggaagatggagtttcacatcagcaaggtggatgagctgtacgaggactactgcatccagtgccgcctgcgcgacggcgcctccagcatgcagcgggccttcgcccggtgccccccgagccgcgcagcccgagagagcctgcaggagctgggccgcagcctgcacgagtgcgccgaggacatgtggctcatcgagggggccctggaggttcacctgggcgagttccacatcaggatgaaaggcttggtgggctacgcacgcctctgtcccggagaccactatgaggtgctcatgcgtctgggccgccagcgttggaagctcaagggtcggatcgagtcagatgacagccagacctgggacgaagaggagaaggccttcatccccacgctgcatgagaacctggacatcaaggtgacggagttgcggggcctgggctcgctggctgtgggtgcagtgacgtgtgacatcgccgacttcttcacgacgcggccgcaggtcatcgtggtggacatcacggagttgggtaccatcaagctgcagctggaggtgcagtggaacccgtttgatactgagagcttcctggtgtcacccagccccacgggcaagttttctatgggcagcaggaagggctccttgtacaactggacacccccgagcacccccagcttccgggagagatactacctgtctgtcctacagcagccaacacagcaggccttgctgctgggtggcccaagggccacctccatcctcagctacctgtctgacagcgacctccggggtcccagcctaagaagccagagtcaggagctgcctgagatggactccttcagctctgaggacccccgagacacggagaccagcacgtcggcgtccacctcagatgtgggcttcctgcccttgaccttcggtccccacgcctccattgaagaggaggctcgggaggaccccctgcccccaggtctcctgccagagatggcccacctctctggaggcccgtttgcagagcagcctggctggaggaacttaggaggggagagccccagcctgccacagggctccctgttccacagcggcacagcctcgagtagccagaacggccacgaggaaggggcaaccggggacagagaggacgggcctggcgtggccctcgaggggcctctgcaggaggtcctggagttgctgaggcccacggactccacccagccccagctccgggagctggagtaccaggtcctcggcttccgggaccggctgaagccctgcagagcacggcaggagcacacctcggccgagagcctgatggagtgcatcctggagagcttcgccttcctcaatgccgacttcgccctggatgagctgtccctgtttgggggctcccagggtctccgaaaggaccggcccctgcccccaccgtcatcactgaaagcgtcatccagggaactcacagccggtgccccagagctggacgtgctgctgatggtacacctccaagtctgcaaagctctgctgcagaaactggcctcccctaatttatcaaggctggtccaggaatgcctcctggaagaagtggcacagcaaaagcacgttctggagacactttctgtccttgactttgagaaggtcggcaaggcaacatccattgaagagatcatcccacaggcctcgcggacgaaggggtgcctgaagctgtggagagggtgcacagggcctggcagggtcctgtcctgccctgccacgacgctgctgaaccagctcaagaaaaccttccagcacagagtcagagggaagtacccaggacagctggaaatagcgtgccgcaggctcctggagcaggtggtcagctgtggtgggctgctccccggagctgggctcccagaagaacagatcattacctggttccagtttcacagctacctgcagaggcagagcgtctctgacctggagaagcacttcacccagctcaccaaggaagtgacactcatcgaggagcttcactgtgcgggacaggccaaggtggtccggaagctgcaggggaagcggctgggccagctccagcctctgccccagaccttaagagcctgggcgctgctccagctggacggcactccgagggtgtgcagggcggccagcgctcgcctggctggtgcagtcaggaacagaagcttccgggaaaaggctttgctgttctacaccaacgccctggcagagaacgacgcaaggctccagcaggccgcatgcctagcgctcaaacacctcaagggcattgaaagcatcgaccagactgccagcctgtgccagtctgacctggaggccgtgcgggcggcagcccgggaaaccacactgtcgttcggtgaaaaaggacggttagcttttgagaagatggacaagctctgctcagaacaaagagaagtcttttgccaggaggcagatgttgaaatcacaatattttaaaaaatcctggctgatgagcacaaatctcacatcgttttttttgctgctgcccagcctggacatagcctgcactctgggtaatggtgctgtgcactcctccaggagtgtgagctgcccagagctctacctgagactccggccattgacccagccccagggcatgggctggtcttttgtacagaggcagaaaaaagcaaggcaaaggtacagcattccaggggctgcacggcctcaacagagcgctcaacttctggctgagggtctgtgtgaccttccccgagatgcagagctgagccaaactaggtggccacctacaaaagggccaaggccaggcaagttgaggccctaaataaaaggctccaaggcaagtgtgtagaactccaggcctcgctgccggtcagctgctcggcacttctgcgtcaagaggcactggggatgcagcaggctggcaggtggctggccctgctaatgcaagactgctcaggccatttcagcagcagccaggtgtcaccttggtgagctggggaaggtgggaaggcacaaagccagggtttctacaaccacactctcagcccgactgacttgctgcgagtgctggtggagctcacagacggcggctggtggatggtggactgtgaacctcactttccctatgttcagcagcacaaagggaagaagccaccacatcagcccaggagccctgagcagcacaggcagtagggccactcactttggccatccgcacccaaatgcaatcaatcaacccagcttcggaagctaccctaggatctcgtcaataaactgctaagaagccatcaactggcctaaagaaagagttcactgaagaacgcaattgctttaaagaaagaaaaattagtttcctatttaagtcttaaaaaaaagcaaaccatgtcctgagatgtctgtgttaatagtgcagagagaacctagggtttgaggttgctgtagcaatggcattggagaactttaacttgaacattctcatcgatacttcctggacatattttgtgtttttaacttacttagtatttatttgccttgttcatatgttcaattttctgaaatttcaattaaactattggtgtttcactttttaccc

SEQ ID NO: 132837 - DNA, 4377 bp, Homo sapiens
  Payload ID: 5951
  Gene Symbol: FAM65C
  Gene Name: family with sequence similarity 65, member C
  Uniprot ID: Q96MK2
  ENST ID: ENST00000327979
  CDS Start-End: 413-3253
cactgacaagcaatcggccgcgtccagagcagcaggcggcatccggggggagcggggccggctggggggccccaggagggcttcctggaaccccagctccatggccgcctgcaccctgacacaggccagataagagtcccggctgcattatcagagcccggcagggcaccggcctccctgcaccagaaggaagactcggggcgcagcaggtcctcaaggcgatcttcccagagagcgggaccagcggctggtggccagtgtggatggaatttgcagagccctagctcgagtccgggagtcccgggccagatgggagcagacgcttgctggcggcaatagggaaagtgaggcagctgcaaggagggcggcgggactgcactcgagtgtccagacctgctcgatggtgaccaccatgtcggtgaggttgcggttcctgtcccctggggacacaggggccgtgggggtcgtgggccggagcgcctccttcgcaggcttcagcagtgcacagagccggaggatcgcaaagtccatcaacaggaactccgtgagatcgcgaatgcctgcaaaatcctccaagatgtacggcacgctgcggaaggggtcggtctgtgcagacccgaagccccagcaggtgaagaagatcttcgaagcattgaaaagaggcctcaaggagtatctgtgtgtgcagcaggctgagctggaccacctgtctggacgccacaaagacaccaggaggaattccaggctggctttctattatgacctggacaagcaaacgcgctgtgtggaaaggcacattcggaagatggagtttcacatcagcaaggtggatgagctgtacgaggactactgcatccagtgccgcctgcgcgacggcgcctccagcatgcagcgggccttcgcccggtgccccccgagccgcgcagcccgagagagcctgcaggagctgggccgcagcctgcacgagtgcgccgaggacatgtggctcatcgagggggccctggaggttcacctgggcgagttccacatcaggatgaaaggcttggtgggctacgcacgcctctgtcccggagaccactatgaggtgctcatgcgtctgggccgccagcgttggaagctcaagggtcggatcgagtcagatgacagccagacctgggacgaagaggagaaggccttcatccccacgctgcatgagaacctggacatcaaggtgacggagttgcggggcctgggctcgctggctgtgggtgcagtgacgtgtgacatcgccgacttcttcacgacgcggccgcaggtcatcgtggtggacatcacggagttgggtaccatcaagctgcagctggaggtgcagtggaacccgtttgatactgagagcttcctggtgtcacccagccccacgggcaagttttctatgggcagcaggaagggctccttgtacaactggacacccccgagcacccccagcttccgggagagatactacctgtctgtcctacagcagccaacacagcaggccttgctgctgggtggcccaagggccacctccatcctcagctacctgtctgacagcgacctccggggtcccagcctaagaagccagagtcaggagctgcctgagatggactccttcagctctgaggacccccgagacacggagaccagcacgtcggcgtccacctcagatgtgggcttcctgcccttgaccttcggtccccacgcctccattgaagaggaggctcgggaggaccccctgcccccaggtctcctgccagagatggcccacctctctggaggcccgtttgcagagcagcctggctggaggaacttaggaggggagagccccagcctgccacagggctccctgttccacagcggcacagcctcgagtagccagaacggccacgaggaaggggcaaccggggacagagaggacgggcctggcgtggccctcgaggggcctctgcaggaggtcctggagttgctgaggcccacggactccacccagccccagctccgggagctggagtaccaggtcctcggcttccgggaccggctgaagccctgcagagcacggcaggagcacacctcggccgagagcctgatggagtgcatcctggagagcttcgccttcctcaatgccgacttcgccctggatgagctgtccctgtttgggggctcccagggtctccgaaaggaccggcccctgcccccaccgtcatcactgaaagcgtcatccagggaactcacagccggtgccccagagctggacgtgctgctgatggtacacctccaagtctgcaaagctctgctgcagaaactggcctcccctaatttatcaaggctggtccaggaatgcctcctggaagaagtggcacagcaaaagcacgttctggagacactttctgtccttgactttgagaaggtcggcaaggcaacatccattgaagagatcatcccacaggcctcgcggacgaaggggtgcctgaagctgtggagagggtgcacagggcctggcagggtcctgtcctgccctgccacgacgctgctgaaccagctcaagaaaaccttccagcacagagtcagagggaagtacccaggacagctggaaatagcgtgccgcaggctcctggagcaggtggtcagctgtggtgggctgctccccggagctgggctcccagaagaacagatcattacctggttccagtttcacagctacctgcagaggcagagcgtctctgacctggagaagcacttcacccagctcaccaaggaagtgacactcatcgaggagcttcactgtgcgggacaggccaaggtggtccggaagctgcaggggaagcggctgggccagctccagcctctgccccagaccttaagagcctgggcgctgctccagctggacggcactccgagggtgtgcagggcggccagcgctcgcctggctggtgcagtcaggaacagaagcttccgggaaaaggctttgctgttctacaccaacgccctggcagagaacgacgcaaggctccagcaggccgcatgcctagcgctcaaacacctcaagggcattgaaagcatcgaccagactgccagcctgtgccagtctgacctggaggccgtgcgggcggcagcccgggaaaccacactgtcgttcggtgaaaaaggacggttagcttttgagaagatggacaagctctgctcagaacaaagagaagtcttttgccaggaggcagatgttgaaatcacaatattttaaaaaatcctggctgatgagcacaaatctcacatcgttttttttgctgctgcccagcctggacatagcctgcactctgggtaatggtgctgtgcactcctccaggagtgtgagctgcccagagctctacctgagactccggccattgacccagccccagggcatgggctggtcttttgtacagaggcagaaaaaagcaaggcaaaggtacagcattccaggggctgcacggcctcaacagagcgctcaacttctggctgagggtctgtgtgaccttccccgagatgcagagctgagccaaactaggtggccacctacaaaagggccaaggccaggcaagttgaggccctaaataaaaggctccaaggcaagtgtgtagaactccaggcctcgctgccggtcagctgctcggcacttctgcgtcaagaggcactggggatgcagcaggctggcaggtggctggccctgctaatgcaagactgctcaggccatttcagcagcagccaggtgtcaccttggtgagctggggaaggtgggaaggcacaaagccagggtttctacaaccacactctcagcccgactgacttgctgcgagtgctggtggagctcacagacggcggctggtggatggtggactgtgaacctcactttccctatgttcagcagcacaaagggaagaagccaccacatcagcccaggagccctgagcagcacaggcagtagggccactcactttggccatccgcacccaaatgcaatcaatcaacccagcttcggaagctaccctaggatctcgtcaataaactgctaagaagccatcaactggcctaaagaaagagttcactgaagaacgcaattgctttaaagaaagaaaaattagtttcctatttaagtcttaaaaaaaagcaaaccatgtcctgagatgtctgtgttaatagtgcagagagaacctagggtttgaggttgctgtagcaatggcattggagaactttaacttgaacattctcatcgatacttcctggacatattttgtgtttttaacttacttagtatttatttgccttgttcatatgttcaattttctgaaatttcaattaaactattggtgtttcactttttacccaaaa

SEQ ID NO: 132838 - DNA, 2574 bp, Homo sapiens
  Payload ID: 5952
  Gene Symbol: FAM69A
  Gene Name: family with sequence similarity 69, member A
  Uniprot ID: Q5T7M9
  ENST ID: ENST00000370310
  CDS Start-End: 72-1358
ggcggggagcccggccgccagcgctcgggtccgcctctgactgcagcgcggcggggcgatgtgtgattaccatggcgaggagtctctgtccgggggcctggctaaggaaaccctattacctccaggctcgcttctcatatgtgcggatgaaatatcttttcttttcctggttagtggtttttgttggaagctggattatatatgtgcagtattctacctatacagaattatgcagaggaaaggactgtaagaaaataatatgtgacaagtacaagactggagttattgatgggcctgcatgtaacagcctttgtgttacagaaactctttactttggaaaatgtttatccaccaagcccaacaatcagatgtatttagggatttgggataatctaccaggtgttgtgaaatgtcaaatggaacaagcgcttcatcttgattttggaactgaattggaaccaagaaaagaaatagtgctatttgataagccaactagaggaactactgtacaaaaatttaaagaaatggtctatagtctctttaaggcaaaattgggtgaccaaggaaacctctctgaactggttaatctcatcttgacggtggctgatggagacaaagatggccaggtttccttgggagaagcaaagtcggcatgggcacttcttcaactgaatgaatttcttctcatggtgatacttcaagataaagaacatacccccaaattaatgggattctgtggtgacctctatgtgatggaaagtgttgaatatacctctctttatggaataagccttccttgggtcattgaactttttattccatctgggttcagaagaagcatggatcagctgttcacaccatcatggccaagaaaggccaaaatagccataggacttctagaatttgtggaagatgttttccatggcccctacggaaatttcctcatgtgcgatactagtgccaaaaacctaggatataatgataagtatgatttgaaaatggtggatatgagaaaaattgtgccagagacaaacctgaaagaacttattaaggatcgtcactgtgagtctgatttggactgtgtctatggcacagattgtagaactagctgtgatcagagtacaatgaagtgtacttcagaagtgatacaaccaaacttggcaaaagcttgtcagttactcaaagactacctactgcgtggtgctccaagtgaaattcgtgaagaattagaaaagcagctttattcttgtattgctctcaaagtcacagcaaatcaaatggaaatggaacattctttgatactaaataacctaaaaacattattgtggaagaaaatttcctacactaatgactcttagttcatttggacataattaccattttaagaaacctgccacttttaaagaacaattttgagcattaaaaaaaaatggcttcaaattccggccagttacacaaaactccttccccccaggcctgagaagccatcagtatgtgatcactgaagtaatggcaggtgtaggatcaacaggtccccaagatgtcattcctgcccttttagaagccctgttacatctccgaagtacattcattgtgtaactattttgactgactttaaaaaccaatgctgtgaaaagcttcattccataaacatcaacagtgagtgatttgtagatttaccttagccaaaataccaatgctggaagcattgtgtttgcattgaagctgctgttcaacaagaaaatttataaatttactaatgtcttagcatggtaaagtttgcacattaacagaaattaagactgcaaagcaggttaaacttgcttctttataaaacagatgttgggttaatagcatggtttactgtattaaagacttatacacccatttttaacctcattcagacatcaagttatgtgtagcttcacaatggttcaagtggcttacttcaagaaatcttatacttgacagtacaccaattttattgactaaaaatggatgaactttcctaaagattcaaagggcccatcttagtatcacgcagctgactgagcccttcaaaactgacatcttaaggcccaatcaagatccacatatcctgattttgaactatgtgaaagtgggactgtaagtgcaagactaaaataaattatagcagactttttagtaataactttccattttcaaacagtatatcctgtgggccaaagggctatttcttaaagaggcatgtaaatgtatttatttatctaatgtttttttccccatgtaaacttgatatacaaggtttagtatttgctcctctttcatattattttcacacgtatactcagatttggcatgtacctttcaacatctccataaaattaaacaccttttggagaaaagaaccactattttctgctcaaaggtttcgcctacctaaagtggaacatgttaaaaatctatgtgaccatcactggacagctttctctcaaaactttccttcaacgccatggattagcaccagttttgtttactttaaggtacttttcccattcatcatctggttataataaatggatggaagaaata

SEQ ID NO: 132839 - DNA, 2646 bp, Homo sapiens
  Payload ID: 5952
  Gene Symbol: FAM69A
  Gene Name: family with sequence similarity 69, member A
  ENST ID: ENST00000613047
  CDS Start-End: 212-1423
aatgcaaagaggatcctattgtgcagctttacactttgcaagttgatatgcaaagagtaacttatttttaatatatcttaacccttctccagtcatttctcctttaacaattgttagcgtctcctcagtttccagaatatctattcggtgaaacatttggttcgctgaacaagaggaacataaagccctggctcgcttctcatatgtgcggatgaaatatcttttcttttcctggttagtggtttttgttggaagctggattatatatgtgcagtattctacctatacagaattatgcagaggaaaggactgtaagaaaataatatgtgacaagtacaagactggagttattgatgggcctgcatgtaacagcctttgtgttacagaaactctttactttggaaaatgtttatccaccaagcccaacaatcagatgtatttagggatttgggataatctaccaggtgttgtgaaatgtcaaatggaacaagcgcttcatcttgattttggaactgaattggaaccaagaaaagaaatagtgctatttgataagccaactagaggaactactgtacaaaaatttaaagaaatggtctatagtctctttaaggcaaaattgggtgaccaaggaaacctctctgaactggttaatctcatcttgacggtggctgatggagacaaagatggccaggtttccttgggagaagcaaagtcggcatgggcacttcttcaactgaatgaatttcttctcatggtgatacttcaagataaagaacatacccccaaattaatgggattctgtggtgacctctatgtgatggaaagtgttgaatatacctctctttatggaataagccttccttgggtcattgaactttttattccatctgggttcagaagaagcatggatcagctgttcacaccatcatggccaagaaaggccaaaatagccataggacttctagaatttgtggaagatgttttccatggcccctacggaaatttcctcatgtgcgatactagtgccaaaaacctaggatataatgataagtatgatttgaaaatggtggatatgagaaaaattgtgccagagacaaacctgaaagaacttattaaggatcgtcactgtgagtctgatttggactgtgtctatggcacagattgtagaactagctgtgatcagagtacaatgaagtgtacttcagaagtgatacaaccaaacttggcaaaagcttgtcagttactcaaagactacctactgcgtggtgctccaagtgaaattcgtgaagaattagaaaagcagctttattcttgtattgctctcaaagtcacagcaaatcaaatggaaatggaacattctttgatactaaataacctaaaaacattattgtggaagaaaatttcctacactaatgactcttagttcatttggacataattaccattttaagaaacctgccacttttaaagaacaattttgagcattaaaaaaaaatggcttcaaattccggccagttacacaaaactccttccccccaggcctgagaagccatcagtatgtgatcactgaagtaatggcaggtgtaggatcaacaggtccccaagatgtcattcctgcccttttagaagccctgttacatctccgaagtacattcattgtgtaactattttgactgactttaaaaaccaatgctgtgaaaagcttcattccataaacatcaacagtgagtgatttgtagatttaccttagccaaaataccaatgctggaagcattgtgtttgcattgaagctgctgttcaacaagaaaatttataaatttactaatgtcttagcatggtaaagtttgcacattaacagaaattaagactgcaaagcaggttaaacttgcttctttataaaacagatgttgggttaatagcatggtttactgtattaaagacttatacacccatttttaacctcattcagacatcaagttatgtgtagcttcacaatggttcaagtggcttacttcaagaaatcttatacttgacagtacaccaattttattgactaaaaatggatgaactttcctaaagattcaaagggcccatcttagtatcacgcagctgactgagcccttcaaaactgacatcttaaggcccaatcaagatccacatatcctgattttgaactatgtgaaagtgggactgtaagtgcaagactaaaataaattatagcagactttttagtaataactttccattttcaaacagtatatcctgtgggccaaagggctatttcttaaagaggcatgtaaatgtatttatttatctaatgtttttttccccatgtaaacttgatatacaaggtttagtatttgctcctctttcatattattttcacacgtatactcagatttggcatgtacctttcaacatctccataaaattaaacaccttttggagaaaagaaccactattttctgctcaaaggtttcgcctacctaaagtggaacatgttaaaaatctatgtgaccatcactggacagctttctctcaaaactttccttcaacgccatggattagcaccagttttgtttactttaaggtacttttcccattcatcatctggttataataaatggatggaagaaatatttccca

SEQ ID NO: 132840 - DNA, 2426 bp, Homo sapiens
  Payload ID: 5952
  Gene Symbol: FAM69A
  Gene Name: family with sequence similarity 69, member A
  ENST ID: ENST00000616709
  CDS Start-End: 94-1203
agggggcggggaggcggggggaggcggggagcccggccgccagcgctcgggtccgcctctgactgcagcgcggcggggcgatgtgtgattaccatggcgaggagtctctgtccgggggcctggctaaggaaaccctattacctccaggctcgcttctcatatgtgcggatgaaatatcttttcttttcctggttagtggtttttgttggaagctggattatatatgtgcagtattctacctatacagaattatgcagaggaaaggactgtaagaaaataatatgtgacaagtacaagactggagttattgatgggcctgcatgtaacagcctttgtgttacagaaactctttactttggaaaatgtttatccaccaagcccaacaatcaggcaaaattgggtgaccaaggaaacctctctgaactggttaatctcatcttgacggtggctgatggagacaaagatggccaggtttccttgggagaagcaaagtcggcatgggcacttcttcaactgaatgaatttcttctcatggtgatacttcaagataaagaacatacccccaaattaatgggattctgtggtgacctctatgtgatggaaagtgttgaatatacctctctttatggaataagccttccttgggtcattgaactttttattccatctgggttcagaagaagcatggatcagctgttcacaccatcatggccaagaaaggccaaaatagccataggacttctagaatttgtggaagatgttttccatggcccctacggaaatttcctcatgtgcgatactagtgccaaaaacctaggatataatgataagtatgatttgaaaatggtggatatgagaaaaattgtgccagagacaaacctgaaagaacttattaaggatcgtcactgtgagtctgatttggactgtgtctatggcacagattgtagaactagctgtgatcagagtacaatgaagtgtacttcagaagtgatacaaccaaacttggcaaaagcttgtcagttactcaaagactacctactgcgtggtgctccaagtgaaattcgtgaagaattagaaaagcagctttattcttgtattgctctcaaagtcacagcaaatcaaatggaaatggaacattctttgatactaaataacctaaaaacattattgtggaagaaaatttcctacactaatgactcttagttcatttggacataattaccattttaagaaacctgccacttttaaagaacaattttgagcattaaaaaaaaatggcttcaaattccggccagttacacaaaactccttccccccaggcctgagaagccatcagtatgtgatcactgaagtaatggcaggtgtaggatcaacaggtccccaagatgtcattcctgcccttttagaagccctgttacatctccgaagtacattcattgtgtaactattttgactgactttaaaaaccaatgctgtgaaaagcttcattccataaacatcaacagtgagtgatttgtagatttaccttagccaaaataccaatgctggaagcattgtgtttgcattgaagctgctgttcaacaagaaaatttataaatttactaatgtcttagcatggtaaagtttgcacattaacagaaattaagactgcaaagcaggttaaacttgcttctttataaaacagatgttgggttaatagcatggtttactgtattaaagacttatacacccatttttaacctcattcagacatcaagttatgtgtagcttcacaatggttcaagtggcttacttcaagaaatcttatacttgacagtacaccaattttattgactaaaaatggatgaactttcctaaagattcaaagggcccatcttagtatcacgcagctgactgagcccttcaaaactgacatcttaaggcccaatcaagatccacatatcctgattttgaactatgtgaaagtgggactgtaagtgcaagactaaaataaattatagcagactttttagtaataactttccattttcaaacagtatatcctgtgggccaaagggctatttcttaaagaggcatgtaaatgtatttatttatctaatgtttttttccccatgtaaacttgatatacaaggtttagtatttgctcctctttcatattattttcacacgtatactcagatttggcatgtacctttcaacatctccataaaattaaacaccttttggagaaaagaaccactattttctgctcaaaggtttcgcctacctaaagtggaacatgttaaaaatctatgtgaccatcactggacagctttctctcaaaactttccttcaacgccatggattagcaccagttttgtttactttaaggtacttttcccattcatcatctggttataataaatggatggaagaaatatttccca

SEQ ID NO: 132841 - DNA, 865 bp, Homo sapiens
  Payload ID: 5952
  Gene Symbol: FAM69A
  Gene Name: family with sequence similarity 69, member A
  Uniprot ID: Q5T7M9
  ENST ID: ENST00000615519
  CDS Start-End: 94-582
agggggcggggaggcggggggaggcggggagcccggccgccagcgctcgggtccgcctctgactgcagcgcggcggggcgatgtgtgattaccatggcgaggagtctctgtccgggggcctggctaaggaaaccctattacctccaggctcgcttctcatatgtgcggatgaaatatcttttcttttcctggttagtggtttttgttggaagctggattatatatgtgcagtattctacctatacagaattatgcagaggaaaggactgtaagaaaataatatgtgacaagtacaagactggagttattgatgggcctgcatgtaacagcctttgtgttacagaaactctttactttggaaaatgtttatccaccaagcccaacaatcagatgtatttagggatttgggataatctaccaggtgttgtgaaatgtcaaatggaacaagcgcttcatcttgattttggaactgaattggaaccaagaaaagaaatagtgctatttgataagccaactagaggaactactgtacaaaaatttaaagaaatggtctatagtctctttaaggaccagcaccggtaattgtgccaaacttttgcgaagcactgctccagacagcaatcagtgatgccaaacgtcggtttgttcggaacacgctatgtcccacttcgaaaacctagcctcaaataacaactacgtacctctctcgcttcccatgttatgtttttcaaaagcctaaattacctgccacaaagcttaactgggcaagagcacattcagcagtaattcccccactaaaacagcactgttccccatcagctaaagcaacatttcatcccacccttggggccctaccccaataatt

SEQ ID NO: 132842 - DNA, 2468 bp, Homo sapiens
  Payload ID: 5952
  Gene Symbol: FAM69A
  Gene Name: family with sequence similarity 69, member A
  ENST ID: ENST00000613902
  CDS Start-End: 94-1245
agggggcggggaggcggggggaggcggggagcccggccgccagcgctcgggtccgcctctgactgcagcgcggcggggcgatgtgtgattaccatggcgaggagtctctgtccgggggcctggctaaggaaaccctattacctccagtgtgacaagtacaagactggagttattgatgggcctgcatgtaacagcctttgtgttacagaaactctttactttggaaaatgtttatccaccaagcccaacaatcagatgtatttagggatttgggataatctaccaggtgttgtgaaatgtcaaatggaacaagcgcttcatcttgattttggaactgaattggaaccaagaaaagaaatagtgctatttgataagccaactagaggaactactgtacaaaaatttaaagaaatggtctatagtctctttaaggcaaaattgggtgaccaaggaaacctctctgaactggttaatctcatcttgacggtggctgatggagacaaagatggccaggtttccttgggagaagcaaagtcggcatgggcacttcttcaactgaatgaatttcttctcatggtgatacttcaagataaagaacatacccccaaattaatgggattctgtggtgacctctatgtgatggaaagtgttgaatatacctctctttatggaataagccttccttgggtcattgaactttttattccatctgggttcagaagaagcatggatcagctgttcacaccatcatggccaagaaaggccaaaatagccataggacttctagaatttgtggaagatgttttccatggcccctacggaaatttcctcatgtgcgatactagtgccaaaaacctaggatataatgataagtatgatttgaaaatggtggatatgagaaaaattgtgccagagacaaacctgaaagaacttattaaggatcgtcactgtgagtctgatttggactgtgtctatggcacagattgtagaactagctgtgatcagagtacaatgaagtgtacttcagaagtgatacaaccaaacttggcaaaagcttgtcagttactcaaagactacctactgcgtggtgctccaagtgaaattcgtgaagaattagaaaagcagctttattcttgtattgctctcaaagtcacagcaaatcaaatggaaatggaacattctttgatactaaataacctaaaaacattattgtggaagaaaatttcctacactaatgactcttagttcatttggacataattaccattttaagaaacctgccacttttaaagaacaattttgagcattaaaaaaaaatggcttcaaattccggccagttacacaaaactccttccccccaggcctgagaagccatcagtatgtgatcactgaagtaatggcaggtgtaggatcaacaggtccccaagatgtcattcctgcccttttagaagccctgttacatctccgaagtacattcattgtgtaactattttgactgactttaaaaaccaatgctgtgaaaagcttcattccataaacatcaacagtgagtgatttgtagatttaccttagccaaaataccaatgctggaagcattgtgtttgcattgaagctgctgttcaacaagaaaatttataaatttactaatgtcttagcatggtaaagtttgcacattaacagaaattaagactgcaaagcaggttaaacttgcttctttataaaacagatgttgggttaatagcatggtttactgtattaaagacttatacacccatttttaacctcattcagacatcaagttatgtgtagcttcacaatggttcaagtggcttacttcaagaaatcttatacttgacagtacaccaattttattgactaaaaatggatgaactttcctaaagattcaaagggcccatcttagtatcacgcagctgactgagcccttcaaaactgacatcttaaggcccaatcaagatccacatatcctgattttgaactatgtgaaagtgggactgtaagtgcaagactaaaataaattatagcagactttttagtaataactttccattttcaaacagtatatcctgtgggccaaagggctatttcttaaagaggcatgtaaatgtatttatttatctaatgtttttttccccatgtaaacttgatatacaaggtttagtatttgctcctctttcatattattttcacacgtatactcagatttggcatgtacctttcaacatctccataaaattaaacaccttttggagaaaagaaccactattttctgctcaaaggtttcgcctacctaaagtggaacatgttaaaaatctatgtgaccatcactggacagctttctctcaaaactttccttcaacgccatggattagcaccagttttgtttactttaaggtacttttcccattcatcatctggttataataaatggatggaagaaatatttccca

SEQ ID NO: 132843 - DNA, 2410 bp, Homo sapiens
  Payload ID: 5953
  Gene Symbol: FAM69B
  Gene Name: family with sequence similarity 69, member B
  Uniprot ID: Q5VUD6
  ENST ID: ENST00000371691
  CDS Start-End: 1100-2134
ggccgcagcctgtcctcctgcctcagcctggggaaggctgggccgggccaaagagggaggccaagtccttgggacaggaggagacccacacctgagattagtggaaacccagccagaagctgccatgcaggtgtggctctgggcatcaggatctgtcgtgagagcccccatgagtgcccagtgcagaatggctggcagcccgccctgacggggagcagaggggctggacgcggtgcccttcacgggatgacacccagctgtttgccctgtgtccagggggttgcttctctgacagaggccctatggctcgtgtctgactcctgtccaggttctgccagcctgaccatccatcgctctggcaccaagagcccacccttttgttcttcctggcgtcccagggaaagccctgcctgggtggggcagctcctggcccttcagatggaagacgcagtccagtcagcaccatcataggaaacaagttcagaaatgtctcacttactattccgggcagggagggcgccatgagtcagggggtgcatcctccctcctggcgtcacccgaggcaggaatgaagagtcaggcagagagcgcgcgtgtggcagctggtggtgtagatattagggactagtgtgaattctagttcaccggccaatgcctggatggtccagagctgggtcggctgggcggagagctgcctccaggttcctgcctctggccctggcgtggggtcgacactgggtgtggtgtgtgtctcatgtccaggcagtggcctttgctgtgccgtcctgttacaggagccaggatggtggggacgggaccggaccggagggttggcggggctgcccctgcagccgacagccccatcctgcagccaccaatggcatgacccagggccccggcactgcctgtgtgaggggctggcagctttccaactgcagcaagtggaggcccctgccagcttcgggcctgtgggcaggggctcagtggggcaggggtgtggctgccccgcccggcacgcctgcacctgtctcctcagtgtgaccagtaccgcaaggggatcatctcgggctccgtctgccaggacctgtgtgagctgcatatggtggagtggaggacctgcctctcggtggccccgggccagcaggtgtacagcgggctctggcgggacaaggatgtaaccatcaagtgtggcattgaggagaccctcgactccaaggcccggtcggatgcggccccccggcgggagctggtactgtttgacaagcccacccggggcacctccatcaaggaattccgggagatgaccctcagcttcctcaaggcgaacctgggagacctgccttccctgccggcgctggttggccaggtcctgctcatggctgacttcaacaaggacaaccgggtgtccctggcggaagccaagtccgtgtgggccctgctgcagcgtaacgagttcctgctgctgctgtccctgcaggagaaggagcacgcctccagactgctgggctactgtggggacctctacctcaccgagggcgtgccgcatggcgcctggcacgcggccgcccttccacccctgttgcgcccactgctgccgcctgccctgcagggtgctctccagcagtggctggggcctgcgtggccttggcgggccaagatcgccatcggcctgctggagttcgtggaggagctcttccacggctcttacgggactttctacatgtgtgagaccacactggccaacgtgggctacacagccacctacgacttcaagatggccgacctgcagcaggtggcacccgaggccaccgtgcgccgcttcctgcagggccgccgctgcgagcacagcaccgactgcacctacgggcgcgactgcagggccccgtgtgacaggctcatgaggcagtgcaagggcgacctcatccagcccaacctggccaaggtgtgcgcactgctacggggctacctgctgcctggcgcgcccgccgacctccgcgaggagctgggcacacagctgcgcacctgtaccacgctgagcgggctggccagccaggtggaggcccatcactcgctggtgctcagccacctcaagactctgctctggaagaagatctccaacaccaagtactcttgatggggcagtgaggggcctggccacccttcctggagctggccaggtgccagggtccaaccctccctcaaggaatcctgtcagaagatgtgaaatgcaactgtgttgcaaaatcactcccctaccgtcagggctctggattccagcaccacagacatgagaccccagctcggagcaaaggcggacatggacatcccggcaggagagtcctccaagggggtttgttactctgaagaacgtaatgtcaataaacagcttttatgtaatgcccagggctga

SEQ ID NO: 132844 - DNA, 1668 bp, Homo sapiens
  Payload ID: 5953
  Gene Symbol: FAM69B
  Gene Name: family with sequence similarity 69, member B
  Uniprot ID: Q5VUD6
  ENST ID: ENST00000371692
  CDS Start-End: 97-1392
gcatggcgagggagcggcggccgctgcgggccgggccgggccggggctgaggccgagcgagccgcggggcccgcgcagccccggccggagcccaccatgcggcggctgcggcgcctggcgcacctggtgctcttctgccccttctccaagcgcctgcagggccggctcccaggcctcagggtccgctgcatcttcctggcctggctgggcgtctttgcaggcagctggctggtgtacgtgcactactcgtcctactcggagcgctgtcgcggccatgtctgccaggtggtcatttgtgaccagtaccgcaaggggatcatctcgggctccgtctgccaggacctgtgtgagctgcatatggtggagtggaggacctgcctctcggtggccccgggccagcaggtgtacagcgggctctggcgggacaaggatgtaaccatcaagtgtggcattgaggagaccctcgactccaaggcccggtcggatgcggccccccggcgggagctggtactgtttgacaagcccacccggggcacctccatcaaggaattccgggagatgaccctcagcttcctcaaggcgaacctgggagacctgccttccctgccggcgctggttggccaggtcctgctcatggctgacttcaacaaggacaaccgggtgtccctggcggaagccaagtccgtgtgggccctgctgcagcgtaacgagttcctgctgctgctgtccctgcaggagaaggagcacgcctccagactgctgggctactgtggggacctctacctcaccgagggcgtgccgcatggcgcctggcacgcggccgcccttccacccctgttgcgcccactgctgccgcctgccctgcagggtgctctccagcagtggctggggcctgcgtggccttggcgggccaagatcgccatcggcctgctggagttcgtggaggagctcttccacggctcttacgggactttctacatgtgtgagaccacactggccaacgtgggctacacagccacctacgacttcaagatggccgacctgcagcaggtggcacccgaggccaccgtgcgccgcttcctgcagggccgccgctgcgagcacagcaccgactgcacctacgggcgcgactgcagggccccgtgtgacaggctcatgaggcagtgcaagggcgacctcatccagcccaacctggccaaggtgtgcgcactgctacggggctacctgctgcctggcgcgcccgccgacctccgcgaggagctgggcacacagctgcgcacctgtaccacgctgagcgggctggccagccaggtggaggcccatcactcgctggtgctcagccacctcaagactctgctctggaagaagatctccaacaccaagtactcttgatggggcagtgaggggcctggccacccttcctggagctggccaggtgccagggtccaaccctccctcaaggaatcctgtcagaagatgtgaaatgcaactgtgttgcaaaatcactcccctaccgtcagggctctggattccagcaccacagacatgagaccccagctcggagcaaaggcggacatggacatcccggcaggagagtcctccaagggggtttgttactctgaagaacgtaatgtcaataaacagcttttatgtaatgcccagggctga

SEQ ID NO: 132845 - DNA, 2394 bp, Homo sapiens
  Payload ID: 5953
  Gene Symbol: FAM69B
  Gene Name: family with sequence similarity 69, member B
  ENST ID: ENST00000617017
  CDS Start-End: 1100-1900
ggccgcagcctgtcctcctgcctcagcctggggaaggctgggccgggccaaagagggaggccaagtccttgggacaggaggagacccacacctgagattagtggaaacccagccagaagctgccatgcaggtgtggctctgggcatcaggatctgtcgtgagagcccccatgagtgcccagtgcagaatggctggcagcccgccctgacggggagcagaggggctggacgcggtgcccttcacgggatgacacccagctgtttgccctgtgtccagggggttgcttctctgacagaggccctatggctcgtgtctgactcctgtccaggttctgccagcctgaccatccatcgctctggcaccaagagcccacccttttgttcttcctggcgtcccagggaaagccctgcctgggtggggcagctcctggcccttcagatggaagacgcagtccagtcagcaccatcataggaaacaagttcagaaatgtctcacttactattccgggcagggagggcgccatgagtcagggggtgcatcctccctcctggcgtcacccgaggcaggaatgaagagtcaggcagagagcgcgcgtgtggcagctggtggtgtagatattagggactagtgtgaattctagttcaccggccaatgcctggatggtccagagctgggtcggctgggcggagagctgcctccaggttcctgcctctggccctggcgtggggtcgacactgggtgtggtgtgtgtctcatgtccaggcagtggcctttgctgtgccgtcctgttacaggagccaggatggtggggacgggaccggaccggagggttggcggggctgcccctgcagccgacagccccatcctgcagccaccaatggcatgacccagggccccggcactgcctgtgtgaggggctggcagctttccaactgcagcaagtggaggcccctgccagcttcgggcctgtgggcaggggctcagtggggcaggggtgtggctgccccgcccggcacgcctgcacctgtctcctcagtgtgaccagtaccgcaaggggatcatctcgggctccgtctgccaggacctgtgtgagctgcatatggtggagtggaggacctgcctctcggtggccccgggccagcaggtgtacagcgggctctggcgggacaaggatgtaaccatcaagtgtggcattgaggagaccctcgactccaaggcccggtcggatgcggccccccggcgggagctggtactgtttgacaagcccacccggggcacctccatcaaggaattccgggagatgaccctcagcttcctcaaggcgaacctgggagacctgccttccctgccggcgctggttggccaggtcctgctcatggctgacttcaacaaggacaaccgggtgtccctggcggaagccaagtccgtgtgggccctgctgcagcgtaacgagttcctgctgctgctgtccctgcaggagaaggagcacgcctccagactgctgggctactgtggggacctctacctcaccgagggcgtgccgcatggcgcctggcacgcggccgcccttccacccctgttgcgcccactgctgccgcctgccctgcagggtgctctccagcagtggctggggcctgcgtggccttggcgggccaagatcgccatcggcctgctggagttcgtggaggagctcttccacggctcttacgggactttctacatgtgtgagaccacactggccaacgtgggctacacagccacctacgacttcaagatggccgacctgcagcaggtggcacccgaggccaccgtgcgccgcttcctgcagggccgccgctgcgagcacagcaccgactgcaccacgggcgcgactgcagggccccgtgtgacaggctcatgaggcagtgcaagggcgacctcatccagcccaacctggccaaggtgtgcgcactgctacggggctacctgctgcctggcgcgcccgccgacctccgcgaggagctgggcacacagctgcgcacctgtaccacgctgagcgggctggccagccaggtggaggcccatcactcgctggtgctcagccacctcaagactctgctctggaagaagatctccaacaccaagtactcttgatggggcagtgaggggcctggccacccttcctggagctggccaggtgccagggtccaaccctccctcaaggaatcctgtcagaagatgtgaaatgcaactgtgttgcaaaatcactcccctaccgtcagggctctggattccagcaccacagacatgagaccccagctcggagcaaaggcggacatggacatcccggcaggagagtcctccaagggggtttgttactctgaagaacgtaatgtcaataaacagcttttatgt

SEQ ID NO: 132846 - DNA, 3671 bp, Homo sapiens
  Payload ID: 5954
  Gene Symbol: FAM69C
  Gene Name: family with sequence similarity 69, member C
  Uniprot ID: Q0P6D2
  ENST ID: ENST00000343998
  CDS Start-End: 10-1269
gggctggccatggcgcgggcggcgggcgcgcggggccctgccgggtggtgcaggaggcgcgggcgctgcgggcggggcacgctcctcgccttcgccgcgtggaccgcgggctgggtgctggcggccgcgctgctgctccgcgcgcacccgggtgtcctctccgagcgctgcaccgacgagaagagccggcgcatcctggccgcgctgtgccaggactaccagggcggcacgctggccggggacctctgcgaggacctgtgtgtggcgggagagctgctgttccaacgctgcctgcactacaacagaggcaagaaggtgctgcaggccgactggcgcggccggcccgtggtcctcaagtccaaggaggaggccttctccagcttcccgcccctcagcctgttggaagaggaggcaggggagggtggccaggacatgcccgaggccgaactcctcctgatggtggctggggaggtcaagagcgctctgggcctggagttgtccaacagcagcctggggccgtggtggccgggcaggcggggcccacgctggcggggacagctggccagcctgtgggccctgctgcagcaggaggagtacgtctacttcagcctgctgcaggacctgagcccacacgtgctgcccgtgctgggttcctgcggccacttctacgcggtggagttcctggccgcgggcagcccccaccacagggcactcttccccctggaccgggccccaggtgcccctgggggtggccaggccaaggccatcagtgacatcgcactcagcttcttggacatggtgaaccattttgacagtgacttttcccaccgcctccacctctgcgacatcaagccggaaaactttgccatccggagcgacttcacagtggtggctattgatgtggacatggccttttttgaacctaaaatgagggaaatccttgagcaaaactgcacaggagatgaagactgcaatttctttgactgtttttcaagatgtgatttacgagtcaacaaatgcggagcgcagcgcgtaaacaacaacctgcaggtcatctgtgacaaaatatttcgccattggttttccgcgcctctcaagagctctgcggtctctttccagcttcagctgcagttacaggaggcggtgcaggaatgtgcagaccctggggtccccagtgggaacacccggagagcagcctccagcgtgttctggaagcttcgccaactcctccaagccacactgagggagctgcaggaggcagagaagtagccactctctggccttaaacatgctcacacaggaaaagtgaccttggctggatttcttctgccattgttttaaagatgagccatttcccctgtgctctctggggtgccgttctggtctccacattgtggagtggcaagtgctgctgccagagacagtgctccctcgctctcgtcccaccctggcctctgacctgtcgccttgtgtaaaatgagatgagggaggaggtacagacctcccttcaggagggctctcggtcagaagacaccaacctgtgtgcacttattctctgcagagagcacttgtacctggttatcccagcacgagttccagctgttctttcctgtaaatcgttaccacgttaaaaagtgtgcgtgtgtgcatacaaatgatgtgtatgcctgtgtctgggtgcaaatgagcatgtgagcatgtgtgagtgtgcccatgagtgtctgcatgtgtgtgagtgtgcacaggtgagtgtgcacaggtgagtgtggtgtgctcatgaggagtatgagtatgcctgagtgtgaatatgtatgagtgtgaatgagtgtgtgcacatgagtgcacgggtgtcagcatgtgtatataagtgtgggcatgtgtatgtgattgtgtgagtgtgggcaggtgagtgtgttggggatgtgggttagggtggggagtggtgctttctctagtgtgtcctccggaacatcttgcctacctagcaaagaagtgtgaccattctttcggaattaaatacaataaaaagaaaataagctgcatctttagggaagggaatttgcattggagagcgtgtgtaacggcagcttatagtatttttcattttgtggaatccaccaaggttatggatgggttttagggcgcctcgtattgcaatacaccttcccctgggcagggacttgtaggttggcttgatgcagcattgtcttcaccttcagagaaaatttaaagtagagcaaatgctgaggtctgcattgactccaggcaggaccagagaccagcacctttcttttgatggattgaagaccaagtgataggcatcaaatcctatggtggcatgatacgctcatcagtggtgatcccaaggaggcttttccagcaaaatacaggcagggggacaggccaggtgaagccagtgagctttcacttaaagggacctggtttctacccataactgtgacccacgagtgctcaacaaaccaacgggtcaccccttttcagaaatcccatgaaaagggaaatcgagaaagatgagagaatcaggaagtcatgttggcagtttacacattaaagaagacaaattaatcggacgttgtgaaagtcacaaactgacacattccaaatggtctcttatcttggcctgcagcccctttctaaaccagagaaacgggaatgccttcttccagactttggggtcacatttactgactctgcccttcagggcacgctgagaaatggtgtgtgagggactagcatgatcagaggcccccagctctaaattctgccttccccaaagacctgttggaaggcccactgccagctgttattcttacccatcaccactggggatcttccaaatgacacagagttccatagagggcctcctcatcatggacatgaagactcgctttgcaattgtattctagcaagaaggaaaaaacccatgtcagtcaccctgtggcacgagcaaattaaaaccaaagttcaacggccaggcctaggactagtggattccaaaggaaagggcgggcttcgggctattgggtggaggctccgattttccccagagctgcgctgggtgcaatgcctttctgtggtggtcggggcatactttgggccatgctcaccttctaggcaggttctctacaagcaaaaaggtttacaggaagacgggtgtgagatggagggggggaaggagggaagccaccagggctttgccctctgtgccctttaaacagtggggtttcgctctgggaggtcagagtgggtcttttgtgggtagacgctgggatgccagccattcattagtggcctgagctcactgaccaggcagcaaagccagcctggaaaagagaaatagttagttttcatttcaaccaaaatggaaacaaattgtttttgtttacgatggagactgtgcaatatataattatccaacacaattgtggttttattgctgaaagggagctgttttatctcttccctttatgtttggctacacagttacacacacacacacacacacacacacccttttccatccctgcctgggaattcccattagagcagtggctctcaaattgtggtgaagctcagttttgtttttaattttgaaaccttgcaaatcaatgcttttatataacataataaattaacactgtgtatatcaa

SEQ ID NO: 132847 - DNA, 1329 bp, Homo sapiens
  Payload ID: 5954
  Gene Symbol: FAM69C
  Gene Name: family with sequence similarity 69, member C
  Uniprot ID: Q0P6D2
  ENST ID: ENST00000400291
  CDS Start-End: 194-556
ggacgcccgagagtttgtgcagcctgggagacggcggggggtttgattcaggggtgcccgtgggaaggggagggctgggtcgtcccagaacctactgactgtcctcgacccccgactctctgcatgctccggatctcactcccgggagggcccggagaaaacccaagttggggtggtggctattgatgtggacatggccttttttgaacctaaaatgagggaaatccttgagcaaaactgcacaggagatgaagactgcaatttctttgactgtttttcaagatgtgatttacgagtcaacaaatgcggagcgcagcgcgtaaacaacaacctgcaggtcatctgtgacaaaatatttcgccattggttttccgcgcctctcaagagctctgcggtctctttccagcttcagctgcagttacaggaggcggtgcaggaatgtgcagaccctggggtccccagtgggaacacccggagagcagcctccagcgtgttctggaagcttcgccaactcctccaagccacactgagggagctgcaggaggcagagaagtagccactctctggccttaaacatgctcacacaggaaaagtgaccttggctggatttcttctgccattgttttaaagatgagccatttcccctgtgctctctggggtgccgttctggtctccacattgtggagtggcaagtgctgctgccagagacagtgctccctcgctctcgtcccaccctggcctctgacctgtcgccttgtgtaaaatgagatgagggaggaggtacagacctcccttcaggagggctctcggtcagaagacaccaacctgtgtgcacttattctctgcagagagcacttgtacctggttatcccagcacgagttccagctgttctttcctgtaaatcgttaccacgttaaaaagtgtgcgtgtgtgcatacaaatgatgtgtatgcctgtgtctgggtgcaaatgagcatgtgagcatgtgtgagtgtgcccatgagtgtctgcatgtgtgtgagtgtgcacaggtgagtgtgcacaggtgagtgtggtgtgctcatgaggagtatgagtatgcctgagtgtgaatatgtatgagtgtgaatgagtgtgtgcacatgagtgcacgggtgtcagcatgtgtatataagtgtgggcatgtgtatgtgattgtgtgagtgtgggcaggtgagtgtgttggggatgtgggttagggtggggagtggtgctttctctagtgtgtcctccggaacatcttgcctacctagcaaagaagtgtgaccattctttcggaattaaatacaataaaaagaaaataagctgca

SEQ ID NO: 132848 - DNA, 2305 bp, Homo sapiens
  Payload ID: 5955
  Gene Symbol: FAM71A
  Gene Name: family with sequence similarity 71, member A
  Uniprot ID: Q8IYT1
  ENST ID: ENST00000294829
  CDS Start-End: 405-2189
agagagggtcgtcacttcctgtcactaggactacagtttgtagtctctctcagggagagagactacaaactgtaattaaaaaaatcagaggtggaggtcagggggttaggtccagaagaaaacctctctggagcccaccctgcatctctacgtcttggaagagtctggagtccaggcaccctacagcaccccccacagcaatcatccgtgctcccacccccaccccggcctctgggaggctctgaggcaacagtgggggcctgtggggtggggtgggattgagagaccagctgcagagacatctttgtgacccaggagcaccactggtccctcatctgccaccgaggccaaggaagacccagagacctgcctcaccagtgctgccgttgtgctgaaagacaaccatgaatgctgattttctgctgccgtattatacggcccagagtggctccagcatgagcatgttcaacaccaccatggggaaactgcagcgacaactgtacaagggggagtacgatatattcaagtatgcaccgatatttgagagcgactttatccagatcaccaaaaggggagaagtgattgatgtgcacaaccgtgtccgtatggtgaccatgggcattgcacgtaccagccccatcctcccactcccagatgtcatgctactggcacgaccggccaccggctgcgaagagtatgctggacatggccaggccaccaagagaaaaaaacgcaaggcagcaaagaacttagagctcaccaggcttctgcccctgaggtttgtacggatctctgttcaagaccatgagaaacaacagctgcgcctgaagttcgccactggcagatcttgctatctgcaattgtgtcccgctcttgacacacgggatgacctctttgcctattgggaaaaactaatttacctcttgcggccacccatggagagtaacagcagtacctgtggcattccagctgaagacatgatgtggatgcctgtgtttcaggaagacaggaggagcctgggagccgtgaaccttcaaggaaagggggatcaggaccaggtcagcatccaaagcctccacatggtctctgaggtgtgtggggccacctctgctgcttatgctggaggggagggactccaaaatgactttaacaaacccactaatgtgctcaatgcatccatccccaaaacatctacagaacttgctgaggagccagcaacaggggggattaaagaggcagcagcagcaggggcagctgcaggggcagcaacaggcaccgtagcaggtgccttgagtgtggcagcagccaattctgcccctggacaggtgagcgcagccatagctggggcggccaccatcggtgcaggaggaaacaaaggcaacatggcccttgcaggcactgccagcatggctccaaacagcacgaaggtggctgtggcaggggctgcaggcaagtcctcagagcatgtttccagcgcatccatgagcctttcccgagagggcagtgtgagcctggccattgcaggagtagtactgaccagcaggacagctgcagaagcagacatggatgcagcagcgggacctcccgtctccacccggcagagcaagagcagcctgagtggacagcatggaagggagcgaacccaggccagcgctgaaggctgcaaggaggggagggaaagaagggaaaaggacagggctctcggaaggagttcccatcgccgcaggacaggtgaaagccgccacaaaacaaggggagacaagattgcccaaaagtcctccagcaggtcctcattcagccacagagccaatagagatgacaaaaaggagaaaggctgtggcaacccggggagcagcaggcacagggactcgcataaaggtgtcagccacacgcccatctcaaaggagtccaggacctctcacaaatctgggaggagcttatggaccaccagttccggttccagcaagggacttggcagggtcagctctttcctgaggaacgtcagagccaaccttactacaaaagtagtgggcacaccacatggcagagatgtgaacgtcatggctaagatggcggagaggagcaccaacgtggccatcgccgagacagcagagggtggccaggggctggagacggttggttctatgacaccggacatcatggagacagtgacctttgaagcccattaaataagacccagagctggaagctgcaaaggagcccagagctcatgggagtgtccctggaaagcctattccagcgttctttactgccgtttaaataaagaatcatacatctgaaagtg

SEQ ID NO: 132849 - DNA, 2515 bp, Homo sapiens
  Payload ID: 5956
  Gene Symbol: FAM71B
  Gene Name: family with sequence similarity 71, member B
  Uniprot ID: Q8TC56
  ENST ID: ENST00000302938
  CDS Start-End: 97-1914
agaagtcctgtagggagatgggcagttaccttctctccgtctctctctcggggactctatttgtggctggtggagctgtcttaaacgaagagaaccatgagcaatgaatcttgtttaccttattacacagcccacagctactcttcaatgagtgcgttcaaaacctccatgggggacctgcaacgacaattgtacaacagaggagagtacaacattttcaagtatgcaccaatgttcgagagtaattttattcagataaacaaaaagggagaggtgattgatgtacacaaccgtgtccgaatggtgacagtgggcatcgtctgcaccagccccatcctcccactgcctgacgtcatggttctggcccaaccaactaaaatctgtgaacagcatgtcagatggggccggtttgccaaggggagaggtcgcaggcccgtcaagactctagagctcacgagactgcttcccttgaaatttgtgaagatctccatccacgatcatgagaaacagcagctgcgcctgaaactcgccactggccgtactttttatctgcagttgtgtccctcttctgacacacgggaagatctcttttgctattgggaaaaacttgtctatctcctgaggccaccagtagagagttactgcagtaccccaacacttctatctggggacgcaccacccgaagacaacaaaagcctagtggctgcagagctccacagagaaggggatcagagtgagactgggctctacaagccttgtgatgtatctgcagccacctcttctgcttatgctgggggagagggaatccaacatgcctcccacggaacggctagtgcggcttctccatccacgagcactccaggggctgctgaaggaggagcagcaaggacagcaggtggcatggcagtggcaggaacagcaacaggacctagaacagatgtggcaatagcaggggcagcaatgagtcctgcaacaggtgctatgagcatagcaacaaccaaatctgcaggcccaggtcaagtgaccacagcgctggcgggagcagctatcaaaaatccaggagaaaatgaatccagcaagtccatggcaggtgctgccaacatatcctcagagggtattagcttggccttggtgggtgctgcaagcacctccttggaaggtacttccacctcgatggcgggggccgccagtctctcccaagacagcagcttgagtgcggcgtttgcaggcagtattacgaccagcaagtgtgcagcagaaagaactgaaggaccagcagtgggacccctcatctccaccttgcaaagcgaaggctacatgagtgaacgagatggaagccagaaagtttcccagcccagtgctgaagtctggaatgaaaacaaggaaagaagagaaaagaaggacagacatcccagtaggaaaagttctcatcaccgcaaggcaggtgaaagtcaccgcaggagagcgggggacaagaatcagaaagcgtcttcccaccggtccgcatctggccataaaaacacgagagatgacaaaaaagaaaaagggtacagcaacgtaaggggcaagcgacatggctcctctcgcaagagctccacccacagctccaccaaaaaggagtcgagaacaactcaggaactggggaagaaccaatctgcatctagcacaggagctttacaaaagaaagccagtaagatcagctcttttttaaggagcctcagggccactcctggttcaaaaacaagggtcacatcacatgacagagaggtagatatcgtggctaagatggtggagaagcaaaacatagaggccaaagtggagaaagcccagggtggccaggagctggagatgatcagtggcactatgacatccgagaagacggagatgatcgtctttgaaaccaaatccatttaaagaggagccagggctacaaccgcccagggatctggaagtatccctagaggagcccatcccagctttctttactgcagttcaaataataaaggaaatcgtacaactccaaaagaaatacaatctcctgcttgaatttttctgcccatagcctggtggtgacctcacagtggcttctgtgatggtggctatgctacagctggagaccccagcctccaggcaagtagagctccaccacccgcccacggccagcagagccaacgtgagtgttcagctttgcctcaatcccttttgcttccccgagactgtcaaagccacagactaagagctgggatgcatggccaccaccatgtcccctcgcccattctcctcttttccctgaatgcccctgaacatggacattcagtccagttcttagcctatgcagagacaggattcacatcccctcaggggatattcagggtaggaaggagcaatacagcagtatttgtaggcaattagaataggaaatctattcttctagatcaggaattggcaaatcatgttctgaggtccaaatcttaccagctgcctggatttgtaaataaagttttattggaacata

SEQ ID NO: 132850 - DNA, 1796 bp, Homo sapiens
  Payload ID: 5957
  Gene Symbol: FAM71C
  Gene Name: family with sequence similarity 71, member C
  Uniprot ID: Q8NEG0
  ENST ID: ENST00000324341
  CDS Start-End: 423-1148
agcagtggatggttcaggttgggaagaagagcagtgggattgccagttaaggttgtggaatcaaagagcaaaggctgttgtgaagtggaatatcaggctcaaatggaggtccctcccgaatgagcactgacacctgtgtgcccggacatccacgagggccccaacacctgtgctcctgacagctccatgcactaagcagggcacagtctggatccaggggactgactgtctctggcattgagcggttggtaatcaataccccaccctccctgttctcagtcacttggggacaaaaaagaaagcctgcagaacacgactgctggcccacctgccagagtagccaaggaaacaggatgcccgctaaagcatgttaaggaaggtgtggagcagctgctgggaactgtcttgatttaaaggaagacatggaggactgctgtatgctaccgtattacacggcccaaagcagccccgcaatgggcatgtttaacacctccatggggaagctgcagcggcaactgtacaaaggcgagtatactatattcaggtatgcacccatgtttgagagcgactttatccagatcagcaaaagaggagaagtgattgacgtgcacaaccgtgcccgaatggtaacaatgggcatcgttcgcaccagcccctgcctcacactacctgatgtcatgctgctggcccgaccagctgctgtctgtgacaatgccaggtgtggtcctgccacccagaaaagagaaagtccgcctgcagagatcttagaactaaccaggctgcttcccttgatgtttgtgaaaataaccatccacaacagcgtaaaaaaacagctccacctgaagcttgccacgggccgctctttttatcttcagctgtgtcctccatcggatgcaagtgaagacctttttgttcactgggaaaaccttgtttacatcctgagaccaccagtggaggcttacagtgataccagggctatcctagctgggaacacattggactcatctgtgttggaggaagtgcagaggagcccagtgggatatgccatgaagttttgtgaagagaaggagcaattcagaatcagtagacttcacatgaatgctgaaatgtttgggtccacctattgtgattatacaatagagatatgaatccaacatacctcccacatatactacgttcaagagttcacacacccctgcagtcataaaacctatagtgcctgatgaaggggcagggtagcaacagcagtagtgatgacagtaagcaccaccacaggtaccatggatgtggctgcaaccaagtctgcagactcaggagagaaacacagcactggcaaaagcagccttcagaggtccaggaggaagtatagccagcatggctattagtgggtgcttccatgtcttaatcttgttatagcaagggctgcatgcacattcttgtcctaaaagggtacttcaagcatatcagtaagtgctactggcctctccctagagagcagtatgaatgtggtggctacaggagcagagagatactgagaaggctgttgcattgacagtatctctctgctactcaaaggctgactctctgctactcagcattgggagtcagttatctcaactctgcaggatgaggccacatgcgtgaatgggatggaagccagagggtctctacctagctggattgactctgcagtaataacctcaaagcccagtactacacatggtgcagaggtggacatctcacctaagactgtggaggggaacaatgtgattcaccataataaaatccatcaactc

SEQ ID NO: 132851 - DNA, 1754 bp, Homo sapiens
  Payload ID: 5958
  Gene Symbol: FAM71D
  Gene Name: family with sequence similarity 71, member D
  Uniprot ID: Q8N9W8
  ENST ID: ENST00000311864
  CDS Start-End: 255-1523
actaagtggttagttgcctgctgagtagacataaacacctgctaaagaaatgtgaaaagagtggaaacgtgctatttggaggttattttcctagtcgacatccaggagatctccagagatctatttcagccccacctgttgatttcatcatgaaaaggaggaagctcaaactgaagtgagttaaaaacttcatctcctagagaggactgtggctcggcctgagttgagtttttttatgtttatgtgcaagcgcaatgaagaagaacaccagcaagactaccatgaggatcaataagcaagatgctctctgcaccccacactcccatgatccgagagatcttcaaaatatgttggatggaggagagtatgccccttttgtatctcctcccatgttagagagcaattttatccaggtcaacagaagaggtgaatccatttaccttcataaccgagccaactgggtgaccgtaggcatctgtttttccagctccacccacaagatccccaatgtgatgctactggcccatctgacacctggtgcccaaaaagatacagaaaccctgtttaaaagtctcctgacatctcctcctgcagagaaactagtgctcaccaggtttctccctctgcagtttgtgactctttctgtgcatgatgcggagaacatgagcctgaaagtaaagctggtgagtggtcgagcctactacttacagctctgcacctctgcatataaacaggacaccttgttttctcaatgggtggccctcatctccctcttgaatcaggagaaagccaaagtttccaaagtgtcggaggtttcaagtctctcaggaattacgaatagcacagacatcacaggctccatggatgtgacggatgtcaccacgttcacagccatcctgaccccgtacatgtatgcaggtacaggccctgaacatgtcagggacagcatagatttcccagaattcacagacatcaccgacatcacagatgtcacagatcttccagaaaatgaggtcccagaggtcccggatgtaagaattgtcacagaagtcatagaagtcagagaagccacggaagtcacagacagctctgatattacaaactgctcgggagtcacagtggtgtttgaaaacaatgacttaatcagggccaagcaagaggagaaggaaaaattgaaaaacattctgaagcctgggtgtttacaagatacaaaaagtaagagtgagttgaaagaatcctcaaaacatgtcaccatctcaaacataacactgacttttgaaggtaaaagatattttcaaactaccttgaccccagtagaaagtgaggcaaatacatccaaggagatgaaggataagacctctgaagaaaagatgcctgattttcagagcacagctctcaaggctgaagaatccaggagcttgagaactgaatcaaacacttcagttctctcccctcatatcaaatctccttctaatttcctcaaacttgtgcctcatctgtctgcccctttctcaagggaatgaatgtgaggaaagaaaagtaaaacagaaaaagacaaagttgatggaaaaacatgtaagacaaactaaagacatttgaattaaatgaactgacttctccacctttttttaaaatcagatacaaactactaaactaaaaagcaaacacagctcagggaaagacaatcagtgcaagaggaaaaccaagcagtgtcttctacgtggcagaaataaagcctatgactaatcattacg

SEQ ID NO: 132852 - DNA, 1651 bp, Homo sapiens
  Payload ID: 5958
  Gene Symbol: FAM71D
  Gene Name: family with sequence similarity 71, member D
  Uniprot ID: Q8N9W8
  ENST ID: ENST00000534174
  CDS Start-End: 223-1425
aaacacctgctaaagaaatgtgaaaagagtggaaacgtgctatttggaggttattttcctagtcgacatccaggagatctccagagatctatttcagccccacctgttgatttcatcatgaaaaggaggaagctcaaactgaagtgagttaaaaacttcatctcctagagaggactgtggctcggcctgagttgagtttttttatgtttatgtgcaagcgcaatgaagaagaacaccagcaagactaccatgaggatcaataagcaagatgctctctgcaccccacactcccatgatccgagagatcttcaaaatatgttggatggaggagagtatgccccttttgtatctcctcccatgttagagagcaattttatccaggtcaacagaagaggtgaatccatttaccttcataaccgagccaactgggtgaccgtaggcatctgtttttccagctccacccacaagatccccaatgtgatgctactggcccatctgacacctggtgcccaaaaagatacagaaaccctgtttaaaagtctcctgacatctcctcctgcagagaaactagtgctcaccaggtttctccctctgcagtttgtgactctttctgtgcatgatgcggagaacatgagcctgaaagtaaagctggtgagtggtcgagcctactacttacagctctgcacctctgcatataaacaggacaccttgttttctcaatgggtggccctcatctccctcttgaatcaggagaaagccaaagtttccaaagtgtcggaggtttcaagtctctcaggaattacgaatagcacagacatcacaggctccatggatgtgacggatgtcaccacgttcacagccatcctgaccccgtacatgtatgcaggtacaggccctgaacatgtcagggacagcatagatttcccagaattcacagacatcaccgacatcacagatgtcacagatcttccagaaaatgaggtcccagaggtcccggatgtaagaattgtcacagaagtcatagaagtcagagaagccacggaagtcacagacagctctgatattacaaactgctcgggagtcacagtggtgtttgaaaacaatgacttaatcagggccaagcaagaggagaaggaaaaattgaaaaacattctgaagcctgggtgtttacaagatacaaaaagtaaaagatattttcaaactaccttgaccccagtagaaagtgaggcaaatacatccaaggagatgaaggataagacctctgaagaaaagatgcctgattttcagagcacagctctcaaggctgaagaatccaggagcttgagaactgaatcaaacacttcagttctctcccctcatatcaaatctccttctaatttcctcaaacttgtgcctcatctgtctgcccctttctcaagggaatgaatgtgaggaaagaaaagtaaaacagaaaaagacaaagttgatggaaaaacatgtaagacaaactaaagacatttgaattaaatgaactgacttctccacctttttttaaaatcagatacaaactactaaactaaaaagcaaacacagctcagggaaagacaatcagtgcaagaggaaaaccaagcagtgtcttctacgtggcagaaataaagcctatgactaatca

SEQ ID NO: 132853 - DNA, 552 bp, Homo sapiens
  Payload ID: 5958
  Gene Symbol: FAM71D
  Gene Name: family with sequence similarity 71, member D
  ENST ID: ENST00000530728
  CDS Start-End: 320-552
agttgcctgctgagtagacataaacacctgctaaagaaatgtgaaaagagtggaaacgtgctatttggaggttattttcctagtcgacatccaggagatctccagagatctatttcagccccacctgttggctctcgctctgatgcccaggctggagtgcagtgacaagatcatagctcactgtagcctcaacctcccaggctcagatttcatcatgaaaaggaggaagctcaaactgaagtgagttaaaaacttcatctcctagagaggactgtggctcggcctgagttgagtttttttatgtttatgtgcaagcgcaatgaagaagaacaccagcaagactaccatgaggatcaataagcaagatgctctctgcaccccacactcccatgatccgagagatcttcaaaatatgttggatggaggagagtatgccccttttgtatctcctcccatgttagagagcaattttatccaggtcaacagaagaggtgaatccatttaccttcataaccgagccaactgggtgaccgtaggcatctgtttttccag

SEQ ID NO: 132854 - DNA, 543 bp, Homo sapiens
  Payload ID: 5958
  Gene Symbol: FAM71D
  Gene Name: family with sequence similarity 71, member D
  ENST ID: ENST00000524532
  CDS Start-End: 348-543
aacaatgcccagagcagcctggcctgtgcttcttttactaagtggttagttgcctgctgagtagacataaacacctgctaaagaaatgtgaaaagagtggaaacgtgctatttggaggttattttcctagtcgacatccaggagatctccagagatctatttcagccccacctgttgtttcatttcttctacctcaaccagaacaagctgaaaagccgagagacttaacacctgatttcatcatgaaaaggaggaagctcaaactgaagtgagttaaaaacttcatctcctagagaggactgtggctcggcctgagttgagtttttttatgtttatgtgcaagcgcaatgaagaagaacaccagcaagactaccatgaggatcaataagcaagatgctctctgcaccccacactcccatgatccgagagatcttcaaaatatgttggatggaggagagtatgccccttttgtatctcctcccatgttagagagcaattttatccaggtcaacagaagaggtgaatccatttaccttcataacc

SEQ ID NO: 132855 - DNA, 350 bp, Homo sapiens
  Payload ID: 5958
  Gene Symbol: FAM71D
  Gene Name: family with sequence similarity 71, member D
  ENST ID: ENST00000557671
  CDS Start-End: 1-215
gtaaaagatattttcaaactaccttgaccccagtagaaagtgaggcaaatacatccaaggagatgaaggataagacctctgaagaaaagatgcctgattttcagagcacagctctcaaggctgaagaatccaggagcttgagaactgaatcaaacacttcagtgagcccaaattatgggcttatctctgattctttgatattttttccaagatgaaaagagacaaaggatagagattcaagaaaagaagagaaagaaaaatcacataaaatattgggagtttccttcctacccttacccatctttcttttccatgttcctcttaaatattacaaaccaaattccttggaa

SEQ ID NO: 132856 - DNA, 2136 bp, Homo sapiens
  Payload ID: 5958
  Gene Symbol: FAM71D
  Gene Name: family with sequence similarity 71, member D
  ENST ID: ENST00000556046
  CDS Start-End: 225-485
aacagctcagctcagacatagacagcagcctcggactccgcttcacctacccagtatacttacaagaactctaactctttctgaggccttgacctcacacttgaaataacaatttcatcatgaaaaggaggaagctcaaactgaagtgagttaaaaacttcatctcctagagaggactgtggctcggcctgagttgagtttttttatgtttatgtgcaagcgcaatgaagaagaacaccagcaagactaccatgaggatcaataagcaagatgctctctgcaccccacactcccatgatccgagagatcttcaaaatatgttggatggaggagagtatgccccttttgtatctcctcccatgttagagagcaattttatccagccagctcccctcagggcctcacatctaaacaggacaatgatagctgccagcagtagaagatattcatctcatcctggtggctctgtctcctggtggctctgagaaacgttttccagggttggaggatacctcctgtatgtcttgctggtcacatgccactgctgaaaccagtcactggcaaggggtgtggagtggaaccaccactacccatttaagttaatcaggatttaatccctgagctgggtcatcatccctgagccatgatattggacaaaaccaggattctgttaatccagaagaagaggggcacagtttgggtcaacagaagaggtgaatccatttaccttcataaccgagccaactgggtgaccgtaggcatctgtttttccagctccacccacaagatccccaatgtgatgctactggcccatctgacacctggtgcccaaaaagatacagaaaccctgtttaaaagtctcctgacatctcctcctgcagagaaactagtgctcaccaggtttctccctctgcagtttgtgactctttctgtgcatgatgcggagaacatgagcctgaaagtaaagctggtgagtggtcgagcctactacttacagctctgcacctctgcatataaacaggacaccttgttttctcaatgggtggccctcatctccctcttgaatcaggagaaagccaaagtttccaaagtgtcggaggtttcaagtctctcaggaattacgaatagcacagacatcacaggctccatggatgtgacggatgtcaccacgttcacagccatcctgaccccgtacatgtatgcaggtacaggccctgaacatgtcagggacagcatagatttcccagaattcacagacatcaccgacatcacagatgtcacagatcttccagaaaatgaggtcccagaggtcccggatgtaagaattgtcacagaagtcatagaagtcagagaagccacggaagtcacagacagctctgatattacaaactgctcgggagtcacagtggtgtttgaaaacaatgacttaatcagggccaagcaagaggagaaggaaaaattgaaaaacattctgaagcctgggtgtttacaagatacaaaaagtaagagtgagttgaaagaatcctcaaaacatgtcaccatctcaaacataacactgacttttgaaggtaaaagatattttcaaactaccttgaccccagtagaaagtgaggcaaatacatccaaggagatgaaggataagacctctgaagaaaagatgcctgattttcagagcacagctctcaaggctgaagaatccaggagcttgagaactgaatcaaacacttcaggtatggaacaaattccactacatgttttattgtgatccctggtattcagtagtcatctctggttcctagaagagtagtgtggctaagagcaaaggaattcagctagactttttgatgcatttcctttcttcactatgctccattctgagaatcctatactgaagaaactctttctcaaagccgatcctcaggctatctttcaagtggaaaacattatggcttgtatagtttttcagtttttcccctgattagcatttctttccccattttcactctcctctaaatcacctgttccccttccatacacttttactctcacttaacaccctgtaccccaagaaaagcaaagactggctgaatcttaatacctcattttattaaatgtaattggagtacaaattaaaaa

SEQ ID NO: 132857 - DNA, 359 bp, Homo sapiens
  Payload ID: 5958
  Gene Symbol: FAM71D
  Gene Name: family with sequence similarity 71, member D
  ENST ID: ENST00000556117
  CDS Start-End: 1-157
cccggatgtaagaattgtcacagaagtcatagaagtcagagaagccacggaagtcacagacagctctgatattacaaactgctcgggagtcacagtggtgtttgaaaacaatgacttaatcagggccaagcaagaggagaaggagcttgagaactgaatcaaacacttcaggcttgtatagtttttcagtttttcccctgattagcatttctttccccattttcactctcctctaaatcacctgttccccttccatacacttttactctcacttaacaccctgtaccccaagaaaagcaaagactggctgaatcttaatacctcattttattaaatgtaattggagtacaaattaaaaa

SEQ ID NO: 132858 - DNA, 1589 bp, Homo sapiens
  Payload ID: 5958
  Gene Symbol: FAM71D
  Gene Name: family with sequence similarity 71, member D
  ENST ID: ENST00000524914
  CDS Start-End: 241-411
tgcctgctgagtagacataaacacctgctaaagaaatgtgaaaagagtggaaacgtgctatttggaggttattttcctagtcgacatccaggagatctccagagatctatttcagccccacctgttgatttcatcatgaaaaggaggaagctcaaactgaagtgagttaaaaacttcatctcctagagaggactgtggctcggcctgagttgagtttttttatgtttatgtgcaagcgcaatgaagaagaacaccagcaagactaccatgaggatcaataagcaagatgctctctgcaccccacactcccatgatccgagagatcttcaaaatatgttggatggaggagagtatgccccttttgtatctcctcccatgttagagagcaattttatccagctgctcagctgatttcacagaggggtgacaagggaggacaacagacacttcaaaaggcaagaagaggatggcaggagctcttttgccatggctaccaggccgatctccgagcggaaccaggatgccactgtgtacgtggggggcctgaatgagaagttgcagcaattgaagccatgaatgggcagtacctctgtaaccaccctatcaccgtatcttatgccttcgagaaggactccaagggtgagcgccatggcttagcagctggacgacttctggcagctcagaacccgctctcccagcctgaccgccctcatcagctgtttgcagatgcacctccttcaccctctgcccccaatcctgtggtatcatcattggggtctgggcttcctccaccaggcatgcctcctcctggctccttcccacccccagtgctgcctcctggagccctcccacctgggatacccccagccatgccccaccacctatgcctcctggggctgcaggacatggccccccatcggcaggaaccccaggggcaggacatcctggtcatggacactcccaagctcacccattcccaccaggaggagtgccccatccagggatgtctcagatgcagctggcacaccatggacctcatggtttaggacatccccattctggacacccaggctctgggggacagccaccaccccaaccaccacctggaatgccttatcctggacctcctccaatgggcatgcccccccgaaggcctccattctgatctcccatgggtcacccaggtcctatgcctccacatggtatgcgtggacttcctccactgatgccccccatggatacactggccctccacaacccacaccctatggctaccagcctctccctccaaccaggcccactccccagccaccagttgcccctcgaggcccgctttggagccctctccctcagtaaattcacattttccttcctcctattacatcttcccaatatcttttcgataccttggaccaatcagagatgctgtagctccttggggctaaggcactaatccctttcagcacccccaccccattcccctttttaatgtaactttttccacaggaggtatttcttttttatgttggtcctgagtattttgcaaatgcacagagaaaataaaactaaactccttgtttaaaaaaaaa

SEQ ID NO: 132859 - DNA, 1790 bp, Homo sapiens
  Payload ID: 5958
  Gene Symbol: FAM71D
  Gene Name: family with sequence similarity 71, member D
  Uniprot ID: Q8N9W8
  ENST ID: ENST00000612183
  CDS Start-End: 291-1559
aacaatgcccagagcagcctggcctgtgcttcttttactaagtggttagttgcctgctgagtagacataaacacctgctaaagaaatgtgaaaagagtggaaacgtgctatttggaggttattttcctagtcgacatccaggagatctccagagatctatttcagccccacctgttgatttcatcatgaaaaggaggaagctcaaactgaagtgagttaaaaacttcatctcctagagaggactgtggctcggcctgagttgagtttttttatgtttatgtgcaagcgcaatgaagaagaacaccagcaagactaccatgaggatcaataagcaagatgctctctgcaccccacactcccatgatccgagagatcttcaaaatatgttggatggaggagagtatgccccttttgtatctcctcccatgttagagagcaattttatccaggtcaacagaagaggtgaatccatttaccttcataaccgagccaactgggtgaccgtaggcatctgtttttccagctccacccacaagatccccaatgtgatgctactggcccatctgacacctggtgcccaaaaagatacagaaaccctgtttaaaagtctcctgacatctcctcctgcagagaaactagtgctcaccaggtttctccctctgcagtttgtgactctttctgtgcatgatgcggagaacatgagcctgaaagtaaagctggtgagtggtcgagcctactacttacagctctgcacctctgcatataaacaggacaccttgttttctcaatgggtggccctcatctccctcttgaatcaggagaaagccaaagtttccaaagtgtcggaggtttcaagtctctcaggaattacgaatagcacagacatcacaggctccatggatgtgacggatgtcaccacgttcacagccatcctgaccccgtacatgtatgcaggtacaggccctgaacatgtcagggacagcatagatttcccagaattcacagacatcaccgacatcacagatgtcacagatcttccagaaaatgaggtcccagaggtcccggatgtaagaattgtcacagaagtcatagaagtcagagaagccacggaagtcacagacagctctgatattacaaactgctcgggagtcacagtggtgtttgaaaacaatgacttaatcagggccaagcaagaggagaaggaaaaattgaaaaacattctgaagcctgggtgtttacaagatacaaaaagtaagagtgagttgaaagaatcctcaaaacatgtcaccatctcaaacataacactgacttttgaaggtaaaagatattttcaaactaccttgaccccagtagaaagtgaggcaaatacatccaaggagatgaaggataagacctctgaagaaaagatgcctgattttcagagcacagctctcaaggctgaagaatccaggagcttgagaactgaatcaaacacttcagttctctcccctcatatcaaatctccttctaatttcctcaaacttgtgcctcatctgtctgcccctttctcaagggaatgaatgtgaggaaagaaaagtaaaacagaaaaagacaaagttgatggaaaaacatgtaagacaaactaaagacatttgaattaaatgaactgacttctccacctttttttaaaatcagatacaaactactaaactaaaaagcaaacacagctcagggaaagacaatcagtgcaagaggaaaaccaagcagtgtcttctacgtggcagaaataaagcctatgactaatcattacg

SEQ ID NO: 132860 - DNA, 653 bp, Homo sapiens
  Payload ID: 5959
  Gene Symbol: FAM71E1
  Gene Name: family with sequence similarity 71, member E1
  ENST ID: ENST00000602178
  CDS Start-End: 73-653
gtgcgcgtagtcccgccccctcgctttctccctctgctcctccgtccgctcccgtcggacggggacattgcaatgaggcgggatcgcggccctaagccggccctgggtggagctggcgaggtggaaccaggtgggatggcagcctctcccacgggccgtcccagacggctccaacgctacctccagagcggcgaattcgaccagtttcgggacttccccatctttgagagcaacttcgtacaggtgactcggttgggagaagttgccaacgaggtcaccatgggggtggcagcctccagtccagccctggagctcccggacctattgcttctggccggccctgccaaggagaacggacacctgcaactcttcggctgcgggccccactcaagacccgagaccgagagttcggccagtgggtgcggctgctctaccgcctgcgcttcctctctgcttctgctgtgcccttcacgcaggagtaagagccccaaggcgtggaagccagacttgaccccaagacctctgaactctggggactctgagtcttccagcatccttcaaggtcaccgaatgaccagagatcaaagtaccttgcctcagggccgggcagatgagatattaaagttaataaaggtcagtccattaagaaccaa

SEQ ID NO: 132861 - DNA, 1225 bp, Homo sapiens
  Payload ID: 5959
  Gene Symbol: FAM71E1
  Gene Name: family with sequence similarity 71, member E1
  Uniprot ID: Q6IPT2
  ENST ID: ENST00000595790
  CDS Start-End: 359-1054
gcctccttccgtctgtaactcacctaaagacccaagacctgcgacatccgtagaccgcgcccgctatgcacagctaaagagcactcacccctcgcgcaccagtcccggcccggcagccgctgccccgggctcgactgggcgctgctaccgccatcagcaagagcaggagcagccgggttgccccagcgctggctgccgccatctcggcttcttcccaccagcgaagggacggctgtgagccaagagccgcggagcacgccgggaggaacaggccgcatcctgacgcccgtgcgcctgcgctgggccccggcacctgcgcactggcacccgtccgcacctggggcctgacgtcagcaggatggggccgcccctttggcctgatctccaggagccgccccctccagggacgtcatcacaaatcaggagcccgctcttgtgtgacgtcataaagcccgctccgcatcatgacgtcacagtgcgcgtagtcccgccccctcgctttctccctctgctcctccgtccgctcccgtcggacggggacattgcaatgaggcgggatcgcggccctaagccggccctgggtggagctggcgaggtggaaccaggtgggatggcagcctctcccacgggccgtcccagacggctccaacgctacctccagagcggcgaattcgaccagtttcgggacttccccatctttgagagcaacttcgtacaggtgactcggttgggagaagttgccaacgaggtcaccatgggggtggcagcctccagtccagccctggagctcccggacctattgcttctggccggccctgccaaggagaacggacacctgcaactcttcgggctgttccccttgaagttcgtccagctctttgtccacgacaaaagccggtgtcagctcgaggtcaagttgaacaccagccgcaccttctacttgcagctgcgggccccactcaagacccgagaccgagagttcggccagtgggtgcggctgctctaccgcctgcgcttcctctctgcttctgctgtgcccttcacgcaggagtaagagccccaaggcgtggaagccagacttgaccccaagacctctgaactctggggactctgagtcttccagcatccttcaaggtcaccgaatgaccagagatcaaagtaccttgcctcagggccgggcagatgagatattaaagttaataaaggtcagtccattaagaaccaa

SEQ ID NO: 132862 - DNA, 443 bp, Homo sapiens
  Payload ID: 5959
  Gene Symbol: FAM71E1
  Gene Name: family with sequence similarity 71, member E1
  ENST ID: ENST00000593796
  CDS Start-End: 1-443
cctgccccgacctctgacctctggccccaggtgactcggttgggagaagttgccaacgaggtcaccatgggggtggcagcctccagtccagccctggagctcccggacctattgcttctggccggccctgccaaggagaacggacacctgcaactcttcggctgcgggccccactcaagacccgagaccgagagttcggccagtgggtgcggctgctctaccgcctgcgcttcctctctgcttctgctgtgcccttcacgcaggagtaagagccccaaggcgtggaagccagacttgaccccaagacctctgaactctggggactctgagtcttccagcatccttcaaggtcaccgaatgaccagagatcaaagtaccttgcctcagggccgggcagatgagatattaaagttaataaaggtcagtccattaagaaccaacaa

SEQ ID NO: 132863 - DNA, 1281 bp, Homo sapiens
  Payload ID: 5959
  Gene Symbol: FAM71E1
  Gene Name: family with sequence similarity 71, member E1
  Uniprot ID: Q6IPT2
  ENST ID: ENST00000600100
  CDS Start-End: 366-1109
ctgcgcagcctccttccgtctgtaactcacctaaagacccaagacctgcgacatccgtagaccgcgcccgctatgcacagctaaagagcactcacccctcgcgcaccagtcccggcccggcagccgctgccccgggctcgactgggcgctgctaccgccatcagcaagagcaggagcagccgggttgccccagcgctggctgccgccatctcggcttcttcccaccagcgaagggacggctgtgagccaagagccgcggagcacgccgggaggaacaggccgcatcctgacgcccgtgcgcctgcgctgggccccggcacctgcgcactggcacccgtccgcacctggggcctgacgtcagcaggatggggccgcccctttggcctgatctccaggagccgccccctccagggacgtcatcacaaatcaggagcccgctcttgtgtgacgtcataaagcccgctccgcatcatgacgtcacagtgcgcgtagtcccgccccctcgctttctccctctgctcctccgtccgctcccgtcggacggggacattgcaatgaggcgggatcgcggccctaagccggccctgggtggagctggcgaggtggaaccaggtgggatggcagcctctcccacgggccgtcccagacggctccaacgctacctccagagcggcgaattcgaccagtttcgggacttccccatctttgagagcaacttcgtacagttctgccccgacatctatcctgccccgacctctgacctctggccccaggtgactcggttgggagaagttgccaacgaggtcaccatgggggtggcagcctccagtccagccctggagctcccggacctattgcttctggccggccctgccaaggagaacggacacctgcaactcttcgggctgttccccttgaagttcgtccagctctttgtccacgacaaaagccggtgtcagctcgaggtcaagttgaacaccagccgcaccttctacttgcagctgcgggccccactcaagacccgagaccgagagttcggccagtgggtgcggctgctctaccgcctgcgcttcctctctgcttctgctgtgcccttcacgcaggagtaagagccccaaggcgtggaagccagacttgaccccaagacctctgaactctggggactctgagtcttccagcatccttcaaggtcaccgaatgaccagagatcaaagtaccttgcctcagggccgggcagatgagatattaaagttaataaaggtcagtccattaagaaccaac

SEQ ID NO: 132864 - DNA, 844 bp, Homo sapiens
  Payload ID: 5959
  Gene Symbol: FAM71E1
  Gene Name: family with sequence similarity 71, member E1
  ENST ID: ENST00000599206
  CDS Start-End: 103-609
ataaagcccgctccgcatcatgacgtcacagtgcgcgtagtcccgccccctcgctttctccctctgctcctccgtccgctcccgtcggacggggacattgcaatgaggcgggatcgcggccctaagccggccctgggtggagctggcgaggtggaaccaggtgggatggcagcctctcccacgggccgtcccagacggctccaacgctacctccagagcggcgaattcgaccagtttcgggacttccccatctttgagagcaacttcgtacaggtgactcggttgggagaagttgccaacgaggtcaccatgggggtggcagcctccagtccagccctggagctcccggacctattgcttctggccggccctgccaaggagaacggacacctgcaactcttcgggctgttccccttgaagttcgtccagctctttgtccacgacaaaagccggtgtcagctcgaggtcaagttgaacaccagccgcaccttctacttgcagctgcgggccccactcaagacccgagaccgagagttcggccagtgggtgcggctgctctaccgcctgcgcttcctctctgcttctgctgtgcccttcacgcaggagtaagaggtgctggaggatgtagatggggagggtgatgatgatgaggtggaggcccagagggagtgggaggagccccaaggcgtggaagccagacttgaccccaagacctctgaactctggggactctgagtcttccagcatccttcaaggtcaccgaatgaccagagatcaaagtaccttgcctcagggccgggcagatgagatattaaagttaataaaggtcagtccattaagaacc

SEQ ID NO: 132865 - DNA, 3191 bp, Homo sapiens
  Payload ID: 5960
  Gene Symbol: FAM71E2
  Gene Name: family with sequence similarity 71, member E2
  Uniprot ID: Q8N5Q1
  ENST ID: ENST00000424985
  CDS Start-End: 195-2963
agacccctgctgtccaccctggcagggccatggcggaggcccgagtctcccagcctggggcatctccacgctctgtaacgctgagctccaggcacccgtgaagccccacgggtcaaggctggtgggccggggctgggaggcctgcacgcctgggttctgggtccctaaaccagtacccatccaccacagccaccatgatctggcttcgaaacaggaggtgccttgagccgctccagggcaccccgaagtgggtccctgttctgggggagctgcaaaagaccctccagaagggcgagtacctgcccctccgtccgctgcccatgttcgagagtaactttgttcaggtgacccatcaagggggcccagtgttcgtgaatcacagaaccaaccggctggccatgggcgtggccgcctccctgccaggcctggtgttgcctgacatcttgctgatcggccagcccgccgaggacagggactgctccggcctcgtgctgaccaggatgatccccctggacctcgtccacctctgcgtccatgacctctctgcctggcgcctgaagctgcgcctggtctcgggccgccagtactacctggccctggacgcccctgacaacgaggtgggcttcctgttccactgctgggtccgcctcatcaacctgcttcaggagccggctcccacctggacccccaggaccacgcgcacggcccccctggatatgccgctggccgaagcgcctgcctccacctggcacctgcaggaccagcccatcagcagacatgcagtcagggttgctgagcgcaactttccgcataagacggtggctgctcagagacagaggaaggccaaggcgctcaagcgcagtttcaagtctcaggccgtgggcgactctgtgcccctcatctggtcgcagctggagcatgctgacgtcaggaagaaacctgcagaaaagaagtcccactcagacccccgccccgacagaactcacacccaaatccgcttgcctgagaagaccagcatcaccacctggaccatcttcagcatcatttccagcaccgccaaccagacacagtcctctccaaaggcctgcacatctgcatctgatgaagccacaggccagggacatgtggttgagagcccttcacactgtgtctcagctgacagccctgatggcttctttctgggctcctgcagctccctggacccgtgcctgtggcatcaggacacggaagacctcatggactctgggggcagcactttgtcgtctgctgcctccggtctggctccctatcccccggctgcctgcctctccacaccctactcttccatccccaggggcagggaaaaggccgggcctatgggctcccaccaggggccggggccaccaccctgccagaaggccccatctggccttgtcacatcttgtaaggcaccgttccttgttgaccagtcccagaagctcccagctgtacctgcttcatcgtggaaacccccacctggattggctcctccccagaaggccccagctgcgtcagctcctccccggaaggccccagctgtacctgctccatcccagaaggccccagccgtacctgctccatcccagaaggccccagccatacctgctccatcccggaaggcctcagctgcgtcagcttctccccgaaaggcctcagccgtacctgccccaccccagaagaccccacccccatctcagaaggccccatctgtacctaccattccccagaaggctgtgtcccccactgctccaaagaagaaatctctactcctccctgccccatcccagaaggctctgccaacctcacctaccgaataccagatggcgctgagcccgcctgcctcacgggggaagctccctggcgattttgacgtgttgccaacaggaattcctggaagagccgtgctggagagaagccagtctggagggaaaccggagccggtggtgacggtgcgcacccaggagacagacgtggtggagatgacgactcaggccaagtccccggagtcgcccttcaccgtgaccaagaaggagtccaaggacatcctgattagccaaaccaaggaggtgaccctggaggccttcaggggccaggggaagttggaggactgggcccactgggcgaagcttgaagagaggtccccggacctgcctggcgtgagatccaaggagttggagcagcggaagagatgggtcaaggccaaggaactggccgtcgagggcccctcccaggagcacagcaggcccttctctgtggaagcgctcaccctcaccaagctcatgatcacggccaactccaaagagcagccctcgaaatccgctttggtctcacttccctcctggctcttggcgactccgcaggcgtcggccacgtcaatgatggcttcagtgccctcccgccccggccagctgtccttactggaggggaagccagtggtggtcagagagcagccagagtcgcacacctgggtgaaggagggcaagcggccatggggcgagatgaaggagcagccatggggcgagatgaaggagccaccctgggaccccaaggggccacccaaggtgccctttcgctccaagcccacctctgccagtctgaagagggaaggaatctcccaggcgcctatccccctgaccgcctcaccgtgggaggacttacggccatcgcccctctcggagaccctcatctcaaagatggaggccacagccagggcgtcccagcagcccaagagggtgtcgcaggagcccatgaggatgccagcccagcaccccctggccactgtggggtcgtcttcagaaattcttttgcccatgctcttagaacttgaaactgtgaggaacacggccaccaaggcagaggagatacaggaggaatcgggcgtcttgaaccttctgcccagcctgcagcactcccagcactccgagtggccggatgcgggggcttaacctcagttggaaactgtccagaggagcccagcgctgccaggccccgagggttctgtgcgcaccgactgtaggaagcggaatgttgaaagccgcttggggggatttgccccctctggtagataccagaactatggatatgcctttatatattggggggcgggggggggcgggggcgagcccgtggagccgcccaacttcgcagagattaaagcttgagcctgagactca

SEQ ID NO: 132866 - DNA, 3188 bp, Homo sapiens
  Payload ID: 5960
  Gene Symbol: FAM71E2
  Gene Name: family with sequence similarity 71, member E2
  ENST ID: ENST00000585734
  CDS Start-End: 187-378
gctgtccaccctggcagggccatggcggaggcccgagtctcccagcctggggcatctccacgctctgtaacgctgagctccaggcacccgtgaagccccacgggtcaaggctggtgggccggggctgggaggcctgcacgcctgggttctgggtccctaaaccagtacccatccaccacagccaccatgatctggcttcgaaacaggaggtgccttgagccgctccagggcaccccgaagtgggtccctgttctgggggagctgcaaaagaccctccagaagggtgacccatcaagggggcccagtgttcgtgaatcacagaaccaaccggctggccatgggcgtggccgcctccctgccaggcctggtgttgcctgacatcttgctgatcggccagcccgccgaggacagggactgctccggcctcgtgctgaccaggatgatccccctggacctcgtccacctctgcgtccatgacctctctgcctggcgcctgaagctgcgcctggtctcgggccgccagtactacctggccctggacgcccctgacaacgaggtgggcttcctgttccactgctgggtccgcctcatcaacctgcttcaggagccggctcccacctggacccccaggaccacgcgcacggcccccctggatatgccgctggccgaagcgcctgcctccacctggcacctgcagtcagggttgctgagcgcaactttccgcataagacggtggctgctcagagacagaggaaggccaaggcgctcaagcgcagtttcaagtctcaggccgtgggcgactctgtgcccctcatctggtcgcagctggagcatgctgacgtcaggaagaaacctgcagaaaagaagtcccactcagacccccgccccgacagaactcacacccaaatccgcttgcctggtaagatcaacccaccccaccccttgccacagtgtgtggctctggttcctgccccaaagggctcagacggctcccccatccagagaagaccagcatcaccacctggaccatcttcagcatcatttccagcaccgccaaccagacacagtcctctccaaaggcctgcacatctgcatctgatgaagccacaggccagggacatgtggttgagagcccttcacactgtgtctcagctgacagccctgatggcttctttctgggctcctgcagctccctggacccgtgcctgtggcatcaggacacggaagacctcatggactctgggggcagcactttgtcgtctgctgcctccggtctggctccctatcccccggctgcctgcctctccacaccctactcttccatccccaggggcagggaaaaggccgggcctatgggctcccaccaggggccggggccaccaccctgccagaaggccccatctggccttgtcacatcttgtaaggcaccgttccttgttgaccagtcccagaagctcccagctgtacctgcttcatcgtggaaacccccacctggattggctcctccccagaaggccccagctgcgtcagctcctccccggaaggccccagctgtacctgctccatcccagaaggccccagccgtacctgctccatcccagaaggccccagccatacctgctccatcccggaaggcctcagctgcgtcagcttctccccgaaaggcctcagccgtacctgccccaccccagaagaccccacccccatctcagaaggccccatctgtacctaccattccccagaaggctgtgtcccccactgctccaaagaagaaatctctactcctccctgccccatcccagaaggctctgccaacctcacctaccgaataccagatggcgctgagcccgcctgcctcacgggggaagctccctggcgattttgacgtgttgccaacaggaattcctggaagagccgtgctggagagaagccagtctggagggaaaccggagccggtggtgacggtgcgcacccaggagacagacgtggtggagatgacgactcaggccaagtccccggagtcgcccttcaccgtgaccaagaaggagtccaaggacatcctgattagccaaaccaaggaggtgaccctggaggccttcaggggccaggggaagttggaggactgggcccactgggcgaagcttgaagagaggtccccggacctgcctggcgtgagatccaaggagttggagcagcggaagagatgggtcaaggccaaggaactggccgtcgagggcccctcccaggagcacagcaggcccttctctgtggaagcgctcaccctcaccaagctcatgatcacggccaactccaaagagcagccctcgaaatccgctttggtctcacttccctcctggctcttggcgactccgcaggcgtcggccacgtcaatgatggcttcagtgccctcccgccccggccagctgtccttactggaggggaagccagtggtggtcagagagcagccagagtcgcacacctgggtgaaggagggcaagcggccatggggcgagatgaaggagcagccatggggcgagatgaaggagccaccctgggaccccaaggggccacccaaggtgccctttcgctccaagcccacctctgccagtctgaagagggaaggaatctcccaggcgcctatccccctgaccgcctcaccgtgggaggacttacggccatcgcccctctcggagaccctcatctcaaagatggaggccacagccagggcgtcccagcagcccaagagggtgtcgcaggagcccatgaggatgccagcccagcaccccctggccactgtggggtcgtcttcagaaattcttttgcccatgctcttagaacttgaaactgtgaggaacacggccaccaaggcagaggagatacaggaggaatcgggcgtcttgaaccttctgcccagcctgcagcactcccagcactccgagtggccggatgcgggggcttaacctcagttggaaactgtccagaggagcccagcgctgccaggccccgagggttctgtgcgcaccgactgtaggaagcggaatgttgaaagccgcttggggggatttgccccctctggtagataccagaactatggatatgcctttatatattggggggcgggggggggcgggggcgagcccgtggagccgcccaacttcgcagagattaaagcttgagcctgagactca

SEQ ID NO: 132867 - DNA, 1718 bp, Homo sapiens
  Payload ID: 5961
  Gene Symbol: FAM71F1
  Gene Name: family with sequence similarity 71, member F1
  Uniprot ID: Q96KD3
  ENST ID: ENST00000315184
  CDS Start-End: 54-1088
ggagacagagatcccaggacaaatgtgcagcaggcccctgagcatgtgtagaaatgttgtcatcatttccacatagaaagacttggaggaaatcaaagaagacagtaaaagtcacaagatcctatccaaccttcccttccctgaatgcctgggaagaattcaggggcctcttgcctgtggatggagagccgaaccctggagcgggcctaggtgtggaggagggactgctctgccgggtggttcattctccagaattcaacctgtttcttgactccgtggtgtttgaaagcaacttcatccaggtcaaaaggggcaggaattggagagacgtctacaaagcttccaacaccatggccctgggggtgacctcctcggtaccctgcctgcccctccccaacatcctactcatggccagtgtcaaatggcaccaggggcagaaccagacatggaacagaccatccatagcccccaacatcttcctgaagaggattctcccattgaggtttgtggagctccaggtatgtgaccactatcaacgcatcctgcagttgaggacagtcactgagaagatttattacctaaagctccatcctgaccatcctgagactgtcttccacttctggatccgactggttcaaattctgcaaaaggggctgtccatcaccaccaaagaccctaggattcttgtcacgcactgcctggtacccaagaactgcagcagcccctcaggagattcgaagttagtacagaagaaactccaagcctcccagcccagcgagagtctcattcagctaatgaccaagggggagagtgaagccctgtctcagatttttgccgacttacaccagcagaaccagttgagtttcaggagcagcagaaaggtggagaccaacaagaacagctcagggaaagattcttcccgtgaagacagcatcccttgcacctgtgacctacgttggagggcttcattcacgtacggagagtgggaaagagagaacccctccggcctgcagcccctctcactactcagcactctggcagcctccaccgggccacagctggccccacccataggaaattctatttgagccacccttccgcactggggagaatctatgcaagcctcgtcaacaccactttgcagcattcagctgctgagggattatcgggatggagagtaggagaaaactgcaaccaaggaagaatagagtcatctcacggtgacagcagagcctttccagctgtacataaccacgtcctcgccactgcacctcggcatatgccacctccatgccactgccagagctggcctagcaagatgtgctctcagaatggccgggcccaagagatgaaggaaaggagtgaaagggaagtaggaccagagaagtggaaggaagcaaaatggaggtgatgagaaaggtggtgggagaaagtcagcagatgagagacacaaagagaagtggtaataggaaacggaagagacttggtagacgagataaggaggacaagagaagggacacacccctgagagatgctcaccaagcttctatttatctaatttaaaacttgaaagtaaagccataaacaaaaaaaagaaatgttttcttccctgctcagaccattctggacaaatgtgaactgccagacaccttccatttccctttctatctgtttttcttgctagttcctgtcttctgattaaagcttcattccttctt

SEQ ID NO: 132868 - DNA, 404 bp, Homo sapiens
  Payload ID: 5961
  Gene Symbol: FAM71F1
  Gene Name: family with sequence similarity 71, member F1
  ENST ID: ENST00000466842
  CDS Start-End: 1-404
aggattctcccattgaggtttgtggagctccaggtatgtgaccactatcaacgcatcctgcagttgaggacagtcactgagaagatttattacctaaagctccatcctgaccatcctgagactgtcttccacttctggatccgactggttcaaattctgcaaaaggggctgtccatcaccaccaaagaccctaggattcttgtcacgcactgcctggtacccaagaactgcagcagcccctcaggagattcgaagttagtacagaagaaactccaagcctcccagcccagcgagagtctcattcagctaatgaccaagggggagagtgaagccctgtctcagatttttgccgacttacaccagcagaaccagttgagtttcaggagcagcagaaaggtggagac

SEQ ID NO: 132869 - DNA, 1574 bp, Homo sapiens
  Payload ID: 5961
  Gene Symbol: FAM71F1
  Gene Name: family with sequence similarity 71, member F1
  Uniprot ID: Q96KD3
  ENST ID: ENST00000485070
  CDS Start-End: 345-1076
cttttcccccttctcaccggccaggatgcagacataatgatggcaggagctggagcagccacctgaggacccagagctcaaagccacatgttgagaagggcagagataactgtatccactctggactgctgacctttgaactattatgttatttccagggaaatgcaaaccaaaggatgtggtctctgatctaatccttagagaatgtgaccatgaagacacttttcctacctggtaaacaaaagataatgagaaaagtgaggttggaagttggtttactgagccaggagctataacaggtgctggagcaggggtgtgatctgaatgaccagagggaaggactgatggaattggatggtcaaaaggggcaggaattggagagacgtctacaaagcttccaacaccatggccctgggggtgacctcctcggtaccctgcctgcccctccccaacatcctactcatggccagtgtcaaatggcaccaggggcagaaccagacatggaacagaccatccatagcccccaacatcttcctgaagagttgaggacagtcactgagaagatttattacctaaagctccatcctgaccatcctgagactgtcttccacttctggatccgactggttcaaattctgcaaaaggggctgtccatcaccaccaaagaccctaggattcttgtcacgcactgcctggtacccaagaactgcagcagcccctcaggagattcgaagttagtacagaagaaactccaagcctcccagcccagcgagagtctcattcagctaatgaccaagggggagagtgaagccctgtctcagatttttgccgacttacaccagcagaaccagttgaggagcagcagaaaggtggagaccaacaagaacagctcagggaaagattcttcccgtgaagacagcatcccttgcacctgtgacctacgttggagggcttcattcacgtacggagagtgggaaagagagaacccctccggcctgcagcccctctcactactcagcactctggcagcctccaccgggccacagctggccccacccataggaaattctatttgagccacccttccgcactggggagaatctatgcaagcctcgtcaacaccactttgcagcattcagctgctgagggattatcgggatggagagtaggagaaaactgcaaccaaggaagaatagagtcatctcacggtgacagcagagcctttccagctgtacataaccacgtcctcgccactgcacctcggcatatgccacctccatgccactgccagagctggcctagcaagatgtgctctcagaatggccgggcccaagagatgaaggaaaggagtgaaagggaagtaggaccagagaagtggaaggaagcaaaatggaggtgatgagaaaggtggtgggagaaagtcagcagatgagagacacaaagagaagtggtaataggaaacggaagagacttggtagacgagataaggaggacaagagaagggacacacccctgagagatgctcaccaagcttctatttatctaatttaaaacttgaaagtaaagccataaac

SEQ ID NO: 132870 - DNA, 1818 bp, Homo sapiens
  Payload ID: 5961
  Gene Symbol: FAM71F1
  Gene Name: family with sequence similarity 71, member F1
  ENST ID: ENST00000484425
  CDS Start-End: 405-836
caccggccaggatgcagacataatgatggcaggagctggagcagccacctgaggacccagagctcaaagccacatgttgagaagggcagagataactgtatccactctggactgctgacctttgaactattatgttatttccagggaaatgcaaaccaaaggatgtggtctctgatctaatccttagagaatgtgaccatgaagacacttttcctacctggtaaacaaaagataatgagaaaagtgaggttggaagttggtttactgagccaggagctataacaggtcaaaaggggcaggaattggagagacgtctacaaagcttccaacaccatggccctgggggtgacctcctcggtaccctgcctgcccctccccaacatcctactcatggccagtgtcaaatggcaccaggggcagaaccagacatggaacagaccatccatagcccccaacatcttcctgaagagttgaggacagtcactgagaagatttattacctaaagctccatcctgaccatcctgagactgtcttccacttctggatccgactggttcaaattctgcaaaaggggctgtccatcaccaccaaagaccctaggattcttgtcacgcactgcctggtacccaagaactgcagcagcccctcaggagattcgaagttagtacagaagaaactccaagcctcccagcccagcgagagtctcattcagctaatgaccaagggggagagtgaagccctgtctcagatttttgccgacttacaccagcagaaccagttgaggaaccagttggaccagcagttcagaggcagaacaaattccctttctttctgagcactggtaataaactgaaaaccagtacagcttggaggaggcaagcgcttatagcaacgaagagctcgcaaagacatgggcccaagtcattgctctgactgcacccttgagcatatcgaaacctgggggctcagtcttcagatctgtaaaatggaaatgaaaatagtgccaacgccatccagatgtcaggatccaatgagctcatatgcaccaagcacttagaatgctactcagcagatttagaggcaaattgagcagcagaaaggtggagaccaacaagaacagctcagggaaagattcttcccgtgaagacagcatcccttgcacctgtgacctacgttggagggcttcattcacgtacggagagtgggaaagagagaacccctccggcctgcagcccctctcactactcagcactctggcagcctccaccgggccacagctggccccacccataggaaattctatttgagccacccttccgcactggggagaatctatgcaagcctcgtcaacaccactttgcagcattcagctgctgagggattatcgggatggagagtaggagaaaactgcaaccaaggaagaatagagtcatctcacggtgacagcagagcctttccagctgtacataaccacgtcctcgccactgcacctcggcatatgccacctccatgccactgccagagctggcctagcaagatgtgctctcagaatggccgggcccaagagatgaaggaaaggagtgaaagggaagtaggaccagagaagtggaaggaagcaaaatggaggtgatgagaaaggtggtgggagaaagtcagcagatgagagacacaaagagaagtggtaataggaaacggaagagacttggtagacgagataaggaggacaagagaagggacacacccctgagagatgctcaccaagcttctatttatctaatttaaaacttgaaagtaaagccataaacaaaaaaaagaaa

SEQ ID NO: 132871 - DNA, 1201 bp, Homo sapiens
  Payload ID: 5961
  Gene Symbol: FAM71F1
  Gene Name: family with sequence similarity 71, member F1
  ENST ID: ENST00000471558
  CDS Start-End: 54-914
ggagacagagatcccaggacaaatgtgcagcaggcccctgagcatgtgtagaaatgttgtcatcatttccacatagaaagacttggaggaaatcaaagaagacagtaaaagtcacaagatcctatccaaccttcccttccctgaatgcctgggaagaattcaggggcctcttgcctgtggatggagagccgaaccctggagcgggcctaggtgtggaggagggactgctctgccgggtggttcattctccagaattcaacctgtttcttgactccgtggtgtttgaaagcaacttcatccaggtcaaaaggggcaggaattggagagacgtctacaaagcttccaacaccatggccctgggggtgacctcctcggtaccctgcctgcccctccccaacatcctactcatggccagtgtcaaatggcaccaggggcagaaccagacatggaacagaccatccatagcccccaacatcttcctgaagaggattctcccattgaggtttgtggagctccaggtatgtgaccactatcaacgcatcctgcagttgaggacagtcactgagaagatttattacctaaagctccatcctgaccatcctgagactgtcttccacttctggatccgactggttcaaattctgcaaaaggggctgtccatcaccaccaaagaccctaggattcttgtcacgcactgcctggtacccaagaactgcagcagcccctcaggagattcgaagttagtacagaagaaactccaagcctcccagcccagcgagagtctcattcagctaatgaccaagggggagagtgaagccctgtctcagatttttgccgacttacaccagcagaaccagttgaggaaccagttggaccagcagttcagaggcagaacaaattccctttctttctgagcactggtaataaactgaaaaccagtacagcttggaggaggcaagcgcttatagcaacgaagagctcgcaaagacatgggcccaagtcattgctctgactgcacccttgagcatatcgaaacctgggggctcagtcttcagatctgtaaaatggaaatgaaaatagtgccaacgccatccagatgtcaggatccaatgagctcatatgcaccaagcacttagaatgctactcagcagatttagaggcaaattgagcagcagaaaggtggagaccaacaagaacagct

SEQ ID NO: 132872 - DNA, 1591 bp, Homo sapiens
  Payload ID: 5961
  Gene Symbol: FAM71F1
  Gene Name: family with sequence similarity 71, member F1
  Uniprot ID: Q96KD3
  ENST ID: ENST00000621392
  CDS Start-End: 230-961
ctacgcttttgtgctgtgtgttccctttctaggttatttccagggaaatgcaaaccaaaggatgtggtctctgatctaatccttagagaatgtgaccatgaagacacttttcctacctggtaaacaaaagataatgagaaaagtgaggttggaagttggtttactgagccaggagctataacaggtgctggagcaggggtgtgatctgaatgaccagagggaaggactgatggaattggatggtcaaaaggggcaggaattggagagacgtctacaaagcttccaacaccatggccctgggggtgacctcctcggtaccctgcctgcccctccccaacatcctactcatggccagtgtcaaatggcaccaggggcagaaccagacatggaacagaccatccatagcccccaacatcttcctgaagagttgaggacagtcactgagaagatttattacctaaagctccatcctgaccatcctgagactgtcttccacttctggatccgactggttcaaattctgcaaaaggggctgtccatcaccaccaaagaccctaggattcttgtcacgcactgcctggtacccaagaactgcagcagcccctcaggagattcgaagttagtacagaagaaactccaagcctcccagcccagcgagagtctcattcagctaatgaccaagggggagagtgaagccctgtctcagatttttgccgacttacaccagcagaaccagttgaggagcagcagaaaggtggagaccaacaagaacagctcagggaaagattcttcccgtgaagacagcatcccttgcacctgtgacctacgttggagggcttcattcacgtacggagagtgggaaagagagaacccctccggcctgcagcccctctcactactcagcactctggcagcctccaccgggccacagctggccccacccataggaaattctatttgagccacccttccgcactggggagaatctatgcaagcctcgtcaacaccactttgcagcattcagctgctgagggattatcgggatggagagtaggagaaaactgcaaccaaggaagaatagagtcatctcacggtgacagcagagcctttccagctgtacataaccacgtcctcgccactgcacctcggcatatgccacctccatgccactgccagagctggcctagcaagatgtgctctcagaatggccgggcccaagagatgaaggaaaggagtgaaagggaagtaggaccagagaagtggaaggaagcaaaatggaggtgatgagaaaggtggtgggagaaagtcagcagatgagagacacaaagagaagtggtaataggaaacggaagagacttggtagacgagataaggaggacaagagaagggacacacccctgagagatgctcaccaagcttctatttatctaatttaaaacttgaaagtaaagccataaacaaaaaaaagaaatgttttcttccctgctcagaccattctggacaaatgtgaactgccagacaccttccatttccctttctatctgtttttcttgctagttcctgtcttctgattaaagcttcattccttctt

SEQ ID NO: 132873 - DNA, 1582 bp, Homo sapiens
  Payload ID: 5962
  Gene Symbol: FAM71F2
  Gene Name: family with sequence similarity 71, member F2
  Uniprot ID: Q6NXP2
  ENST ID: ENST00000434001
  CDS Start-End: 106-1008
ggaaatgctggggaggtgggggcagatcacatcaacatcctggcattgggctgggtcggcgtggagccccagaaatgttcccaagcccattcttaccaagaaccaatgagtaaaatcaggggcctcccacctgaggtcagggaaccaggccctggagtggaacttggggtggaaaatggccttctttgtcaactgattcattctccagaattcaatttgttctccaactcggtggtgtttgaaagcaactttatccaggtcactaagcccgggaactggagagatgtctgtgaagggtctgccaccgtgatcctcggggtcacctcctcggtgccctccctgccactccccaatgtcctcctgatggccaatgttacctggccccagggtccatttaccacctggagcacacctggtgacgccccagtcatcaacctcagcaggcttctccccctgaagtacgtggagctacgaatctacgaccggctccagcgcatcctgagggttaggacagtgaccgaaaagatctactatctgaagctccacgaaaaacacccagagattgtgtttcaattctgggtccgcttggtgaaaattctgcagaaaggcctgtccatcaccaccaaagacccgagaatcaaattcactcactgcctggtgcccaagatgcccaccaactccacagaaacaacacctgaaaacagcctcctgtcatccccccagcccagcgagcccctcgtgctgctggcggctgagcagaccagtggcagtttctcacagctctcaggaaagccccagctcacagcagacaggaacaatgacactgccattgaaatagacaactgcagcagctacaagataccctctccagtggcatctccaatcaatttgaatatacccatgagagctgccttgagccacagcctctgggaacaagaggactggaatgagcaccttctacaagttcatatagccagttacctaggagagcacttcttgggagcctgacacctaggcaaaacatgctcttccttgcatacgtgtacttgctaccacctcttataatgctccttttccactgtgagccaagtgaccttgggagaggtaagatggtgtttccaacaaggtgcttctctacttccaccaataaacttccaagctgtacaggaagcatgactggggaggcctcaggaaacttacaatcaaggcagaaggcaaaagagaagcagacctgtcctacgagtctggagcaggagaaagaaagaagtgggaggtgctatgcacttttaaacaaccaaatctcgtgagaactcactatcatgagaacagcaaggaggaaatccacccccatgatccaatcacctcccaccaggcacctcctccaacactggggattaaattcaacatgagatttgggcagggagacagatccaaatcatatatcagtctgctcagttgaaaccacacaatagccaagcaaagccaagaaagccagtccaaggctggcttggaaagggcctctgaggagaaatcaactttcaaaggggcagggggaaatagaggttgagctactgcaagccca

SEQ ID NO: 132874 - DNA, 1529 bp, Homo sapiens
  Payload ID: 5962
  Gene Symbol: FAM71F2
  Gene Name: family with sequence similarity 71, member F2
  Uniprot ID: Q6NXP2
  ENST ID: ENST00000474069
  CDS Start-End: 107-1009
aggaaatgctggggaggtgggggcagatcacatcaacatcctggcattgggctgggtcggcgtggagccccagaaatgttcccaagcccattcttaccaagaaccaatgagtaaaatcaggggcctcccacctgaggtcagggaaccaggccctggagtggaacttggggtggaaaatggccttctttgtcaactgattcattctccagaattcaatttgttctccaactcggtggtgtttgaaagcaactttatccaggtcactaagcccgggaactggagagatgtctgtgaagggtctgccaccgtgatcctcggggtcacctcctcggtgccctccctgccactccccaatgtcctcctgatggccaatgttacctggccccagggtccatttaccacctggagcacacctggtgacgccccagtcatcaacctcagcaggcttctccccctgaagtacgtggagctacgaatctacgaccggctccagcgcatcctgagggttaggacagtgaccgaaaagatctactatctgaagctccacgaaaaacacccagagattgtgtttcaattctgggtccgcttggtgaaaattctgcagaaaggcctgtccatcaccaccaaagacccgagaatcaaattcactcactgcctggtgcccaagatgcccaccaactccacagaaacaacacctgaaaacagcctcctgtcatccccccagcccagcgagcccctcgtgctgctggcggctgagcagaccagtggcagtttctcacagctctcaggaaagccccagctcacagcagacaggaacaatgacactgccattgaaatagacaactgcagcagctacaagataccctctccagtggcatctccaatcaatttgaatatacccatgagagctgccttgagccacagcctctgggaacaagaggactggaatgagcaccttctacaagttcatatagccagttacctaggagagcacttcttgggagcctgacacctaggcaaaacatgctcttccttgcatacgtgtacttgctaccacctcttataatgctccttttccactgtgagccaagtgaccttgggagaggctgtacaggaagcatgactggggaggcctcaggaaacttacaatcaaggcagaaggcaaaagagaagcagacctgtcctacgagtctggagcaggagaaagaaagaagtgggaggtgctatgcacttttaaacaaccaaatctcgtgagaactcactatcatgagaacagcaaggaggaaatccacccccatgatccaatcacctcccaccaggcacctcctccaacactggggattaaattcaacatgagatttgggcagggagacagatccaaatcatatatcagtctgctcagttgaaaccacacaatagccaagcaaagccaagaaagccagtccaaggctggcttggaaagggcctctgaggagaaatcaactttcaaaggggcagggggaaatagaggttgagctactgcaagccca

SEQ ID NO: 132875 - DNA, 754 bp, Homo sapiens
  Payload ID: 5962
  Gene Symbol: FAM71F2
  Gene Name: family with sequence similarity 71, member F2
  ENST ID: ENST00000477515
  CDS Start-End: 100-609
gctggggaggtgggggcagatcacatcaacatcctggcattgggctgggtcggcgtggagccccagaaatgttcccaagcccattcttaccaagaaccaatgagtaaaatcaggggcctcccacctgaggtcagggaaccaggccctggagtggaacttggggtggaaaatggccttctttgtcaactgattcattctccagaattcaatttgttctccaactcggtggtgtttgaaagcaactttatccagacccatgtacctgaggctgatttccaggtcactaagcccgggaactggagagatgtctgtgaagggtctgccaccgtgatcctcggggtcacctcctcggtgccctccctgccactccccaatgtcctcctgatggccaatgttacctggccccagggtccatttaccacctggagcacacctggtgacgccccagtcatcaacctcagcagcctgaaaacagcctcctgtcatccccccagcccagcgagcccctcgtgctgctggcggctgagcagaccagtggcagtttctcacagctctcaggaaagccccagctcacagcagacaggaacaatgacactgccattgaaatagacaactgcagcagctacaagataccctctccagtggcatctccaatcaatttgaatatacccatgagagctgccttgagccacagcctctgggaacaagaggactggaatgagcaccttctacaagttcatatagccagttacct

SEQ ID NO: 132876 - DNA, 5749 bp, Homo sapiens
  Payload ID: 5962
  Gene Symbol: FAM71F2
  Gene Name:: family with sequence similarity 71, member F2
  Uniprot ID: Q6NXP2
  ENST ID: ENST00000480462
  CDS Start-End: 107-1036
aggaaatgctggggaggtgggggcagatcacatcaacatcctggcattgggctgggtcggcgtggagccccagaaatgttcccaagcccattcttaccaagaaccaatgagtaaaatcaggggcctcccacctgaggtcagggaaccaggccctggagtggaacttggggtggaaaatggccttctttgtcaactgattcattctccagaattcaatttgttctccaactcggtggtgtttgaaagcaactttatccagacccatgtacctgaggctgatttccaggtcactaagcccgggaactggagagatgtctgtgaagggtctgccaccgtgatcctcggggtcacctcctcggtgccctccctgccactccccaatgtcctcctgatggccaatgttacctggccccagggtccatttaccacctggagcacacctggtgacgccccagtcatcaacctcagcaggcttctccccctgaagtacgtggagctacgaatctacgaccggctccagcgcatcctgagggttaggacagtgaccgaaaagatctactatctgaagctccacgaaaaacacccagagattgtgtttcaattctgggtccgcttggtgaaaattctgcagaaaggcctgtccatcaccaccaaagacccgagaatcaaattcactcactgcctggtgcccaagatgcccaccaactccacagaaacaacacctgaaaacagcctcctgtcatccccccagcccagcgagcccctcgtgctgctggcggctgagcagaccagtggcagtttctcacagctctcaggaaagccccagctcacagcagacaggaacaatgacactgccattgaaatagacaactgcagcagctacaagataccctctccagtggcatctccaatcaatttgaatatacccatgagagctgccttgagccacagcctctgggaacaagaggactggaatgagcaccttctacaagttcatatagccagttacctaggagagcacttcttgggagcctgacacctaggcaaaacatgctcttccttgcatacgtgtacttgctaccacctcttataatgctccttttccactgtgagccaagtgaccttgggagaggtaagatggtgtttccaacaaggtgcttctctacttccaccaataaacttccaagtgagtccctaatttttgcaggttgggctatagggaggctccagtttgggaaaggactgactgagaacaggagcagtttttggaaaaataggtgggaaaagttactgtctgtgtgtacagagaactacctgagactgggtaattttatttatttatttatttatttatttatttattttggagatagagtcttgctctgtctccaggctggagtacagtggtgcgatcatggctcactgcaacctccacctcctgggttcaagcaattctccagcctcagcctcccaagtagctgggactacaggcacacactacacctggctaagtttttatattttagtagagatggggtttcaccacgttgcccaggctggtctccagctcctgagctcaggccatccagtcacattggcctctcaaagggttaggattacaggcgtgagccaccaggcccagcctcgagtctgggtaatttataaagaaaagaggtttaattggctcatggttccccaggctgtacaggaagcatgactggggaggcctcaggaaacttacaatcaaggcagaaggcaaaagagaagcagacctgtcctacgagtctggagcaggagaaagaaagaagtgggaggtgctatgcacttttaaacaaccaaatctcgtgagaactcactatcatgagaacagcaaggaggaaatccacccccatgatccaatcacctcccaccaggcacctcctccaacactggggattaaattcaacatgagatttgggcagggagacagatccaaatcatatatcagtctgctcagttgaaaccacacaatagccaagcaaagccaagaaagccagtccaaggctggcttggaaagggcctctgaggagaaatcaactttcaaaggggcagggggaaatagaggttgagctactgcaagcccaaaataaaagaaatcctgagaaggatggtaaccagctggaagattcctttgtgttgctccactatatcaagcaagaaattgagtctttggctgggcgcggtggctcttgcctgtaatcccagcactttgggaggctaaggtgtgcagatcacttgaggtcaggacttcgagaccagcctggccaacatggcaaagccctgtctctacccaaaatacaaaaattagctggatgtggtggtgcacacctgtagtcccagctactcaggaggttgaggcaggagaattgcttgaaccaggaggcagagcttgcagtgagctgggatcatgccactgtgctccagcctgggtgacagagccagactccatctcaaaaaaaaaaaaaaaaaaaaaaagaataaattaggtcttcattgccctgtgttagtgtaaagctatgaaggctcccctggctcatacaacatttcattgctaatgaaaacatggtgaggaagatattgactgcccatcaccagaaattctgattaatttgactgtttcttacccagaacctaatgaaagtgaactggaagacatggcatctttgagtattgggaatggggtaggagctttggccaacctttatacacatagggaatacttacaaggaaaataccatgactcctttttttttttttttgagacagtcttgttctgttgcctaggctggagtgcagtggtgtgatctcagctcactgcaacctccacctctcaggttcaagcgattcttgtgcctcagcctcccaagtagctgggattacaggtgtgaaccaccagtccggctaatttttgtatttttagcagacacagggtttctccatgttggccaggctggttttgatctcctgacctcaggttatccaccctcctcggcctcccaaagtgctgggattacaggcatgagccaccacgcccagccccaccacgcccactccaatatttaataagtatttgtcaggctcctgctaggtgctagacactgcgtttgacgctaagtatattggagagaacaagacagacggacaagttacctgccttgagggagggtctgggagagatgccaagtcctattttggagacatagtgaagccattaatgttgacctgatgtctgagccacccagtctgcaaatgaaagctggaggccctgctttccagcatgtgtggttcacatcctatgtggtgcagaaagaaagaacatggttgccctcctcttgtgcatgctcagttgggctgagcagtcaaatctggctgaattgagtcagaaaagacatctgagttaagaggatgcctgatgcttgttggttttgtcttgcctccagtaaaattaaaaacaagtttcctttcagtatgttacaatcaaataagctgagcattgttggtgctggtgagggacatctagaagctgaacttagaaaagactaatgtgcagggtgattgtacttccaaatgcatgcctgttgtcctggtatcattattaatacatacccatttcactctgagaagtgtccctcagtgaatcacaaatcatgtggccatcctatctatatggcatacttataaacattgaaaggcttgtcatccccacttctttgtcttggtttaagccttcatcagccctcacctagactattgtattaatagtaaccccaggccaggcatggtggctcaggcctgtaatcccagcactttgggaggctgaggcgggcagatcacgaggtcagaagtttgagaccagcctggccaatatggtgaaaccccatctctactaaaaatacaaaaattagctgggcatggtggcgcacacctgtagtcccagctactcgggaggctgagacagaagaatctcttgaacctgggaggtggaggttacagtgagcagagatggcgccaccgcactccagcctgggcgacagagccagattccgtctcaaaataaaataaagtaaaatagtaaccccaattggtctcccagactttatcatcatcatcatcataatagctaacatctttagaaatttgctatcttctaagcactatgctgactttacaaagatcacataaaccacaccacaagccattgagaagtagatcttattattacattttataaatgataaaccggagccacagagaggttcaagaacttgcttaaggtcacacaggtagtaagtagcagagccaggacttgaagccagtctgtctaactccaaaatccaaattactcttgatgcctctccaatgtcttcccaactcattcccttttcatacctctaacagagcaactttttgacacataaatctgacagaaaggaccaggcacggtggctcatacctgtaatcccagcactttggaaggccaaggtgggcagatcacttgaagtcagaagtttgagaccagcctggccaacatggtgaaaccctgtctctactaaaaatgtgaaaattagccaggtgtggtggtgcgcgtctgtagtcccagctactcaggaggctgaggcaggagaatctcttgaactggggaggcagaggttgcagtgagccgagatcactccactgcgctctagcctgggcaacagagcaagattccatctcaaaaaaaaaaaaaatatatctgactgagtttcctccttaataaaaccagaccctttgacatgaaatgactagacccctgcctctctctccagcctctccactggccactgctgccatagaatcttatgctcccaccatgccaaatttcttgtggttccctaaatgcgccatgtttgaagatactttgaggacattgtatatacttttgttctacctgagatacatttgcttactttctccacatattgccctcatgacacttatccttattgatggatttcttcaatgctactattgtgccttacatgtgccttgtattatagcatttttatagcatttctcacccaattgtggctatttgtttacatgtctgtctccttggtggaactgtgaactctgtcataacagatgccattttatgtcagttagacttctttggttgccagtaagagaagctgactctaatctaaaccaaaaggaattcattggacggatgtgggttggctcacaaaatcaaagggacaactgcggagccgatcttggaatgctctgacaccagaacagctctgtgaattcagataggggtagtgaattgaccatttcatcaaatgctgcagcaagctaggtggtttccccaaaggaaattgaggagtgttacaagaagaccattaggggaacggttatctggtggctgataataacaaatttccatggcagtctctttgctctctgttggaagaggtactccaccatgggccttgagcatctctacacatccttgctaagcgtgtcaaatttcaagtcctaactgtcctctgtctctggaggaggagacaggtttggttactgtttgttgtaaaaattactgagcccttcaccatgggtgcctcagctgtatgcaaagccccttgtattgctgggggacagagcaactggtactgccatgctggtgctctggctgtttgctgttggcaataaactattctgttttggttca

SEQ ID NO: 132877 - DNA, 1774 bp, Homo sapiens
  Payload ID: 5963
  Gene Symbol: FAM72A
  Gene Name: family with sequence similarity 72, member A
  Uniprot ID: Q5TYM5
  ENST ID: ENST00000341209
  CDS Start-End: 422-751
ggaagggatgtcttaaaagaggagaagctttaaattagacgatcggagaaggctgagggaattgctatgaaggggcgggagctgaagtgtagaggactcctttagacagcagaaagggaaagccgttgagaagttcccttcaaactccacctgcctcctctccaattcaaactccactcccttctccaaaagttaaaaggaaagccaagtttgccacgctcccctgttcctactcaataaatacttcttctactccgccaccgggaaaacagaaaaaaaaactaatttccttcccaatattaggacttagaaaagctctaggtcccgcaatttgaattttagcctaggggaatcaaaatagtaggagcattactcttgtttcctttttcaaaatcccacacctcatccttcctgcgacgccatgtctaccaacatttgtagtttcaaggacagcgcagtggacttcactggaagatgctatttcaccaaaatctgcaaatgtaaactgaaggacatcgcatgtttaaaatgtgggaacattgtaggttatcatgtgattgttccatgtagttcctgtcttctttcctgcaacaacggacacttctggatgtttcacagccaggcagtttatgatattaacagactagactccacaggtgtaaacgtcctactttggggcaacttgccagagatagaagagagtacagatgaagatgtgttaaatatctcagcagaggagtgtattagataaatggaattatgatatatatgatatacaaacttttttctatttaaaaatatattaatggatcaactttaaaattgttagttgccagtgatcttttttggaaaacaaaaatggggcatttgttgatttatttattttccgtctctaattagttacctcagtttgattgaagccagtgaagttgtgcttttcctctacttctacttcctctccccgacctttttctgcccagtgtaggtgtattcttaaattcagacaggggaagattctttcacatatcactcagttacctcccaatctgggggagtttttcttacaacttgataccagataccattaattttacattcctgaataaaggcctagtacccacgcatatttcaaccatgcatatatcaagttcaaccgagttttaataggggattaaaaaaacaagctgttaggtttccatgggcactggttctcataggttctattggtgataactgctttaacatggagcaagagtttgtgaatcaggaaatagaataaattaaaatttaaaatatatagaggaatcctcttgattgctcagcatgatgttagataaatgagtttgtcagaaaatatcagtatacgctgtttaccaatgttatttatttacattcttctaaagccattatggatattgtattatgagagctaaacctaaataagttatcctgttccctaggaccttctctgtaaatagtgaattttagacgagtagtctgtcctaaatcttaaatagaaaaaaaactaaagcgatttgcttaagccattgtacattataaagagctgttttgttttgctttgctttgctttgttttgtttttttaaagctgcattcagagccacaaaggaataggaaagtagggtagtgttggattctggttttatgtaactctaaaataaatgtatctctttaatatctcagttgtagggattttgtcaataccaaagcagactgagttgtggttttgtaaataaagttttttctaaaaatga

SEQ ID NO: 132878 - DNA, 2398 bp, Homo sapiens
  Payload ID: 5963
  Gene Symbol: FAM72A
  Gene Name: family with sequence similarity 72, member A
  Uniprot ID: Q5TYM5
  ENST ID: ENST00000367128
  CDS Start-End: 849-1298
ggcaggaaaagcggaagagggagcgaaaaccaacgtgttcggtgacagaccccagcgccgactgagcctctaaagcgacttcagctctgccccaccaacaccaccgcgcgcccgggaacagccgctccgggaagaaacctgaggggactgcggggggcacgagggacagctgagggaagggaggacgcgagagaaacagcgcgagcacgctgagggccgggggttgccaggagaggggcccgcggacccgcagagcggaggaaggtccgggagaaaaggggcgggacggaggagaatccgggatcgcctggcagaaaaagagaagggagtttctgaatcctgggaagaggaggcgtgggtagggacgcttagcccgagatccgacagcagggaaccggagcgctccgggggaggggcttaatgctggggaagggatgtcttaaaagaggagaagctttaaattagacgatcggagaaggctgagggaattgctatgaaggggcgggagctgaagtgtagaggactcctttagacagcagaaagggaaagccgttgagaagttcccttcaaactccacctgcctcctctccaattcaaactccactcccttctccaaaagttaaaaggaaagccaagtttgccacgctcccctgttcctactcaataaatacttcttctactccgccaccgggaaaacagaaaaaaaaactaatttccttcccaatattaggacttagaaaagctctaggtcccgcaatttgaattttagcctaggggaatcaaaatagtaggagcattactcttgtttcctttttcaaaatcccacacctcatccttcctgcgacgccatgtctaccaacatttgtagtttcaaggacaggtgcgtgtccatcctgtgttgcaaattctgtaaacaagtgctcagctctaggggaatgaaggctgttttgctggctgatactgaaatagaccttttctctacagacatccctcctaccaacgcagtggacttcactggaagatgctatttcaccaaaatctgcaaatgtaaactgaaggacatcgcatgtttaaaatgtgggaacattgtaggttatcatgtgattgttccatgtagttcctgtcttctttcctgcaacaacggacacttctggatgtttcacagccaggcagtttatgatattaacagactagactccacaggtgtaaacgtcctactttggggcaacttgccagagatagaagagagtacagatgaagatgtgttaaatatctcagcagaggagtgtattagataaatggaattatgatatatatgatatacaaacttttttctatttaaaaatatattaatggatcaactttaaaattgttagttgccagtgatcttttttggaaaacaaaaatggggcatttgttgatttatttattttccgtctctaattagttacctcagtttgattgaagccagtgaagttgtgcttttcctctacttctacttcctctccccgacctttttctgcccagtgtaggtgtattcttaaattcagacaggggaagattctttcacatatcactcagttacctcccaatctgggggagtttttcttacaacttgataccagataccattaattttacattcctgaataaaggcctagtacccacgcatatttcaaccatgcatatatcaagttcaaccgagttttaataggggattaaaaaaacaagctgttaggtttccatgggcactggttctcataggttctattggtgataactgctttaacatggagcaagagtttgtgaatcaggaaatagaataaattaaaatttaaaatatatagaggaatcctcttgattgctcagcatgatgttagataaatgagtttgtcagaaaatatcagtatacgctgtttaccaatgttatttatttacattcttctaaagccattatggatattgtattatgagagctaaacctaaataagttatcctgttccctaggaccttctctgtaaatagtgaattttagacgagtagtctgtcctaaatcttaaatagaaaaaaaactaaagcgatttgcttaagccattgtacattataaagagctgttttgttttgctttgctttgctttgttttgtttttttaaagctgcattcagagccacaaaggaataggaaagtagggtagtgttggattctggttttatgtaactctaaaataaatgtatctctttaatatctcagttgtagggattttgtcaataccaaagcagactgagttgtggttttgtaaataaagttttttctaaaaatgaccattcttcctttaattttttgttatgcccacatattgtatgtaaaaatataaataaatagtacttaaagtatagaa

SEQ ID NO: 132879 - DNA, 676 bp, Homo sapiens
  Payload ID: 5963
  Gene Symbol: FAM72A
  Gene Name: family with sequence similarity 72, member A
  ENST ID: ENST00000367129
  CDS Start-End: 71-520
ctaggctgggacccgggctgtccgccagggctgggagacactggaggaggccggccgatgattacgcgcgatgccaacgacgactgccctacggtggaccgcggctgcccgtgtgcggaggaaagggagaggcggctgggtgccggctgcgctgcggtccgtgagccaggacggagtcccaggctgtacagtgatgggcggagagactcgcagtcctgagaacgcagtggacttcactggaagatgctatttcaccaaaatctgcaaatgtaaactgaaggacatcgcatgtttaaaatgtgggaacattgtaggttatcatgtgattgttccatgtagttcctgtcttctttcctgcaacaacggacacttctggatgtttcacagccaggcagtttatgatattaacagactagactccacaggtgtaaacgtcctactttggggcaacttgccagagatagaagagagtacagatgaagatgtgttaaatatctcagcagaggagtgtattagataaatggaattatgatatatatgatatacaaacttttttctatttaaaaatatattaatggatcaactttaaaattgttagttgccagtgatcttttttggaaaacaaaaatggggcatttgttgatttatttattttccgtctctaattagttacctc

SEQ ID NO: 132880 - DNA, 740 bp, Homo sapiens
  Payload ID: 5963
  Gene Symbol: FAM72A
  Gene Name: family with sequence similarity 72, member A
  ENST ID: ENST00000431655
  CDS Start-End: 380-740
agaccccagcgccgactgagcctctaaagcgacttcagctctgccccaccaacaccaccgcgcgcccgggaacagccgctccgggaagaaacctgaggggactgcggggggcacgagggacagctgagggaagggaggacgcgagagaaacagcgcgagcacgctgagggccgggggttgccaggagaggggcccgcggacccgcagagcggaggaaggtccgggagaaaaggggcgggacggaggagaatccgggatcgcctggcagaaaaagagaagggagtttctgaatcctgggaagaggaggcgtggtttcaaggacaggtgcgtgtccatcctgtgttgcaaattctgtaaacaagtgctcagctctaggggaatgaaggctgttttgctggctgatactgaaatagaccttttctctacagacatccctcctaccaacgcagtggacttcactggaagatgctatttcaccaaaatctgcaaatgtaaactgaaggacatcgcatgtttaaaatgtgggaacattgtaggttatcatgtgattgttccatgtagttcctgtcttctttcctgcaacaacggacacttctggatgtttcacagccaggcagtttatgatattaacagactagactccacaggtgtaaacgtcctactttggggcaacttgccagagatagaagagagtacagatgaagatgtgttaaatatctcagcagaggagtgtattagat

SEQ ID NO: 132881 - DNA, 1139 bp, Homo sapiens
  Payload ID: 5963
  Gene Symbol: FAM72A
  Gene Name: family with sequence similarity 72, member A
  ENST ID: ENST00000607379
  CDS Start-End: 395-550
ctttaaattagacgatcggagaaggctgagggaattgctatgaaggggcgggagctgaagtgtagaggactcctttagacagcagaaagggaaagccgttgagaagttcccttcaaactccacctgcctcctctccaattcaaactccactcccttctccaaaagttaaaaggaaagccaagtttgccacgctcccctgttcctactcaataaatacttcttctactccgccaccgggaaaacagaaaaaaaaactaatttccttcccaatattaggacttagaaaagctctaggtcccgcaatttgaattttagcctaggggaatcaaaatagtaggagcattactcttgtttcctttttcaaaatcccacacctcatccttcctgcgacgccatgtctaccaacatttgtagtttcaaggacaggtgcgtgtccatcctgtgttgcaaattctgtaaacaagtgctcagctctaggggaatgaaggctgttttgctggctgatactgaaatagaccttttctctacagacatccctcctaccaagtaagtcatgctagtggcgggcaacggtagcttttaactaaatgggaacacttatggcttggatctgtgggagtcaacaaggaggttatcatttcggtgtttcagccactcccaccagtttgatgatccccttggaatatatctaagtgggcagactgtctggacaaagtctgtggtttagccaaggtggtcagtcctgatgtaatgcttctagttcaattgcagtcatgcgaccacacatctcttaagtttgatccctggttcagtgccctgcccaaccatcctatttcactgaatcaagtccgtggcgtagactttaggtaaattcaggcaaaattttccgtactgttggagaggagaggtcatttaagtttttcatttttatccatgaaattttgcaccaaaaaaaaaaaaatccgttttctatcattatttgcaattggcatcctaaatcagatccgttgttcatcaaattcagttttctttcctcaaaactctctctctctgaaagagatgtaaatagatttttatgggatgaaaaatagagacttagccttaatccttatctccaataaagactattttggacatta

SEQ ID NO: 132882 - DNA, 629 bp, Homo sapiens
  Payload ID: 5963
  Gene Symbol: FAM72A
  Gene Name: family with sequence similarity 72, member A
  ENST ID: ENST00000468509
  CDS Start-End: 99-311
ctgcgcggaacacccatcctcctgggtcctaggctgggacccgggctgtccgccagggctgggagacactggaggaggccggccgatgattacgcgcgatgccaacgacgactgccctacggtggaccgcggctgcccgtgtgcggaggaaagggagaggcggctgggtgccggctgcgctgcggtccgtgagccaggacggagtcccaggctgtacagtgatgggcggagagactcgcagtcctgagaaatcggtgccccagtccctggaggagcctccgccaactccgcaggaccccgccgggaagtagagcccacccctttaccaatcaccgcccgttttctatcgaccgatggggcccatagccaataggaagagctgatcccgagaggcccggaatgagggggaggagctggcaaaacttggaggtgtgactagcactgccgaggcgtggtcacagattaagctccaccccgggttgttgaacccctaagtagaactgatgggcgggattaaggtggaaccgacgaccaaacacaaactcttgagctaaggcacggccaattgggccggggtagagaggaggggtgttgcggggagttttaaccaataaagagtagagaccggt

SEQ ID NO: 132883 - DNA, 1773 bp, Homo sapiens
  Payload ID: 5964
  Gene Symbol: FAM72B
  Gene Name: family with sequence similarity 72, member B
  Uniprot ID: Q86X60
  ENST ID: ENST00000355228
  CDS Start-End: 423-752
ggaagggatgtcttaaaagaggagaagctttaaattagacgatcggagaaggctgagggaattgctatgaaggggcgggagctgaagtgtagaggactcctttagacagcagaaagggaaagccgttgagaagttcccttcaaactccacctgcctcctctccaattcaaactccactcccttctccaaaagttaaaaggaaagccaagtttgccacgctcccctgttcctactcaataaatacttcttctactccgccaccgggaaaacagaaaaaaaaaactaatttccttcccaatattaggacttagaaaagctctaggtcccgcaacttgaattttagcctaggggaatcaaaatagtaggagcattactcttgtttcctttttcaaaatcccacacctcatccttcctgcgacgccatgtctaccaacatttgtagtttcaaggacagcgcagtggacttcactggaagatgctatttcaccaaaatctgcaaatgtaaactgaaggacatcgcatgtttaaaatgtgggaacattgtaggttatcatgtgattgttccatgtagttcctgtcttccttcctgcaacaacggacacttctggatgtttcacagccaggcagtttatgatattaacagactagactccacaggtgtaaacatcctactttggggcaacttgccagagatagaagagagtacagatgaagatgtgttaaatatctcagcagaggagtgtattagataaatggaattatgatatatatgatatacaaacttttttctatttaaaaatatattaatggatcaactttaaaattgttagttgccagtgatcttttttggaaaacaaaaatggggcatttgttgatttatttattttccgtctctaattagttacctcagtttgattgaagccagtggagttgtgcttttcctctacttctacttcctctcccccacctttttctgcccagtgtaggtgtattcttaaattcagacgggaagattctttcacatatcactcagttacctcccaatctgggggagtttttcttacaacttgataccagataccattaattttacattcctgaataaaggcctagtacccacgcatatttcaaccatgcatatatcaagttcaactgagttttaataggggattaaaaaaacaagctgttaggtttccatgggcactggttctcataggttctattggtgataactgctttaacatggagcaagagtttgtgaatcaggaaatagaataaattaaaatttaaaatatatagaggaatcctcttgattgctcagcatgatgttagataaatgagtttgtcagaaaatatcagtatacgctgtttaccaatgttatttatttacattcttctaaagccattatggatattgtattatgagagctaaacctaaataagttatcctgttccctaggaccttctctgtaaatagtgaattttagacgagtagtctgtcctaaatcttaaatagaaaaaaaactaaagcgatttgcttaagccattgtacattataaagagctgttttgttttgctttgctttgctttgttttgtttttttaaagctgcattcagagccacaaaggaataggaaagtagggtagtgttggattctggttttatgtaactctaaaataaatgtatctctttaatatctcagttgtagggattttgtcaataccaaagcagactgagttgtggttttgtaaataaagttttttctaaaaatga

SEQ ID NO: 132884 - DNA, 2396 bp, Homo sapiens
  Payload ID: 5964
  Gene Symbol: FAM72B
  Gene Name: family with sequence similarity 72, member B
  Uniprot ID: Q86X60
  ENST ID: ENST00000369390
  CDS Start-End: 852-1301
gaggcaggaaaagcggaagagggagcgaaaaccaacgtgttcggtgacagaccccagcgccgactgagcctctaaagcgacttcagctctgccccaccaacaccaccgcgcgcccgggaacagccgctccgggaagaaacctgaggggactgcggggggcacgagggacagctgagggaagggaggacgcgagagaaacagcgcaagcacgctgagggccgggggttgccaggagaggggcccgcggacccgcagagcggaggaaggtccgggagaaaaggggcgggacggaggagaatccgggatcgcctggcagaaaaagagaagggagtttctgaatcctgggaagaggaggcgtgggtagggatgcttagcccgagatccgacagcagggaaccggagcgctccgggggaggggcttaatgctggggaagggatgtcttaaaagaggagaagctttaaattagacgatcggagaaggctgagggaattgctatgaaggggcgggagctgaagtgtagaggactcctttagacagcagaaagggaaagccgttgagaagttcccttcaaactccacctgcctcctctccaattcaaactccactcccttctccaaaagttaaaaggaaagccaagtttgccacgctcccctgttcctactcaataaatacttcttctactccgccaccgggaaaacagaaaaaaaaaactaatttccttcccaatattaggacttagaaaagctctaggtcccgcaacttgaattttagcctaggggaatcaaaatagtaggagcattactcttgtttcctttttcaaaatcccacacctcatccttcctgcgacgccatgtctaccaacatttgtagtttcaaggacaggtgcgtgtccatcctgtgttgcaaattctgtaaacaagtgctcagctctaggggaatgaaggctgttttgctggctgatactgaaatagaccttttctctacagacatccctcctaccaacgcagtggacttcactggaagatgctatttcaccaaaatctgcaaatgtaaactgaaggacatcgcatgtttaaaatgtgggaacattgtaggttatcatgtgattgttccatgtagttcctgtcttccttcctgcaacaacggacacttctggatgtttcacagccaggcagtttatgatattaacagactagactccacaggtgtaaacatcctactttggggcaacttgccagagatagaagagagtacagatgaagatgtgttaaatatctcagcagaggagtgtattagataaatggaattatgatatatatgatatacaaacttttttctatttaaaaatatattaatggatcaactttaaaattgttagttgccagtgatcttttttggaaaacaaaaatggggcatttgttgatttatttattttccgtctctaattagttacctcagtttgattgaagccagtggagttgtgcttttcctctacttctacttcctctcccccacctttttctgcccagtgtaggtgtattcttaaattcagacgggaagattctttcacatatcactcagttacctcccaatctgggggagtttttcttacaacttgataccagataccattaattttacattcctgaataaaggcctagtacccacgcatatttcaaccatgcatatatcaagttcaactgagttttaataggggattaaaaaaacaagctgttaggtttccatgggcactggttctcataggttctattggtgataactgctttaacatggagcaagagtttgtgaatcaggaaatagaataaattaaaatttaaaatatatagaggaatcctcttgattgctcagcatgatgttagataaatgagtttgtcagaaaatatcagtatacgctgtttaccaatgttatttatttacattcttctaaagccattatggatattgtattatgagagctaaacctaaataagttatcctgttccctaggaccttctctgtaaatagtgaattttagacgagtagtctgtcctaaatcttaaatagaaaaaaaactaaagcgatttgcttaagccattgtacattataaagagctgttttgttttgctttgctttgctttgttttgtttttttaaagctgcattcagagccacaaaggaataggaaagtagggtagtgttggattctggttttatgtaactctaaaataaatgtatctctttaatatctcagttgtagggattttgtcaataccaaagcagactgagttgtggttttgtaaataaagttttttctaaaaatgaccattcttcctttaattttttgttatgcccacatattgtatgtaaaaatataaataaatagtacttaaagtata

SEQ ID NO: 132885 - DNA, 748 bp, Homo sapiens
  Payload ID: 5964
  Gene Symbol: FAM72B
  Gene Name: family with sequence similarity 72, member B
  ENST ID: ENST00000452190
  CDS Start-End: 380-742
agaccccagcgccgactgagcctctaaagcgacttcagctctgccccaccaacaccaccgcgcgcccgggaacagccgctccgggaagaaacctgaggggactgcggggggcacgagggacagctgagggaagggaggacgcgagagaaacagcgcaagcacgctgagggccgggggttgccaggagaggggcccgcggacccgcagagcggaggaaggtccgggagaaaaggggcgggacggaggagaatccgggatcgcctggcagaaaaagagaagggagtttctgaatcctgggaagaggaggcgtggtttcaaggacaggtgcgtgtccatcctgtgttgcaaattctgtaaacaagtgctcagctctaggggaatgaaggctgttttgctggctgatactgaaatagaccttttctctacagacatccctcctaccaacgcagtggacttcactggaagatgctatttcaccaaaatctgcaaatgtaaactgaaggacatcgcatgtttaaaatgtgggaacattgtaggttatcatgtgattgttccatgtagttcctgtcttccttcctgcaacaacggacacttctggatgtttcacagccaggcagtttatgatattaacagactagactccacaggtgtaaacatcctactttggggcaacttgccagagatagaagagagtacagatgaagatgtgttaaatatctcagcagaggagtgtattagataaatggaa

SEQ ID NO: 132886 - DNA, 1659 bp, Homo sapiens
  Payload ID: 5964
  Gene Symbol: FAM72B
  Gene Name: family with sequence similarity 72, member B
  ENST ID: ENST00000619376
  CDS Start-End: 826-1110
gaaaaccaacgtgttcggtgacagaccccagcgccgactgagcctctaaagcgacttcagctctgccccaccaacaccaccgcgcgcccgggaacagccgctccgggaagaaacctgaggggactgcggggggcacgagggacagctgagggaagggaggacgcgagagaaacagcgcaagcacgctgagggccgggggttgccaggagaggggcccgcggacccgcagagcggaggaaggtccgggagaaaaggggcgggacggaggagaatccgggatcgcctggcagaaaaagagaagggagtttctgaatcctgggaagaggaggcgtgggtagggatgcttagcccgagatccgacagcagggaaccggagcgctccgggggaggggcttaatgctggggaagggatgtcttaaaagaggagaagctttaaattagacgatcggagaaggctgagggaattgctatgaaggggcgggagctgaagtgtagaggactcctttagacagcagaaagggaaagccgttgagaagttcccttcaaactccacctgcctcctctccaattcaaactccactcccttctccaaaagttaaaaggaaagccaagtttgccacgctcccctgttcctactcaataaatacttcttctactccgccaccgggaaaacagaaaaaaaaaactaatttccttcccaatattaggacttagaaaagctctaggtcccgcaacttgaattttagcctaggggaatcaaaatagtaggagcattactcttgtttcctttttcaaaatcccacacctcatccttcctgcgacgccatgtctaccaacatttgtagtttcaaggacaggtgcgtgtccatcctgtgttgcaaattctgtaaacaagtgctcagctctaggggaatgaaggctgttttgctggctgatactgaaatagaccttttctctacagacatccctcctaccaacgcagtggacttcactggaagatgctatttcaccaaaatctgcaaatgtaaactgaaggacatcgcatgtttaaaatggtgtaaacatcctactttggggcaacttgccagagatagaagagagtacagatgaagatgtgttaaatatctcagcagaggagtgtattagataaatggaattatgatatatatgatatacaaacttttttctatttaaaaatatattaatggatcaactttaaaattgttagttgccagtgatcttttttggaaaacaaaaatggggcatttgttgatttatttattttccgtctctaattagttacctcagtttgattgaagccagtggagttgtgcttttcctctacttctacttcctctcccccacctttttctgcccagtgtaggtgtattcttaaattcagacgggaagattctttcacatatcactcagttacctcccaatctgggggagtttttcttacaacttgataccagataccattaattttacattcctgaataaaggcctagtacccacgcatatttcaaccatgcatatatcaagttcaactgagttttaataggggattaaaaaaacaagctgttaggtttccatgggcactggttctcataggttctattggtgataactgctttaacatggagcaagagtttgtga

SEQ ID NO: 132887 - DNA, 676 bp, Homo sapiens
  Payload ID: 5964
  Gene Symbol: FAM72B
  Gene Name: family with sequence similarity 72, member B
  ENST ID: ENST00000471903
  CDS Start-End: 71-520
ctaggctgggacccgggctgtccgccagggctgggagacactggaggaggccggccgatgattacgcgcgatgccaacgacgactgccctacggtggaccgcggctgcccgtgtgcggaggaaagggagaggcggctgggtgctggctgcgctgcggtccgtgagccaggacggagtcccaggctgtacagtgatgggcggagagactcgcagtcctgagaacgcagtggacttcactggaagatgctatttcaccaaaatctgcaaatgtaaactgaaggacatcgcatgtttaaaatgtgggaacattgtaggttatcatgtgattgttccatgtagttcctgtcttccttcctgcaacaacggacacttctggatgtttcacagccaggcagtttatgatattaacagactagactccacaggtgtaaacatcctactttggggcaacttgccagagatagaagagagtacagatgaagatgtgttaaatatctcagcagaggagtgtattagataaatggaattatgatatatatgatatacaaacttttttctatttaaaaatatattaatggatcaactttaaaattgttagttgccagtgatcttttttggaaaacaaaaatggggcatttgttgatttatttattttccgtctctaattagttacctc

SEQ ID NO: 132888 - DNA, 1658 bp, Homo sapiens
  Payload ID: 5965
  Gene Symbol: FAM72C
  Gene Name: family with sequence similarity 72, member C
  ENST ID: ENST00000369175
  CDS Start-End: 825-1109
gaaaaccaacgtgttcggtgacagaccccagcgccgactgagcctctaaagcgacttcagctctgccccaccaacaccaccgcgcgcccgggaacagccgctccgggaagaaacctgaggggactgcggggggcacgagggacagctgagggaagggaggacgcgagagaaacagcgcgagcacgctgagggccgggggttgccaggagaggggcccgcggacccgcagagcggaggaaggtccgggagaaaaggggcgggacggaggagaatccgggatcgcctggcagaaaaagagaagggagtttctgaatcctgggaagaggaggcgtgggtagggacgcttagcccgagatccgacagcagggaaccggagcgctccgggggaggggcttaatgctggggaagggatgtcttaaaagaggagaagctttaaattagacgatcggagaaggctgagggaattgctatgaaggggcgggagctgaagtgtagaggactcctttagacagcagaaagggaaagccgttgagaagttcccttcaaactccacctgcctcctctccaattcaaactccactcccttctccaaaagttaaaaggaaagccaagtttgccacgctcccctgttcctactcaataaatacttcttctactccgccaccgggaaaacagaaaaaaaaactaatttccttcccaatattaggacttagaaaagctctaggtcccgcaatttgaattttagcctaggggaatcaaaatagtaggagcattactcttgtttcctttttcaaaatcccacacctcatccttcctgcgacgccatgtccaccaacatttgtagtttcaaggacaggtgcgtgtccatcctgtgttgcaaattctgtaaacaagtgctcagctctaggggaatgaaggctgttttgctggctgatactgaaatagaccttttctctacagacatccctcctaccaacgcagtggacttcactggaagatgctatttcaccaaaatctgcaaatgtaaactgaaggacatcgcatgtttaaaatggtgtaaacgtcctacttcggggcaacttgccagagatagaagagagtacagatgaagatgtgttaaatatctcagcagaggagtgtattagataaatggaattatgatatatatgatatacaaacttttttctatttaaaaatatattaatggatcaactttaaaattgttagttgccagtgatcttttttggaaaacaaaaatggggcatttgttgatttatttattttctgtctctaattagttacctcagtttgattgaagccagtggagttgtgcttttcctctacttctacttcctctcccccacctttttctgcccagtgtaggtgtattcttaaattcagacgggaagattctttcacatatcactcagttacctcccaatctgggggagtttttcttacaacttgataccagataccattaattttacattcctgaataaaggcctagtacccacgcatatttcaaccatgcatatatcaagttcaaccgagttttaataggggattaaaaaaacaagctgttaggtttccatgggcactggttctcataggttctattggtgataactgctttaacatggagcaagagtttgtga

SEQ ID NO: 132889 - DNA, 2297 bp, Homo sapiens
  Payload ID: 5965
  Gene Symbol: FAM72C
  Gene Name: family with sequence similarity 72, member C
  Uniprot ID: H0Y354
  ENST ID: ENST00000584486
  CDS Start-End: 825-1274
gaaaaccaacgtgttcggtgacagaccccagcgccgactgagcctctaaagcgacttcagctctgccccaccaacaccaccgcgcgcccgggaacagccgctccgggaagaaacctgaggggactgcggggggcacgagggacagctgagggaagggaggacgcgagagaaacagcgcgagcacgctgagggccgggggttgccaggagaggggcccgcggacccgcagagcggaggaaggtccgggagaaaaggggcgggacggaggagaatccgggatcgcctggcagaaaaagagaagggagtttctgaatcctgggaagaggaggcgtgggtagggacgcttagcccgagatccgacagcagggaaccggagcgctccgggggaggggcttaatgctggggaagggatgtcttaaaagaggagaagctttaaattagacgatcggagaaggctgagggaattgctatgaaggggcgggagctgaagtgtagaggactcctttagacagcagaaagggaaagccgttgagaagttcccttcaaactccacctgcctcctctccaattcaaactccactcccttctccaaaagttaaaaggaaagccaagtttgccacgctcccctgttcctactcaataaatacttcttctactccgccaccgggaaaacagaaaaaaaaactaatttccttcccaatattaggacttagaaaagctctaggtcccgcaatttgaattttagcctaggggaatcaaaatagtaggagcattactcttgtttcctttttcaaaatcccacacctcatccttcctgcgacgccatgtccaccaacatttgtagtttcaaggacaggtgcgtgtccatcctgtgttgcaaattctgtaaacaagtgctcagctctaggggaatgaaggctgttttgctggctgatactgaaatagaccttttctctacagacatccctcctaccaacgcagtggacttcactggaagatgctatttcaccaaaatctgcaaatgtaaactgaaggacatcgcatgtttaaaatgtgggaacattgtagtttatcatgtgattgttccatgtagttcctgtcttctttcctgcaacaacagacacttctggatgtttcacagccaggcagtttatgatattaacagactagactccacaggtgtaaacgtcctacttcggggcaacttgccagagatagaagagagtacagatgaagatgtgttaaatatctcagcagaggagtgtattagataaatggaattatgatatatatgatatacaaacttttttctatttaaaaatatattaatggatcaactttaaaattgttagttgccagtgatcttttttggaaaacaaaaatggggcatttgttgatttatttattttctgtctctaattagttacctcagtttgattgaagccagtggagttgtgcttttcctctacttctacttcctctcccccacctttttctgcccagtgtaggtgtattcttaaattcagacgggaagattctttcacatatcactcagttacctcccaatctgggggagtttttcttacaacttgataccagataccattaattttacattcctgaataaaggcctagtacccacgcatatttcaaccatgcatatatcaagttcaaccgagttttaataggggattaaaaaaacaagctgttaggtttccatgggcactggttctcataggttctattggtgataactgctttaacatggagcaagagtttgtgaatcaggaaatagaataaattaaaatttaaaatatatagaggaatcctcttgattgctcagcatgatgttagataaatgagtttgtcagaaaatatcagtatacgctgtttaccaatgttatttatttacattcttctaaagccattatggatattgtattatgagagctaaacctaaataagttatcctgttccctaggaccttctctgtaaatagtgaattttagacgagtagtctgtcctaaatcttaaatagaaaaaaaaactaaagcgatttgcttaagccattgtacattataaagagctgttttgttttgctttgctttgctttgttttgttttttttaaagctgcattcagagccacaaaggaataggaaagtagggtagtgttggattctggttttatgtaactctaaaataaatgtatctctttaatatctcagttgtagggattttgtcaataccaaagcagactgagttgtggttttgtaaataaagttttttctaaaaatga

SEQ ID NO: 132890 - DNA, 2397 bp, Homo sapiens
  Payload ID: 5966
  Gene Symbol: FAM72D
  Gene Name: family with sequence similarity 72, member D
  Uniprot ID: Q6L9T8
  ENST ID: ENST00000400889
  CDS Start-End: 849-1298
ggcaggaaaagcggaagagggagcgaaaaccaacgtgttcggtgacagaccccagcgccgactgagcctctaaagcgacttcagctctgccccaccaacaccaccgcgcgcccgggaacagccgctccgggaagaaacctgaggggactgcggggggcacgagggacagctgagggaagggaggacgcgagagaaacagcgcgagcacgctgagggccgggggttgccaggagaggggcccgcggacccgcagagcggaggaaggtccgggagaaaaggggcgggacggaggagaatccgggatcgcctggcagaaaaagagaagggagtttctgaatcctgggaagaggaggcgtgggtagggacgcttagcccgagatccgacagcagggaaccggagcgctccgggggaggggcttaatgctggggaagggatgtcttaaaagaggagaagctttaaattagacgatcggagaaggctgagggaattgctatgaaggggcgggagctgaagtgtagaggactcctttagacagcagaaagggaaagccgttgagaagttcccttcaaactccacctgcctcctctccaattcaaactccactcccttctccaaaagttaaaaggaaagccaagtttaccacgctcccctgttcctactcaataaatacttcttctactccgccaccgggaaaacagaaaaaaaaactaatttccttcccaatattaggacttagaaaagctctaggtcccgcaatttgaattttagcctaggggaatcaaaatagtaggagcattactcttgtttcctttttcaaaatcccacacctcatccttcctgcgacgccatgtccaccaacatttgtagtttcaaggacaggtgcgtgtccatcctgtgttgcaaattctgtaaacaagtgctcagctctaggggaatgaaggctgttttgctggctgatactgaaatagaccttttctctacagacatccctcctaccaacgcagtggacttcactggaagatgctatttcaccaaaatctgcaaatgtaaactgaaggacatcgcatgtttaaaatgtgggaacattgtaggttatcatgtgattgttccatgtagttcctgtcttctttcctgcaacaacagacacttctggatgtttcacagccaggcagtttatgatattaacagactagactccacaggtgtaaacgtcctacttcggggcaacttgccagagatagaagagagtacagatgaagatgtgttaaatatctcagcagaggagtgtattagataaatggaattatgatatatatgatatacaaacttttttctatttaaaaatatattaatggatcaactttaaaattgttagttgccagtgatcttttttggaaaacaaaaatggggcatttgttgatttatttattttctgtctctaattagttacctcagtttgattgaagccagtggagttgtgcttttcctctacttctacttcctctcccccacctttttctgcccagtgtaggtgtattcttaaattcagacgggaagattctttcacatatcactcagttacctcccaatctgggggagtttttcttacaacttgataccagataccattaattttacattcctgaataaaggcctagtacccacgcatatttcaaccatgcatatatcaagttcaaccgagttttaataggggattaaaaaaacaagctgttaggtttccatgggcactggttctcataggttctattggtgataactgctttaacatggagcaagagtttgtgaatcaggaaatagaataaattaaaatttaaaatatatagaggaatcctcttgattgctcagcatgatgttagataaatgagtttgtcagaaaatatcagtatacgctgtttaccaatgttatttatttacattcttctaaagccattatggatattgtattatgagagctaaacctaaataagttatcctgttccctaggaccttctctgtaaatagtgaattttagacgagtggtctgtcctaaatcttaaatagaaaaaaaaactaaagcgatttgcttaagccattgtacattataaagagctgttttgttttgctttgctttgctttgttttgtttttttaaagctgcattcagagctacaaaggaataggaaagtagggtagtgttggattctggttttatgtaactctaaaataaatgtatctctttaatatctcagttgtagggattttgtcaataccaaagcagactgagttgtggttttgtaaataaagttttttctaaaaatgaccattcttcctttaattttttgttatgcccacatattgtatgtaaaaatataaataaatagtacttaaagtatagaa

SEQ ID NO: 132891 - DNA, 5288 bp, Homo sapiens
  Payload ID: 5967
  Gene Symbol: FAM73A
  Gene Name: family with sequence similarity 73, member A
  Uniprot ID: Q8NAN2
  ENST ID: ENST00000370791
  CDS Start-End: 33-1931
actcctgaccccggaaggactccgccttctccatgtcagactgctgctcagcgccaggcatcagctgggaagctggcgtgggcaggccagctgtacctggcctggagctccagattagaagaggagccatgtcagaagaaacagtaagtgaatcacagttttccttgaagacagcagcgctaagagtgtttgatcttcctctgacttggtactattctctctcccagatcaaattttctccggtggctaaaaagttgtttgtggtaactgcagtgagtgctatatctgtaatttttctggctcatcactttaaaagaaaacgtggaaagaagaaaggaaaaatattaccatgggaaccagagcacctcatacttgaatacactaaaagagcagcatcagacaaaggttcaagttgttccagtagcagacagaatttgacattatctttaagttctaccaaagacaaaggatctcaagtttgtaactatgctaatggaggacttttcagtaaatattcaggttctgcacagagtttggcctctgtccagagtgtcaattcttgtcatagctgcgcttgtggcaattctaattcctgggacaaagcagatgaagatgatattaaacttgttaatattcctgtgactactccagagaacttatacttaatgggtatggaattgtttgaagaggcattgcgtcgatgggaacaagctctgacctttcgcaatagacaggctgaagatgaagcctgtggttccattaaactgggtgcaggagatgccattgctgaagaaaatgtagatgatattattagtactgaatttatccataaactcgaagctctgctgcaaagagcctatcgtctccaagaggagtttgaagctacccttggggcatctgatcctaattcccttgctgatgatattgataaagatacagatatcaccatgaagggtaatgtggaagactttggcctgcgagacaccttgagcatcgcatccacggattcctttgcttccgcagcagagcttgcagaacacagagaagtacggcatacctacagcctggagtccctttgtcactgcccattttacgaggaagccatgcatttagttgaagaaggaaaaatttactccagagtactgagaactgaaatgttggagtgcctaggagacagtgattttcttgccaaacttcactgtattcgacaggcttttcaggtaattctttcagaatcagctaacaggatattcctcgctgagagcggaaggaaaattttatcagctttaattgtgaaagcacgaaagaatccaaagaagtttgaagatgtttttgatgaaatgatctattttttagagcagaccgatcactggggtagtactgaaatggaacttgctgctagaggggtgaaaaatctaaatttttatgatgttgttctggattttatattaatggactcctttgaagatttggaaaacccacccacatccatacagaatgtagtaaataatcgatggctaaactcatccttcaaagaaacagctgtggcttcaagttgttggtcggtgctgaaacagaaaagacaacagatgaagatcccagatggattttttgcccatttttatgccatttgtgaacacatcagtcctgtcctagcctggggctttttgggtcctagaaattctctgtatgatttatgttgcttttttaagaatcaagttcttttatttctcaaagacatttttgactttgagaaggtgcgctattcaagtacagagactttagctgaagacctcatgcagttactcattcgccgcactgagcttttaatggcctatcttgaagcagatgccctgaggcatacaagtagttgtctaagcagtcatggtcatgttatgtccactgggctactggaagccaaagtacaataagtaccataagaatcatacaatttgagtgtgctatgaaatattttaaggtaactattgattttgtaacatatattacaaagttaacagaattgatgcatgtggattcagggaggaaaaaaaaatctactaaaaaatgagcaactgtactgtatttatacagaagttctgtcattgaattcctgtgtagtgtagtcatagtggctttttgcattcattaggtaataattgaagtcatgaaatgtatattttacagaaatatcgcttgaattgaagccaatatttgggagttaattggtttgtcttcttgaagctgtcattctcaaaagctctgtttttatgctttgcacctttaaaatgtacactttagccaaggtctttgtggcccacacatgcaagaatatattacttctaatgtcaatatatttaactttgcctagaaacatatttttaattataaagttattcatttgtttaatcaagtttaggcagtaatgatgtttaatatgtactgcatacattattgcttgtgcatttgcttatgtatttgaatcaaagaaattgtaatcactgaatattgttatagaacatttaaatgggccacttgcagtggctcatgcctgtaatacattgggaggctgaggcaggaggacagtttgaggccaggaggttgagactagcctggacaacataaggagatgcctgtctctacaaaaacataaaaataaattagctggtatcaagcagagttccatggaaatattaaaatttttttaaaaaataaaaataggctgggtgtggtggttcatgcctgtaatcctagcactttgggaggccaaggtgggcggatcacctgaggtcaggtgttcgagaccagcctccccaatatggtgaaaccccgtctctactaaaaatacaaaaattagccaggtgtggtggcgggcgcctgtagtcccagctactcgggaggctgacacaggagtattgcttgaacccaggaagtggaggctgcagtgagccgagatcgcaccactgcactccagcctgggcaacaaagtgagactctgtctcaaaaaataaattaattaaattaaattaattagttgggtgtggtggcatgtgtctgtggtcccagctacttgggaggctgaggtgggaggatcacttgagtccagaaggtcaaggctgtcatgagctgtgattgcatcactgcactccagcctgggcgacagcaagaccctatctcagaagtgaataaataaaacaaatacagcatttaaatgaattgacattgagaaatttacaatttacaaatttatattaactgtagtttccaaaatatgttactgttggtcctgtaagttacaaagagactgaagaactttctttttatacattagagcattttcccctggaatgagtattgattaaaaagataacatttattaattaataaaggcaatttaaaatttagtgttatttgaagactgtcaacatctgaaggtatgaaacttggtacagtgaaataatttctcctttctccttccttttagttattcccacagaaaactcagcccagtgggaatttgtcatattatgcccatgttttaaaaatattcatagtttgaatcttattgacattttaaagaagagttttttcctccctggaatgtaaaacaaaaatattttttaatgatgtggaagtatatatttcatgttcattatgataaatctacaaacaaatgaattgtttttatgggtggagttcttctataagagtatattaaatgctttcagagttgtattaattttgtttctaaataatataccacttatttggagtgactaactcagtatgtaagtagatgagatttgttgattttgcccctaaaacgggctttagtcattttaggagtgagttgcacaaaaggacctaaaatgcattgttttttgccttcttttaagagatggggtctcgctctattgcccaggctggagtgcagtgtgctatcatacatagctcactgcagtctccaactcctcataccagaggcatgtgtcaccatgtcttactcctaaaatgcatttttaaaaagcgaatttttagattaaagtgcctagtttctgattaataaatagaagatgaaaaaagtgggcgggaaaagcataatcttttaagatttgtaattttctgtatgtgccacatttatgtaaattaactataaaatatggaattcaggatcatgctgttttgcatgtactttataggttatatagcatgaaacatacaaattatcactgttctttagtatatagctccttgccttttcttacatagatgcttaatttaacaattacctatttatagttcttattattgacgggaatatgattagaagtaccaaaactaaaaattccattatgtactgtttactttttatttaatattacatgtttttaccttgttgcggtatctttggccttcacacacacatgtgtgcgtgcacgtgcatttcattaccatgtagacaagacagttattgcttatagtaatttacccatttgagggctaagtgttttaagctgtggttttataagcaaagctgtaagtaaatgtaatttattttagaaagatattatttgaaatcaattttgaagaattgcactatttgataatgctgctactacatgagataactctggggaattaattttatgagataagatgaatggctttctagaaggtgttgctttttgttttttctttttcttttttacatttcatcttagaaaaagttgcttatattcagcaggttggtttgtcaaattcagtgtttgagtttgtttctggtcagttcagtagctgctactttagcaagatgtggcctttcacaaaagaggtaagagtgaccaaatagaattttaggacaataagtataggaaatatctctttatcgtaagataagaaacttgaactttttaaaggaaatgtcctcttgaaaagaacatttctgactgcatgcagaagggtacttaagacatatataacaggccaggagcagtggctcacgcctgtaatcccagcactttgggaggcccaagtgggcagataacctgaggtcaggagtttgagaccagcctgaccaacatggtgaaaccccatctctactaaaaatacaaaaattagccaggcatggtggcgcatgcctgtaatcccagctactcgagaggctgaggcaggagaatcgcttgaacccgggaggcggaggttgcagttagccgagatcgtgccattgcactccagcctgggcaacaagagtaaaactctgtctcaaaaaaaaaaaaaaaaaaaaaaaaaaa

SEQ ID NO: 132892 - DNA, 6409 bp, Homo sapiens
  Payload ID: 5967
  Gene Symbol: FAM73A
  Gene Name: family with sequence similarity 73, member A
  ENST ID: ENST00000443751
  CDS Start-End: 33-1934
actcctgaccccggaaggactccgccttctccatgtcagactgctgctcagcgccaggcatcagctgggaagctggcgtgggcaggccagctgtacctggcctggagctccagattagaagaggagccatgtcagaagaaacagtaagtgaatcacagttttccttgaagacagcagcgctaagagtgtttgatcttcctctgacttggtactattctctctcccagatcaaattttctccggtggctaaaaagttgtttgtggtaactgcagtgagtgctatatctgtaatttttctggctcatcactttaaaagaaaacgtggaaagaagaaaggaaaaatattaccatgggaaccagagcacctcatacttgaatacactaaaagagcagcatcagacaaaggttcaagttgttccagtagcagacagaatttgacattatctttaagttctaccaaagacaaaggatctcaagtttgtaactatgctaatggaggacttttcagtaaatattcaggttctgcacagagtttggcctctgtccagagtgtcaattcttgtcatagctgcgcttgtggcaattctaattcctgggacaaagcagatgaagatgatattaaacttgttaatattcctgtgactactccagagaacttatacttaatgggtatggaattgtttgaagaggcattgcgtcgatgggaacaagctctgacctttcgcaatagacaggctgaagatgaagcctgtggttccattaaactgggtgcaggagatgccattgctgaagaaaatgtagatgatattattagtactgaatttatccataaactcgaagctctgctgcaaagagcctatcgtctccaagaggagtttgaagctacccttggggcatctgatcctaattcccttgctgatgatattgataaagatacagatatcaccatgaagggtaatgtggaagactttggcctgcgagacaccttgagcatcgcatccacggattcctttgcttccgcagcagagcttgcagaacacagagaagtacggcatacctacagcctggagtccctttgtcactgcccattttacgaggaagccatgcatttagttgaagaaggaaaaatttactccagagtactgagaactgaaatgttggagtgcctaggagacagtgattttcttgccaaacttcactgtattcgacaggcttttcaggtaattctttcagaatcagctaacaggatattcctcgctgagagcggaaggaaaattttatcagctttaattgtgaaagcacgaaagaatccaaagaagtttgaagatgtttttgatgaaatgatctattttttagagcagaccgatcactggggtagtactgaaatggaacttgctgctagaggggtgaaaaatctaaatttttatgatgttgttctggattttatattaatggactcctttgaagatttggaaaacccacccacatccatacagaatgtagtaaataatcgatggctaaactcatccttcaaagaaacagctgtggcttcaagttgttggtcggtgctgaaacagaaaagacaacagatgaagcagatcccagatggattttttgcccatttttatgccatttgtgaacacatcagtcctgtcctagcctggggctttttgggtcctagaaattctctgtatgatttatgttgcttttttaagaatcaagttcttttatttctcaaagacatttttgactttgagaaggtgcgctattcaagtacagagactttagctgaagacctcatgcagttactcattcgccgcactgagcttttaatggcctatcttgaagcagatgccctgaggcatacaagtagttgtctaagcagtcatggtcatgttatgtccactgggctactggaagccaaagtacaataagtaccataagaatcatacaatttgagtgtgctatgaaatattttaaggtaactattgattttgtaacatatattacaaagttaacagaattgatgcatgtggattcagggaggaaaaaaaaatctactaaaaaatgagcaactgtactgtatttatacagaagttctgtcattgaattcctgtgtagtgtagtcatagtggctttttgcattcattaggtaataattgaagtcatgaaatgtatattttacagaaatatcgcttgaattgaagccaatatttgggagttaattggtttgtcttcttgaagctgtcattctcaaaagctctgtttttatgctttgcacctttaaaatgtacactttagccaaggtctttgtggcccacacatgcaagaatatattacttctaatgtcaatatatttaactttgcctagaaacatatttttaattataaagttattcatttgtttaatcaagtttaggcagtaatgatgtttaatatgtactgcatacattattgcttgtgcatttgcttatgtatttgaatcaaagaaattgtaatcactgaatattgttatagaacatttaaatgggccacttgcagtggctcatgcctgtaatacattgggaggctgaggcaggaggacagtttgaggccaggaggttgagactagcctggacaacataaggagatgcctgtctctacaaaaacataaaaataaattagctggtatcaagcagagttccatggaaatattaaaatttttttaaaaaataaaaataggctgggtgtggtggttcatgcctgtaatcctagcactttgggaggccaaggtgggcggatcacctgaggtcaggtgttcgagaccagcctccccaatatggtgaaaccccgtctctactaaaaatacaaaaattagccaggtgtggtggcgggcgcctgtagtcccagctactcgggaggctgacacaggagtattgcttgaacccaggaagtggaggctgcagtgagccgagatcgcaccactgcactccagcctgggcaacaaagtgagactctgtctcaaaaaataaattaattaaattaaattaattagttgggtgtggtggcatgtgtctgtggtcccagctacttgggaggctgaggtgggaggatcacttgagtccagaaggtcaaggctgtcatgagctgtgattgcatcactgcactccagcctgggcgacagcaagaccctatctcagaagtgaataaataaaacaaatacagcatttaaatgaattgacattgagaaatttacaatttacaaatttatattaactgtagtttccaaaatatgttactgttggtcctgtaagttacaaagagactgaagaactttctttttatacattagagcattttcccctggaatgagtattgattaaaaagataacatttattaattaataaaggcaatttaaaatttagtgttatttgaagactgtcaacatctgaaggtatgaaacttggtacagtgaaataatttctcctttctccttccttttagttattcccacagaaaactcagcccagtgggaatttgtcatattatgcccatgttttaaaaatattcatagtttgaatcttattgacattttaaagaagagttttttcctccctggaatgtaaaacaaaaatattttttaatgatgtggaagtatatatttcatgttcattatgataaatctacaaacaaatgaattgtttttatgggtggagttcttctataagagtatattaaatgctttcagagttgtattaattttgtttctaaataatataccacttatttggagtgactaactcagtatgtaagtagatgagatttgttgattttgcccctaaaacgggctttagtcattttaggagtgagttgcacaaaaggacctaaaatgcattgttttttgccttcttttaagagatggggtctcgctctattgcccaggctggagtgcagtgtgctatcatacatagctcactgcagtctccaactcctcataccagaggcatgtgtcaccatgtcttactcctaaaatgcatttttaaaaagcgaatttttagattaaagtgcctagtttctgattaataaatagaagatgaaaaaagtgggcgggaaaagcataatcttttaagatttgtaattttctgtatgtgccacatttatgtaaattaactataaaatatggaattcaggatcatgctgttttgcatgtactttataggttatatagcatgaaacatacaaattatcactgttctttagtatatagctccttgccttttcttacatagatgcttaatttaacaattacctatttatagttcttattattgacgggaatatgattagaagtaccaaaactaaaaattccattatgtactgtttactttttatttaatattacatgtttttaccttgttgcggtatctttggccttcacacacacatgtgtgcgtgcacgtgcatttcattaccatgtagacaagacagttattgcttatagtaatttacccatttgagggctaagtgttttaagctgtggttttataagcaaagctgtaagtaaatgtaatttattttagaaagatattatttgaaatcaattttgaagaattgcactatttgataatgctgctactacatgagataactctggggaattaattttatgagataagatgaatggctttctagaaggtgttgctttttgttttttctttttcttttttacatttcatcttagaaaaagttgcttatattcagcaggttggtttgtcaaattcagtgtttgagtttgtttctggtcagttcagtagctgctactttagcaagatgtggcctttcacaaaagaggtaagagtgaccaaatagaattttaggacaataagtataggaaatatctctttatcgtaagataagaaacttgaactttttaaaggaaatgtcctcttgaaaagaacatttctgactgcatgcagaagggtacttaagacatatataacaggccaggagcagtggctcacgcctgtaatcccagcactttgggaggcccaagtgggcagataacctgaggtcaggagtttgagaccagcctgaccaacatggtgaaaccccatctctactaaaaatacaaaaattagccaggcatggtggcgcatgcctgtaatcccagctactcgagaggctgaggcaggagaatcgcttgaacccgggaggcggaggttgcagttagccgagatcgtgccattgcactccagcctgggcaacaagagtaaaactctgtctcaaaaaaaaaaaaaaaaaaaaaaaaaaagacatatgtaacggtttccatttgccttaaaattgggttaaatagcaaaagcaatgtctttaaaaatgattagtttagagccttttagggtaaaccctgtttaaacacttaatcatggaattgcccttgccaccatgagctctaccatccacttccatatgtaaattataagagggacttcaattaagtcactcctgagaaaatatccttttttctagaagaaagaagataaattttgaggcaatttacatttggtatttcttttaatttcattttttgtattttaatttccctacatttttgttcaactaagagtgcttatttcttcttgaaggttaacattatgtttattaagtatcaaaatggaattatcttttaaaaaagaagacaagttttccatactgtcacagtaagctccaaagaactttgtctttctcataaagtaatattctttatttgcatccatttactatgattccgttaatttgttgaattaaatgcctttataaaaatatttacaaatgttttcttgccttaaaatgtaacattttctacttaaatttaatttccaagagagtgattatttgcattacaaaggaattcttaataattcctgtaagcctaggaaataggaatgccaaagtaacatttaatgtacttctctataacttttcataatcagaaattttaaattatgtttatataacccatttacttttattttaatgtgaatatatattcagaaattatttgatgtaaatttcaaaatgattataggaattaagctgaattctaatttttttgcttagatttagaaatatgtatgtgaaatttaagaatttatataatctgtgattagtggaaataagaacatccctactttgttcctaatgagtatattatgttattgttttgtttagtttgtgaacaaccatgtattagctttacttagctgatgtcagtaaatgtttctgtctcctaaatgtaaggactgtactcattaatttgtgtaaaagtaaaacactacagtagcagaaaaaattgcactggctctttagccaaaataagcactgtaacatggatgtattactattactgccaaataaaaaagtgatggt

SEQ ID NO: 132893 - DNA, 500 bp, Homo sapiens
  Payload ID: 5967
  Gene Symbol: FAM73A
  Gene Name: family with sequence similarity 73, member A
  ENST ID: ENST00000477627
  CDS Start-End: 301-500
gtgccaccctgaacacccccgacctcgtctcatctcagaagctaagcagggtcgggcctggttagtacttgcataggaaagcaggagggtccccacgccagagggaggcctgcaaaggaagcgcggaattgggatgggctcgccactgctctgagccagaggaagggtctggacggccgagctggagggacccccttttctggtgttcttggcaaagaaaaaggaagacagcagaggagagctccgcgaggggctgctgtggggtcgggggagagcgcgctggagattagaagaggagccatgtcagaagaaacagtaagtgaatcacagttttccttgaagacagcagcgctaagagtgtttgatcttcctctgacttggtactattctctctcccagatcaaattttctccggtggctaaaaagttgtttgtggtaactgcagtgagtgctatatctgtaatttttctggctcatcactttaaaagaaaacgtggaaa

SEQ ID NO: 132894 - DNA, 3637 bp, Homo sapiens
  Payload ID: 5968
  Gene Symbol: FAM73B
  Gene Name: family with sequence similarity 73, member B
  Uniprot ID: Q7L4E1
  ENST ID: ENST00000358369
  CDS Start-End: 227-2008
aggtacccgatccgaggcggggagagcacccgggatggaaggagcaggcgtgcgggccgtgagcggcgccagagggtacctggctctgtggaggggccctctggtatgtgtgtccctgtccttctggggcgtggatggtgcctgggacccagctggcaaccagttgaagacgttctccttggaagctcttggccctgaggactttgcctggggcattggccctgccatggcgttccggagggccgagggcacgtctatgatccaggccctggccatgacggtggccgagatccccgtgttcctgtacacgacgtttgggcagtctgcattctcccagctacggttgacgccaggcctgcggaaagtcctctttgccacggccctggggactgtggccctggccctggctgcccaccagctgaagaggcgacggaggaggaagaagcaggttggtcccgagatgggaggggagcagctgggcacggtgcccctccctatcctcttggccaggaaggtcccttcagtgaagaaaggatactccagccggagagtccagagccccagcagcaagagcaacgacaccctgagtggcatctcttccattgagcccagcaagcactcgggctcctcccacagtgtggcctcgatgatggcagtgaactcatccagccccacagccgcgtgctcgggactatgggatgccagagggatggaggagtctctgaccaccagcgacggcaatgcagagagcctgtacatgcaaggcatggagctgtttgaggaagctctgcagaagtgggagcaggcactaagcgtgggccagcggggggacagcggcagcacccccatgcccagggacggcctccggaacccagagactgcatcagagccactgtctgagccagagtcacagcggaaggagtttgcagagaagctggagtccctgctgcaccgtgcctaccacctgcaggaggagttcggctccaccttccccgcagacagcatgctgctagacctcgagaggaccctcatgctgcccctgaccgagggctcgctgcggctgcgggcggacgatgaggacagcctgacttcagaggattccttcttctccgccaccgagctctttgagtccctgcagactggagattacccgatcccactctccagacccgccgctgcctatgaggaggccctgcagctggtgaaggaggggagagtgccttgccggaccctcaggacggagctgctgggctgctacagtgaccaggactttctggccaagctgcactgtgtgcggcaggccttcgaggggcttctggaagacaagagtaaccagcttttcttcgggaaagtgggccgacagatggtgacaggcctgatgaccaaggctgagaagagccccaaaggcttcctggagagctacgaggagatgctgagctatgccctgcggcccgagacctgggccacaacacggctggagctggagggccgaggggtggtatgcatgagcttcttcgacatcgtgctggacttcatcctcatggacgccttcgaggacctggagaaccctccggcctcggtgctcgccgtcctgcggaaccgctggctgtcagacagcttcaaggagacggccttggccactgcttgctggtcggtcctgaaagccaagaggaggctgctgatggtgcctgatggcttcatctcccatttctactccgtatcggagcatgtgagccctgtcctagccttcggcttccttggacccaagcctcagcttgctgaagtctgtgctttcttcaagcaccagattgtgcagtacctgagggacatgttcgacctggacaatgtgcgctacacgtcactgcccgcgctggcagacgacatcctgcagctgtcccggcgccgcagcgagatattgctggggtacctgggggtgcccgcggccagcagcgcaggcgtgaatggggcgctgccccgagagaatgggcccctgggggagctgcagtagaggcggcacgggctggggggtggcagagagaaggctcctcctcccttccctgggttggtatctgacagctgtggtggctgagggccgttgcccctgactttgccccacccccatcatctgggagtccccaaggcccagaggggacatttccatggagaagaacggttcctgggggaagcagaggccaggaccagtggggcctgtgggagagaaaggctgtgagagagggggttgttgtggagaattgggacaggcagagccaggatgccccaggtgggggaccccaaaacctcccatcgctccagggctgctgacaagggtgctgggagggtggaggtgaaggatggggcctagagccctgtggtgaaggtcacagtgtcctgagctagaagccacctgtggctatatggtctcagcatccagctggcctgtcctgatgccctccccacctcaaccgccttctcagagagtttgcaactccagagaaggagagtggggccaccttagtgggcagcaggcctgggccatccagagatggggcagaggtgggcctcccactcctgtgctctcttctgagcaggaactgggcccttgacagtgtcctttgacattccctcgccctaccaaagatcgtcttttctcctcccacctctgtcaccaccaaagacgggcggaggtggggctgggccctcctgcccccgcccatcccccttccatgagcccagacctccctgggtggtgctaggctctgagctgggggctcagaccagggatcgctcaggcccctgtcacctgtgggcccggggaccacttgggggaggtcagaggatgtatgtggccggaccagcttccccaccttcattaggacaagaaactgcccagcactttgccttcagttcaacgcacaaacgctcctggggcctcatgggggcagagcctcccctgggcctgcagagagtcctgttagcagcgacgtccccccgccgcggggtcctgtcagcccggcagtgtcttctcagtgtcttcacctgagcgagtgtctgtggccccaacgcgttctgctgtggctctgccctttccaggttgagaggcctgcaggagaaacacactcccctcctgggtttccacactcaggaggtcagaggactggctcctgtgaccagggcccctctcccctgaatgggaaaggggtctggggatgggagggcgcaccacagagaggagatgatgctgggtgtggcccatcttctgtgggccccttcccagacaccggatccatgggcactaacccgcctcccaggctgatgcccggaggcagcttcctgggcaggagggttccatgggcactaacccacctcccaggctgatgcctggaggcagcctccagggcaggaaggaccctgtgctccccgccccccatcctgacatcctgttcttttgcacttaccctgtgctgtgaatgtaacagtgggccttggccccgcccactctgatttgcattttcatttgtgtttgtttacacatccatgcactgcctgtagcagtcgattgtcacagcttcgacttttggatggtagagtgtgtgcactgactgtgagtcgaataaacaattgagacgatttccttcca

SEQ ID NO: 132895 - DNA, 4345 bp, Homo sapiens
  Payload ID: 5968
  Gene Symbol: FAM73B
  Gene Name: family with sequence similarity 73, member B
  Uniprot ID: Q7L4E1
  ENST ID: ENST00000439290
  CDS Start-End: 182-1153
gaaggagacgctgcccttccgcagcgatggcatcccggctctgtggaggggccctctggtatgtgtgtccctgtccttctggggcgtggatggtgcctgggacccagctggcaaccagttgaagacgttctccttggaagctcttggccctgaggactttgcctggggcattggccctgccatggcgttccggagggccgagggcacgtctatgatccaggccctggccatgacggtggccgagatccccgtgttcctgtacacgacgtttgggcagtctgcattctcccagctacggttgacgccaggcctgcggaaagtcctctttgccacggccctggggactgtggccctggccctggctgcccaccagctgaagaggcgacggaggaggaagaagcaggttggtcccgagatgggaggggagcagctgggcacggtgcccctccctatcctcttggccaggaaggtcccttcagtgaagaaaggatactccagccggagagtccagagccccagcagcaagagcaacgacaccctgagtggcatctcttccattgagcccagcaagcactcgggctcctcccacagtgtggcctcgatgatggcagtgaactcatccagccccacagccgcgtgctcgggactatgggatgccagagggatggaggagtctctgaccaccagcgacggcaatgcagagagcctgtacatgcaaggcatggagctgtttgaggaagctctgcagaagtgggagcaggcactaagcgtgggccagcggggggacagcggcagcacccccatgcccagggacggcctccggaacccagagactgcatcagagccactgtctgagacggagtctcactctgttgccaggctggagtgcagtggcgcgatctcggctcagtgcaacctccgcttcctgggttcaagagattctcctgcctcagcctcccaagtagctgggattacagccagagtcacagcggaaggagtttgcagagaagctggagtccctgctgcaccgtgcctaccacctgcaggaggagttcggctccaccttccccgcagacagcatgctgctagacctcgagaggaccctcatgctgcccctgaccgagggctcgctgcggctgcgggcggacgatgaggacagcctgacttcagaggattccttcttctccgccaccgagctctttgagtccctgcagactggagattacccgatcccactctccagacccgccgctgcctatgaggaggccctgcagctggtgaaggaggggagagtgccttgccggaccctcaggacggagctgctgggctgctacagtgaccaggactttctggccaagctgcactgtgtgcggcaggccttcgaggggcttctggaagacaagagtaaccagcttttcttcgggaaagtgggccgacagatggtgacaggcctgatgaccaaggctgagaagagccccaaaggcttcctggagagctacgaggagatgctgagctatgccctgcggcccgagacctgggccacaacacggctggagctggagggccgaggggtggtatgcatgagcttcttcgacatcgtgctggacttcatcctcatggacgccttcgaggacctggagaaccctccggcctcggtgctcgccgtcctgcggaaccgctggctgtcagacagcttcaaggagacggtgggtcactgccctgctctcagacccacacttgctcacatcagcccgtgtggttgcctggctccgtcccctctgtccctagcactggcaccagggctgggcccccaccccctagatccgcggctgccaggcctgggagaccagagtctgccctggagaagcctccagggtgccccgttgctgcctggtgccccagtttagaaccaacatggtgtgcgctttcttcctattgtgtggttttacttttgtgctggtatgaattcgattccattttaatgcatcctgttaaatcaagttaaaagaggggaaagcaaaaccaaaaggaaaaaaaggcacagagtgagagacaacccagcacaggacccccaggaaggcaagcagtaacgctccagcagccgggctgtgctgcctgggcccaggcttctgcgaggtggtttacaggcgggaaccattgctcccacaaccaccaaaggaggtgggagtgctgtgttgtgcccctttacagaagaggagaccgaggctcagagaagatccagcagtaagattagagtcaagattcaagtttaggtatgtctgagtccaaaatcagaggaggaagcagcagagcttaggcacctggccccatcttcctgcttggagtggggccttggccactgcttgctggtcggtcctgaaagccaagaggaggctgctgatggtgcctgatggcttcatctcccatttctactccgtatcggagcatgtgagccctgtcctagccttcggcttccttggacccaagcctcagcttgctgaagtctgtgctttcttcaagcaccagattgtgcagtacctgagggacatgttcgacctggacaatgtgcgctacacgtcactgcccgcgctggcagacgacatcctgcagctgtcccggcgccgcagcgagatattgctggggtacctgggggtgcccgcggccagcagcgcaggcgtgaatggggcgctgccccgagagaatgggcccctgggggagctgcagtagaggcggcacgggctggggggtggcagagagaaggctcctcctcccttccctgggttggtatctgacagctgtggtggctgagggccgttgcccctgactttgccccacccccatcatctgggagtccccaaggcccagaggggacatttccatggagaagaacggttcctgggggaagcagaggccaggaccagtggggcctgtgggagagaaaggctgtgagagagggggttgttgtggagaattgggacaggcagagccaggatgccccaggtgggggaccccaaaacctcccatcgctccagggctgctgacaagggtgctgggagggtggaggtgaaggatggggcctagagccctgtggtgaaggtcacagtgtcctgagctagaagccacctgtggctatatggtctcagcatccagctggcctgtcctgatgccctccccacctcaaccgccttctcagagagtttgcaactccagagaaggagagtggggccaccttagtgggcagcaggcctgggccatccagagatggggcagaggtgggcctcccactcctgtgctctcttctgagcaggaactgggcccttgacagtgtcctttgacattccctcgccctaccaaagatcgtcttttctcctcccacctctgtcaccaccaaagacgggcggaggtggggctgggccctcctgcccccgcccatcccccttccatgagcccagacctccctgggtggtgctaggctctgagctgggggctcagaccagggatcgctcaggcccctgtcacctgtgggcccggggaccacttgggggaggtcagaggatgtatgtggccggaccagcttccccaccttcattaggacaagaaactgcccagcactttgccttcagttcaacgcacaaacgctcctggggcctcatgggggcagagcctcccctgggcctgcagagagtcctgttagcagcgacgtccccccgccgcggggtcctgtcagcccggcagtgtcttctcagtgtcttcacctgagcgagtgtctgtggccccaacgcgttctgctgtggctctgccctttccaggttgagaggcctgcaggagaaacacactcccctcctgggtttccacactcaggaggtcagaggactggctcctgtgaccagggcccctctcccctgaatgggaaaggggtctggggatgggagggcgcaccacagagaggagatgatgctgggtgtggcccatcttctgtgggccccttcccagacaccggatccatgggcactaacccgcctcccaggctgatgcccggaggcagcttcctgggcaggagggttccatgggcactaacccacctcccaggctgatgcctggaggcagcctccagggcaggaaggaccctgtgctccccgccccccatcctgacatcctgttcttttgcacttaccctgtgctgtgaatgtaacagtgggccttggccccgcccactctgatttgcattttcatttgtgtttgtttacacatccatgcactgcctgtagcagtcgattgtcacagcttcgacttttggatggtagagtgtgtgcactgactgtgagtcgaataaacaattgagacg

SEQ ID NO: 132896 - DNA, 3598 bp, Homo sapiens
  Payload ID: 5968
  Gene Symbol: FAM73B
  Gene Name: family with sequence similarity 73, member B
  Uniprot ID: Q7L4E1
  ENST ID: ENST00000445183
  CDS Start-End: 180-1229
aggagacgctgcccttccgcagcgatggcatcccggctctgtggaggggccctctggtatgtgtgtccctgtccttctggggcgtggatggtgcctgggacccagctggcaaccagttgaagacgttctccttggaagctcttggccctgaggactttgcctggggcattggccctgccatggcgttccggagggccgagggcacgtctatgatccaggccctggccatgacggtggccgagatccccgtgttcctgtacacgacgtttgggcagtctgcattctcccagctacggttgacgccaggcctgcggaaagtcctctttgccacggccctggggactgtggccctggccctggctgcccaccagctgaagaggcgacggaggaggaagaagcaggttggtcccgagatgggaggggagcagctgggcacggtgcccctccctatcctcttggccaggaaggtcccttcagtgaagaaaggatactccagccggagagtccagagccccagcagcaagagcaacgacaccctgagtggcatctcttccattgagcccagcaagcactcgggctcctcccacagtgtggcctcgatgatggcagtgaactcatccagccccacagccgcgtgctcgggactatgggatgccagagggatggaggagtctctgaccaccagcgacggcaatgcagagagcctgtacatgcaaggcatggagctgtttgaggaagctctgcagaagtgggagcaggcactaagcgtgggccagcggggggacagcggcagcacccccatgcccagggacggcctccggaacccagagactgcatcagagccactgtctgagccagagtcacagcggaaggagtttgcagagaagctggagtccctgctgcaccgtgcctaccacctgcaggaggagttcggctccaccttccccgcagacagcatgctgctagacctcgagaggaccctcatgctgcccctgaccgagggctcgctgcggctgcgggcggacgatgaggacagcctgacttcagaggattccttcttctccgccaccgagctctttgagtccctgcagactggagattacccgatcccactctccagacccgccgctgcctatgaggaggccctgcagctggtgaaggaggggagagtgccttgccggaccctcagagccccaaaggcttcctggagagctacgaggagatgctgagctatgccctgcggcccgagacctgggccacaacacggctggagctggagggccgaggggccaaggcagagggaggaatggcctcagctacacccgttgcacagcagagcgggaaagacgtgtcccccccacgtgtgctcatgccctggaccccagcttcagtctccccatctggaaagtggccccgaggctccggcagtgcccccatgcatgagcctcccgggggcaccctctgtaggtggtatgcatgagcttcttcgacatcgtgctggacttcatcctcatggacgccttcgaggacctggagaaccctccggcctcggtgctcgccgtcctgcggaaccgctggctgtcagacagcttcaaggagacggccttggccactgcttgctggtcggtcctgaaagccaagaggaggctgctgatggtgcctgatggcttcatctcccatttctactccgtatcggagcatgtgagccctgtcctagccttcggcttccttggacccaagcctcagcttgctgaagtctgtgctttcttcaagcaccagattgtgcagtacctgagggacatgttcgacctggacaatgtgcgctacacgtcactgcccgcgctggcagacgacatcctgcagctgtcccggcgccgcagcgagatattgctggggtacctgggggtgcccgcggccagcagcgcaggcgtgaatggggcgctgccccgagagaatgggcccctgggggagctgcagtagaggcggcacgggctggggggtggcagagagaaggctcctcctcccttccctgggttggtatctgacagctgtggtggctgagggccgttgcccctgactttgccccacccccatcatctgggagtccccaaggcccagaggggacatttccatggagaagaacggttcctgggggaagcagaggccaggaccagtggggcctgtgggagagaaaggctgtgagagagggggttgttgtggagaattgggacaggcagagccaggatgccccaggtgggggaccccaaaacctcccatcgctccagggctgctgacaagggtgctgggagggtggaggtgaaggatggggcctagagccctgtggtgaaggtcacagtgtcctgagctagaagccacctgtggctatatggtctcagcatccagctggcctgtcctgatgccctccccacctcaaccgccttctcagagagtttgcaactccagagaaggagagtggggccaccttagtgggcagcaggcctgggccatccagagatggggcagaggtgggcctcccactcctgtgctctcttctgagcaggaactgggcccttgacagtgtcctttgacattccctcgccctaccaaagatcgtcttttctcctcccacctctgtcaccaccaaagacgggcggaggtggggctgggccctcctgcccccgcccatcccccttccatgagcccagacctccctgggtggtgctaggctctgagctgggggctcagaccagggatcgctcaggcccctgtcacctgtgggcccggggaccacttgggggaggtcagaggatgtatgtggccggaccagcttccccaccttcattaggacaagaaactgcccagcactttgccttcagttcaacgcacaaacgctcctggggcctcatgggggcagagcctcccctgggcctgcagagagtcctgttagcagcgacgtccccccgccgcggggtcctgtcagcccggcagtgtcttctcagtgtcttcacctgagcgagtgtctgtggccccaacgcgttctgctgtggctctgccctttccaggttgagaggcctgcaggagaaacacactcccctcctgggtttccacactcaggaggtcagaggactggctcctgtgaccagggcccctctcccctgaatgggaaaggggtctggggatgggagggcgcaccacagagaggagatgatgctgggtgtggcccatcttctgtgggccccttcccagacaccggatccatgggcactaacccgcctcccaggctgatgcccggaggcagcttcctgggcaggagggttccatgggcactaacccacctcccaggctgatgcctggaggcagcctccagggcaggaaggaccctgtgctccccgccccccatcctgacatcctgttcttttgcacttaccctgtgctgtgaatgtaacagtgggccttggccccgcccactctgatttgcattttcatttgtgtttgtttacacatccatgcactgcctgtagcagtcgattgtcacagcttcgacttttggatggtagagtgtgtgcactgactgtgagtcgaataaacaattgagacg

SEQ ID NO: 132897 - DNA, 563 bp, Homo sapiens
  Payload ID: 5968
  Gene Symbol: FAM73B
  Gene Name: family with sequence similarity 73, member B
  ENST ID: ENST00000450073
  CDS Start-End: 265-563
agcggcgccagagggtacctgggctggagcgcagtggccccatcttggctcactgccacctccacctcccaggttcaagccggttctcctgcttcagcctcttgagtagctgggattacagctctgtggaggggccctctggtatgtgtgtccctgtccttctggggcgtggatggtgcctgggacccagctggcaaccagttgaagacgttctccttggaagctcttggccctgaggactttgcctggggcattggccctgccatggcgttccggagggccgagggcacgtctatgatccaggccctggccatgacggtggccgagatccccgtgttcctgtacacgacgtttgggcagtctgcattctcccagctacggttgacgccaggcctgcggaaagtcctctttgccacggccctggggactgtggccctggccctggctgcccaccagctgaagaggcgacggaggaggaagaagcaggttggtcccgagatgggaggggagcagctgggcacggtgcccctccctatcctcttggccaggaaggtcccttcagt

SEQ ID NO: 132898 - DNA, 574 bp, Homo sapiens
  Payload ID: 5968
  Gene Symbol: FAM73B
  Gene Name: family with sequence similarity 73, member B
  ENST ID: ENST00000414342
  CDS Start-End: 1-432
aagctgcactgtgtgcggcaggccttcgaggggcttctggaagacaagagtaaccagcttttcttcgggaaagtgggccgacagatggtgacaggcctgatgaccaaggctgagaagagccccaaaggcttcctggagagctacgaggagatgctgagctatgccctgcggcccgagacctgggccacaacacggctggagctggagggccgagggtccccggttcctgccctgccccaggccaaggcagagggaggaatggcctcagctacacccgttgcacagcagagcgggaaagacgtgtcccccccacgtgtgctcatgccctggaccccagcttcagtctccccatctggaaagtggccccgaggctccggcagtgcccccatgcatgagcctcccgggggcaccctctgtaggtggtatgcatgagcttcttcgacatcgtgctggacttcatcctcatggacgccttcgaggacctggagaaccctccggcctcggtgctcgccgtcctgcggaaccgctggctgtcagacagcttcaaggagacggccttggccactgcttgctg

SEQ ID NO: 132899 - DNA, 1050 bp, Homo sapiens
  Payload ID: 5969
  Gene Symbol: FAM76A
  Gene Name: family with sequence similarity 76, member A
  Uniprot ID: Q8TAV0
  ENST ID: ENST00000010299
  CDS Start-End: 25-1050
cggtgagcgcggcccgggccggacatggcggcgctctacgcctgcaccaagtgccaccagcgcttccccttcgaggcgctgtctcaggggcagcagctgtgcaaggaatgtcggattgcacaccctgttgtgaagtgcacctactgcaggactgagtaccagcaggagaggctagagtgcaatggcacgatctcggctcactgcaacctccacctcccaggttcaagcgattctcctgcctcatcctcccgagtagctgggattacaggcattaaaaccaatacaatatgcaagaaatgtgctcagaacgtgcagttgtatggaacgcccaaaccttgtcagtattgcaacataattgcagcatttattgggaataaatgccagcgctgcacaaattcagaaaagaagtatggaccaccctattcttgtgaacagtgcaagcagcagtgtgcatttgacaggaaagatgatagaaagaaggtagatgggaaattgctgtgctggctgtgcacactttcatacaaacgggtccttcagaagaccaaagagcagaggaaacacctgagtagctcttctcgtgctggccaccaggagaaggagcagtatagtcgcctgagtggtggtggccattataacagccagaaaacactttctacatcttcaattcaaaatgaaatcccaaagaaaaagtccaagtttgagtcaatcacaactaatggagacagcttctccccagacctggctctggactcaccaggcactgaccactttgtcatcattgcccaactgaaggaagaagtggctaccctgaagaagatgttgcatcaaaaggatcaaatgattttagagaaagagaagaagattacagagttgaaggctgattttcagtaccaggaatcgcagatgagagccaaaatgaaccagatggagaaaacccacaaagaagtcacagaacaactgcaggccaaaaaccgagagctcctgaagcaggcagctgctttgtccaagagcaagaagtcagagaagtcaggagctataacctctccatga

SEQ ID NO: 132900 - DNA, 992 bp, Homo sapiens
  Payload ID: 5969
  Gene Symbol: FAM76A
  Gene Name: family with sequence similarity 76, member A
  Uniprot ID: Q8TAV0
  ENST ID: ENST00000234549
  CDS Start-End: 54-992
agataaatcggcgggccgggccggcgggtcggtgagcgcggcccgggccggacatggcggcgctctacgcctgcaccaagtgccaccagcgcttccccttcgaggcgctgtctcaggggcagcagctgtgcaaggaatgtcggattgcacaccctgttgtgaagtgcacctactgcaggactgagtaccagcaggagaggctagagtgcaatggcacgatctcggctcactgcaacctccacctcccaggttcaagcgattctcctgcctcatcctcccgagtagctgggattacaggcattaaaaccaatacaatatgcaagaaatgtgctcagaacgtgcagttgtatggaacgcccaaaccttgtcagtattgcaacataattgcagcatttattgggaataaatgccagcgctgcacaaattcagaaaagaagtatggaccaccctattcttgtgaacagtgcaagcagcagtgtgcatttgacaggaaagatgatagaaagaaggtagatgggaaattgctgtgctggctgtgcacactttcatacaaacgggtccttcagaagaccaaagagcagaggaaacacctgagtagctcttctcgtgctggccaccaggagaaggagcagtatagtcgcctgagtggtggtggccattataacagcttctccccagacctggctctggactcaccaggcactgaccactttgtcatcattgcccaactgaaggaagaagtggctaccctgaagaagatgttgcatcaaaaggatcaaatgattttagagaaagagaagaagattacagagttgaaggctgattttcagtaccaggaatcgcagatgagagccaaaatgaaccagatggagaaaacccacaaagaagtcacagaacaactgcaggccaaaaaccgagagctcctgaagcaggcagctgctttgtccaagagcaagaagtcagagaagtcaggagctataacctctccatga

SEQ ID NO: 132901 - DNA, 2273 bp, Homo sapiens
  Payload ID: 5969
  Gene Symbol: FAM76A
  Gene Name: family with sequence similarity 76, member A
  Uniprot ID: Q8TAV0
  ENST ID: ENST00000373949
  CDS Start-End: 54-890
agataaatcggcgggccgggccggcgggtcggtgagcgcggcccgggccggacatggcggcgctctacgcctgcaccaagtgccaccagcgcttccccttcgaggcgctgtctcaggggcagcagctgtgcaaggaatgtcggattgcacaccctgttgtgaagtgcacctactgcaggactgagtaccagcaggagagtaaaaccaatacaatatgcaagaaatgtgctcagaacgtgcagttgtatggaacgcccaaaccttgtcagtattgcaacataattgcagcatttattgggaataaatgccagcgctgcacaaattcagaaaagaagtatggaccaccctattcttgtgaacagtgcaagcagcagtgtgcatttgacaggaaagatgatagaaagaaggtagatgggaaattgctgtgctggctgtgcacactttcatacaaacgggtccttcagaagaccaaagagcagaggaaacacctgagtagctcttctcgtgctggccaccaggagaaggagcagtatagtcgcctgagtggtggtggccattataacagcttctccccagacctggctctggactcaccaggcactgaccactttgtcatcattgcccaactgaaggaagaagtggctaccctgaagaagatgttgcatcaaaaggatcaaatgattttagagaaagagaagaagattacagagttgaaggctgattttcagtaccaggaatcgcagatgagagccaaaatgaaccagatggagaaaacccacaaagaagtcacagaacaactgcaggccaaaaaccgagagctcctgaagcaggcagctgctttgtccaagagcaagaagtcagagaagtcaggagctataacctctccatgacagacctcaaggaggctccctagcaacagcaaatggagttgtccagggttagggttggagacctggctgttctgtgggaattgcaagctttcttaagaaatctctattttattacagttatccttctttgtgcgattgcagtgggctgaatggaaacacctggtttgtgctgtgttagactgcatgcttgagtgtttgggatttcaagctcgctctctttctctcactattaggacttttctttttcttcttcctcttctctctattttggttctattctttttttttcttttttctttttttttttttttttttttttgtggtggtcactgctcagtgtaatgtgcagaatgatttgttttttgtttttttttttttttttggtccttcattgcatcctgccatacccatgagcaaacagtttggcattaattatatatcactgccaccctctgaactttgaaaactgccatcttcagacttggtataatggaagaggctttctctctccaataaaccttttgcttcagggtatactcttcggtttttttccagatgtattatgtatgaactttgtactatgtatagccagagttttatttattttttaaaaaagaaactttttcttgataaaggaataatggtggtctagctagttcttgtaaaagtgatgcctcttgaaaaaaaaacagtcctattcactagcttttagtaaaagaatcagatcttttctttcttgttaccttggagtcttaaaaactgattgctaaggtgaaacaattcaatgcataagtatggagctaagtgccttttggaggatttcttggaagagcatttatggagatacttaagggaggtagcaaagatttgaaccgtctgtctttttaagtaagggcagaaagcaaggttgtccaggttgtactggacacttctctccccacccctttcctgattgttttatgtgattgattttaaattctcacactgccacttctttaaaaaataaaatcctttatttgcttatatcagttgtcatactgggctgctgtcagagaatgtttttttacatgaatgaacagattaaaaatggaataatatggtcgggtgcggtggctcacgcctgtaataccagcaatttgggaggccaaggcgggtggatcatttgaggttaggagtttgagaccatcctggccaacatggtaaaaccccatctgtactaaaaaaatacaaaaattagccgggcctggtggcatgcacctgtaatcccagctacccaggaggctgaggcaggagaactgctcgaatcccgggaggcagaggttgcaatgagctgaaatcgcaacactgcactgcagcctgggcaatggagtgagactccgtctc

SEQ ID NO: 132902 - DNA, 3567 bp, Homo sapiens
  Payload ID: 5969
  Gene Symbol: FAM76A
  Gene Name: family with sequence similarity 76, member A
  Uniprot ID: Q8TAV0
  ENST ID: ENST00000373954
  CDS Start-End: 103-1026
gccgcagccagcagcctgcagccgccgccgggttgtgcctcagactgtcagataaatcggcgggccgggccggcgggtcggtgagcgcggcccgggccggacatggcggcgctctacgcctgcaccaagtgccaccagcgcttccccttcgaggcgctgtctcaggggcagcagctgtgcaaggaatgtcggattgcacaccctgttgtgaagtgcacctactgcaggactgagtaccagcaggagagtaaaaccaatacaatatgcaagaaatgtgctcagaacgtgcagttgtatggaacgcccaaaccttgtcagtattgcaacataattgcagcatttattgggaataaatgccagcgctgcacaaattcagaaaagaagtatggaccaccctattcttgtgaacagtgcaagcagcagtgtgcatttgacaggaaagatgatagaaagaaggtagatgggaaattgctgtgctggctgtgcacactttcatacaaacgggtccttcagaagaccaaagagcagaggaaacacctgagtagctcttctcgtgctggccaccaggagaaggagcagtatagtcgcctgagtggtggtggccattataacagccagaaaacactttctacatcttcaattcaaaatgaaatcccaaagaaaaagtccaagtttgagtcaatcacaactaatggagacagcttctccccagacctggctctggactcaccaggcactgaccactttgtcatcattgcccaactgaaggaagaagtggctaccctgaagaagatgttgcatcaaaaggatcaaatgattttagagaaagagaagaagattacagagttgaaggctgattttcagtaccaggaatcgcagatgagagccaaaatgaaccagatggagaaaacccacaaagaagtcacagaacaactgcaggccaaaaaccgagagctcctgaagcaggcagctgctttgtccaagagcaagaagtcagagaagtcaggagctataacctctccatgacagacctcaaggaggctccctagcaacagcaaatggagttgtccagggttagggttggagacctggctgttctgtgggaattgcaagctttcttaagaaatctctattttattacagttatccttctttgtgcgattgcagtgggctgaatggaaacacctggtttgtgctgtgttagactgcatgcttgagtgtttgggatttcaagctcgctctctttctctcactattaggacttttctttttcttcttcctcttctctctattttggttctattctttttttttcttttttctttttttttttttttttttttttgtggtggtcactgctcagtgtaatgtgcagaatgatttgttttttgtttttttttttttttttggtccttcattgcatcctgccatacccatgagcaaacagtttggcattaattatatatcactgccaccctctgaactttgaaaactgccatcttcagacttggtataatggaagaggctttctctctccaataaaccttttgcttcagggtatactcttcggtttttttccagatgtattatgtatgaactttgtactatgtatagccagagttttatttattttttaaaaaagaaactttttcttgataaaggaataatggtggtctagctagttcttgtaaaagtgatgcctcttgaaaaaaaaacagtcctattcactagcttttagtaaaagaatcagatcttttctttcttgttaccttggagtcttaaaaactgattgctaaggtgaaacaattcaatgcataagtatggagctaagtgccttttggaggatttcttggaagagcatttatggagatacttaagggaggtagcaaagatttgaaccgtctgtctttttaagtaagggcagaaagcaaggttgtccaggttgtactggacacttctctccccacccctttcctgattgttttatgtgattgattttaaattctcacactgccacttctttaaaaaataaaatcctttatttgcttatatcagttgtcatactgggctgctgtcagagaatgtttttttacatgaatgaacagattaaaaatggaataatatggtcgggtgcggtggctcacgcctgtaataccagcaatttgggaggccaaggcgggtggatcatttgaggttaggagtttgagaccatcctggccaacatggtaaaaccccatctgtactaaaaaaatacaaaaattagccgggcctggtggcatgcacctgtaatcccagctacccaggaggctgaggcaggagaactgctcgaatcccgggaggcagaggttgcaatgagctgaaatcgcaacactgcactgcagcctgggcaatggagtgagactccgtctcaaaaaaaaaaaaaaaaggaataatatttgaactacagagcatttttggggtcagcatgagctgctctagtaaggactcttgagtctgggaaaagtggtatcactataccttctccccactcctcacccacccgagcccatacactccctgcttttcatggatatgtattgaaaacaggtgcttctcagaagcactttgcctcaaccagagttatgtatgccctgcctatcttcccttcttaaccctgtaggaatatggatttacttttccaggaaaggggatagatttacatttctaggcatactctcaggtcctctatgtgatgtttgtgaaaggaattagggtgtgtcatgtgtgccatgaaacaacaaaaccaactaccctagaatcatttatgcagggggtactagagttagaaataataatgagggcagataacatttgtacctcagtctaccaaaaaattatagtactaaatttaacttctaggcgtttcctggaagcagatgctctataatttgtgatagcattctcataaatggagtcctacacataattggacagagatgtggaaatggtggtttccttctgataagggatacagtggaccatgtcgcttatatatcaccctactaggggatataattttcccttctaagcaagggaaatggcagtgctaaatagttttgtaaagtttttgaatgagaagcttttaggtaaagataaactgtcataatatttttcagatgcatttgcattgactatgggagaaaaattagggggaaatgacagtcatggtgtttttttttaattttaaggactgaaattctgttacatgatgtatgacaatataaaaacatacttagttttatactaaatctttttttaaggtcttggcatttaatataaagcaaattcacacgttttctaactttccataagttccaaaaagggaaagaagaaacctcagtcttgaaattttgatttttaaaaatcatgacactgttttaccatgaaattgagtagctaacttttggtaacaccttttgtttctttgtatgtttgtaataatggacattttaaaacacaggaatgttttggtttgtacagactttgacaaatgtgtgttaataaaaattcatattgactcaagtgtaa

SEQ ID NO: 132903 - DNA, 504 bp, Homo sapiens
  Payload ID: 5969
  Gene Symbol: FAM76A
  Gene Name: family with sequence similarity 76, member A
  ENST ID: ENST00000446647
  CDS Start-End: 1-375
cagtatagtcgcctgagtggtggtggccattataacagcttctccccagacctggctctggactcaccaggcactgaccactttgtcatcattgcccaactgaaggaagaagtggctaccctgaagaagatgttgcatcaaaaggatcaaatgattttagagaaagagaagaagattacagagttgaaggctgattttcagtaccaggaatcgcagatgagagccaaaatgaaccagatggagaaaacccacaaagaagtcacagaacaactgcagagatgggctctcgctatattgcctgggctagtcttgaactcctggcttcaagcaatcctcccacctcaacctcacaaagtgctaggattacaggcgtgagccaccatgcccagcctgtagatactttgtattgtttcactcttggatgtgttctgatcttttcccctcaaaaacagtagaattattaagtatgttctttgatttttgaataaaccagatgtgattcca

SEQ ID NO: 132904 - DNA, 1661 bp, Homo sapiens
  Payload ID: 5969
  Gene Symbol: FAM76A
  Gene Name: family with sequence similarity 76, member A
  Uniprot ID: Q8TAV0
  ENST ID: ENST00000419687
  CDS Start-End: 86-769
gcagccgccgccgggttgtgcctcagactgtcagataaatcggcgggccgggccggcgggtcggtgagcgcggcccgggccggacatggcggcgctctacgcctgcaccaagtgccaccagcgcttccccttcgaggcgctgtctcaggggcagcagctgtgcaaggaatgtcggattgcacaccctgttgtgaagtgcacctactgcaggactgagtaccagcaggagagtaaaaccaatacaatatgcaagaaatgtgctcagaacgtgcagttgtatggaacggtagatgggaaattgctgtgctggctgtgcacactttcatacaaacgggtccttcagaagaccaaagagcagaggaaacacctgagtagctcttctcgtgctggccaccaggagaaggagcagtatagtcgcctgagtggtggtggccattataacagcttctccccagacctggctctggactcaccaggcactgaccactttgtcatcattgcccaactgaaggaagaagtggctaccctgaagaagatgttgcatcaaaaggatcaaatgattttagagaaagagaagaagattacagagttgaaggctgattttcagtaccaggaatcgcagatgagagccaaaatgaaccagatggagaaaacccacaaagaagtcacagaacaactgcaggccaaaaaccgagagctcctgaagcaggcagctgctttgtccaagagcaagaagtcagagaagtcaggagctataacctctccatgacagacctcaaggaggctccctagcaacagcaaatggagttgtccagggttagggttggagacctggctgttctgtgggaattgcaagctttcttaagaaatctctattttattacagttatccttctttgtgcgattgcagtgggctgaatggaaacacctggtttgtgctgtgttagactgcatgcttgagtgtttgggatttcaagctcgctctctttctctcactattaggacttttctttttcttcttcctcttctctctattttggttctattctttttttttcttttttctttttttttttttttttttttttgtggtggtcactgctcagtgtaatgtgcagaatgatttgttttttgtttttttttttttttttggtccttcattgcatcctgccatacccatgagcaaacagtttggcattaattatatatcactgccaccctctgaactttgaaaactgccatcttcagacttggtataatggaagaggctttctctctccaataaaccttttgcttcagggtatactcttcggtttttttccagatgtattatgtatgaactttgtactatgtatagccagagttttatttattttttaaaaaagaaactttttcttgataaaggaataatggtggtctagctagttcttgtaaaagtgatgcctcttgaaaaaaaaacagtcctattcactagcttttagtaaaagaatcagatcttttctttcttgttaccttggagtcttaaaaactgattgctaaggtgaaacaattcaatgcataagtatggagctaagtgccttttggaggatttcttggaagagcatttatggagatacttaagggaggtagcaaagatttgaaccgtctgtctttttaagtaa

SEQ ID NO: 132905 - DNA, 1027 bp, Homo sapiens
  Payload ID: 5969
  Gene Symbol: FAM76A
  Gene Name: family with sequence similarity 76, member A
  ENST ID: ENST00000530324
  CDS Start-End: 54-920
agataaatcggcgggccgggccggcgggtcggtgagcgcggcccgggccggacatggcggcgctctacgcctgcaccaagtgccaccagcgcttccccttcgaggcgctgtctcaggggcagcagctgtgcaaggaatgtcggattgcacaccctgttgtgaagtgcacctactgcaggactgagtaccagcaggagagtaaaaccaatacaatatgcaagaaatgtgctcagaacgtgcagttgtatggaacgcccaaaccttgtcagtattgcaacataattgcagcatttattgggaataaatgccagcgctgcacaaattcagaaaagaagtatggaccaccctattcttgtgaacagtgcaagcagcagtgtgcatttgacaggaaagatgatagaaagaaggtagatgggaaattgctgtgctggctgtgcacactttcatacaaacgggtccttcagaagaccaaagagcagaggaaacacctgagtagctcttctcgtgctggccaccaggagaaggagcagtatagtcgcctgagtggtggtggccattataacagccagaaaacactttctacatcttcaattcaaaatgaaatcccaaagaaaaagtccaagtttgagtcaatcacaactaatggagacagcttctccccagacctggctctggactcaccaggcactgaccactttgtcatcattgcccaactgaaggaagaagtggctaccctgaagaagatgttgcatcaaaaggatcaaatgattttagagaaagagaagaagattacagagttgaaggctgattttcagtaccaggaatcgcagatgagagccaaaatgaaccagatggagaaaacccacaaagaagtcacagaacaactgcaggtgactgactctgcttattttatgtgctaaaattgtgtacctacctggtatacctagctgattgtattttaagtgatcatctcttagatttcttttttttctcaaagtattaacaaatcatgttaatccccctttta

SEQ ID NO: 132906 - DNA, 3952 bp, Homo sapiens
  Payload ID: 5970
  Gene Symbol: FAM76B
  Gene Name: family with sequence similarity 76, member B
  Uniprot ID: Q5HYJ3
  ENST ID: ENST00000358780
  CDS Start-End: 314-1333
gaaggaagcggatccacggccgcacagctaaacagcaaccccctacccgcttcgtctccctccgccgctatcggggcctaagcgggagcggctggcacggcgtcactgggtgggctggggcggaagtggaggcggagggagacggtggcgtcgtccgcggggccctgggctctcgcggcgaggccctggtgggcgcgaggcagggggagggggaggaggaggagcccgcggcccgggcggcggcggctctcgggttctccgtagggccccgcctcggagcgggcggcggcggaggaggagactgaggagcaggatggcggcctcggccctgtacgcctgcaccaagtgtacccagcgttatcctttcgaggagctctcccagggccagcagctctgcaaggaatgtcggattgcacatcctattgtaaaatgtacttactgcagatcagaatttcaacaagagagcaaaactaacacaatttgtaagaagtgtgctcaaaatgtgaagcaatttgggacgcccaagccttgtcagtactgtaacataattgcagcatttattggtaccaagtgtcagcgttgcacaaattcagaaaaaaagtatggaccacctcagacctgtgaacagtgcaaacagcaatgtgcttttgatcggaaggaggaaggaagaagaaaggttgatggaaagttattatgctggctctgtactttatcgtacaaaagagttttacagaagacgaaagaacaaaggaagagcctgggatcttcacattcaaattcatcttcttcatctcttactgagaaagaccagcatcatccaaaacatcatcaccaccatcatcaccatcaccatcgtcacagcagtagccatcacaaaatcagcaatctaagtccagaagaagagcagggactgtggaaacagagccataaatcctctgcaacaattcagaatgaaactccaaagaaaaagcccaaattggaatctaagccatctaatggagatagtagctctataaatcagtcagcagatagtgggggaacagacaattttgtccttataagtcaattgaaagaagaagtgatgtcacttaagcgtctcttacagcagagagaccagaccattttagaaaaagataaaaagttaactgaactaaaggcagactttcagtaccaagagtcaaatttgagaacaaaaatgaacagtatggaaaaagcccacaaagaaactgtggaacaacttcaggccaaaaacagagaactactcaaacaggtcgcagcattatcaaagggtaaaaaatttgacaaaagtggaagcatactaacatctccttgagaaagtcatttgtttagcatttcttcttacaatgtaaatttggggaaaaaaaattctgtgaagcccttaaattctgtgtagtagaaaaatatttttgcacaccaaatgaattggtgtgtttcctgttcacttttgtaattgatatacagcattttttaagttgtaaaacattcaaataaaacttcaactggtttgaagtaactttttaattatttgatatccaggaacttttttgccagcaatagtattaaacagttgtaaaggagtgcatgagtagtgctctttatgaaacgcaacatgcaataatagagtaggtatggtttcagaagtcagagcagcagggtttttttgttttgtttttgttttacactatgctaatttcagacaaacagttttcaatttagaaatacaaaaacttttaaactcgaaaaatggcgaacactggttttttgggaattgtgtttttactttgcatcaagatgaatttaggagaaaatcacggtgcttttattaaatgaacttcagatatatgtaaatttgttttttaaagttacatcattaacattagtaacctagcattttcattattggtataggaattaatgtttattgtacagtatctaaggtaaaatgtgtttctgttttgtaaaaactactgtagatttttacttacaagtgcctttttgccacctaatgtttttatttataggaatgctgatcttttgtacatacattttgttttaaaatcatgtttaataaatgtttgtatataaatgcatatgtacagaagcctatttcaaaaggaaatcaaagttgctagtaaaatgtttgagattacatttagaactaactgataatgcatatagattgtagaaaattttgtgatttgtttctgtgtgataagggaagctgttggtctttgaattcatttaattatgtcaaaatagttccccaaagatttaattttaagttgcttcttaaagagtaattttattttttatgtcatgtggcttcatattagtattgtgtgagttacatgttttgctttatattttataaaattttttaaaaattttaatgtttctgcaatgatccatgtatctgctttccctatgtgtggttatctaagttaatatttatgtacaatgtaatttgtaaatttaaagcaaatctgaaaaaaattaaatgatctttttaatccaatctgtgataatctttgaataaattggaatctactataagattcaggcattataagtaaattgtcctaaagtctttaaaattgtctataaaaggttaaggtagggtgggataggttatatgaagttattgactatattctgatccagcggttttcagcctgaaatagaatttatctcctagttattatcagttcagagttttagtttgattttaaagtattgctagatacactgtatagagtgagttgcttctcttaataatttatgggcaaagataaatttgcttcatgtaaaactgttactaaatttataagttttaaaggttttgttttatacaagcattgattgtgaatgtcatatcaaagattggctttcttaagaacacatgattgaaacaatttttttttaacatgacgtgtttcaatagactgttctcatagttcattataaagtgaataccaaataattctttgtccattttgaaagcataatatagggtaattttcaagtgatacaaaaagattcagttagaatcttgtaaactaaaccagtttatttttatgggatcttcatgtaataattttcttaaatttagtactctcaaccatgatagataatgccttaacatggattttaacgtttgcaggatttgctaaattcataagatagttattacctttctttgaaatttgtaatgttttatattcttgtttcatagccatttgtcagtccacagtggtcattatggttttactttttgatagttcttacaccttgttggagaaactacaaaagaaagttgtcctcgtccttccccttagctaacatcaaaattaaaaagttgaatattaatattagctaacattaaaatggaaggtaattcagttttagtgttagctaacattaacagtctaataatttagctttgtaaattccaaggctaaaaccctttcatgggcttcacagtatttagtcctaattaaatacccttctttattccatgaccttattttataacttaaatttttttgcaattgtataaattagtaattcagtcccagtcctggatctctgtagtgttttgacataataaactgatattctttaaatgtggacctgtaaggagatactatggtgtggtgtattgtgcttttagcctgttttccactattaattagcatttaccagtaagggtcattttgactcaagttatttatgtattaatagcctgtgaatattgcagtcctttttagattatattggtctaaatatgcattctgcagtgaacctgttaagctgttcacatgtatagactattgaaatactgtacttgtacacatctgactgttgacattttgtacttttttctagatccaatatttcacaataaaaaacttgtcaaaggctttgtattagt

SEQ ID NO: 132907 - DNA, 3823 bp, Homo sapiens
  Payload ID: 5970
  Gene Symbol: FAM76B
  Gene Name: family with sequence similarity 76, member B
  Uniprot ID: Q5HYJ3
  ENST ID: ENST00000398187
  CDS Start-End: 138-839
ggcgaggccctggtgggcgcgaggcagggggagggggaggaggaggagcccgcggcccgggcggcggcggctctcgggttctccgtagggccccgcctcggagcgggcggcggcggaggaggagactgaggagcaggatggcggcctcggccctgtacgcctgcaccaagtgtacccagcgttatcctttcgaggagctctcccagggccagcagctctgcaaggaatgtcggattgcacatcctattgtaaaatgtacttactgcagatcagaatttcaacaagagagcaaaactaacacaatttgtaagaagtgtgctcaaaatgtgaagcaatttgggacgcccaagccttgtcagtactgtaacataattgcagcatttattggtaccaagtgtcagcgttgcacaaattcagaaaaaaagtatggaccacctcagacctgtgaacagtgcaaacagcaatgtgcttttgatcggaaggaggaaggaagaagaaaggttgatggaaagttattatgctggctctgtactttatcgtacaaaagagttttacagaagacgaaagaacaaaggaagagcctgggatcttcacattcaaattcatcttcttcatctcttactgagaaagaccagcatcatccaaaacatcatcaccaccatcatcaccatcaccatcgtcacagcagtagccatcacaaaatcagcaatctaagtccagaagaagagcagggactgtggaaacagagccataaatcctctgcaacaattcagaatgaaactccaaagaaaaagcccaaattggaatctaagccatctaatggagataggtgtatgtaatgtgtgccattagtaaggtaatttgccagttgcatccatttctgtcagtagctctataaatcagtcagcagatagtgggggaacagacaattttgtccttataagtcaattgaaagaagaagtgatgtcacttaagcgtctcttacagcagagagaccagaccattttagaaaaagataaaaagttaactgaactaaaggcagactttcagtaccaagagtcaaatttgagaacaaaaatgaacagtatggaaaaagcccacaaagaaactgtggaacaacttcaggccaaaaacagagaactactcaaacaggtcgcagcattatcaaagggtaaaaaatttgacaaaagtggaagcatactaacatctccttgagaaagtcatttgtttagcatttcttcttacaatgtaaatttggggaaaaaaaattctgtgaagcccttaaattctgtgtagtagaaaaatatttttgcacaccaaatgaattggtgtgtttcctgttcacttttgtaattgatatacagcattttttaagttgtaaaacattcaaataaaacttcaactggtttgaagtaactttttaattatttgatatccaggaacttttttgccagcaatagtattaaacagttgtaaaggagtgcatgagtagtgctctttatgaaacgcaacatgcaataatagagtaggtatggtttcagaagtcagagcagcagggtttttttgttttgtttttgttttacactatgctaatttcagacaaacagttttcaatttagaaatacaaaaacttttaaactcgaaaaatggcgaacactggttttttgggaattgtgtttttactttgcatcaagatgaatttaggagaaaatcacggtgcttttattaaatgaacttcagatatatgtaaatttgttttttaaagttacatcattaacattagtaacctagcattttcattattggtataggaattaatgtttattgtacagtatctaaggtaaaatgtgtttctgttttgtaaaaactactgtagatttttacttacaagtgcctttttgccacctaatgtttttatttataggaatgctgatcttttgtacatacattttgttttaaaatcatgtttaataaatgtttgtatataaatgcatatgtacagaagcctatttcaaaaggaaatcaaagttgctagtaaaatgtttgagattacatttagaactaactgataatgcatatagattgtagaaaattttgtgatttgtttctgtgtgataagggaagctgttggtctttgaattcatttaattatgtcaaaatagttccccaaagatttaattttaagttgcttcttaaagagtaattttattttttatgtcatgtggcttcatattagtattgtgtgagttacatgttttgctttatattttataaaattttttaaaaattttaatgtttctgcaatgatccatgtatctgctttccctatgtgtggttatctaagttaatatttatgtacaatgtaatttgtaaatttaaagcaaatctgaaaaaaattaaatgatctttttaatccaatctgtgataatctttgaataaattggaatctactataagattcaggcattataagtaaattgtcctaaagtctttaaaattgtctataaaaggttaaggtagggtgggataggttatatgaagttattgactatattctgatccagcggttttcagcctgaaatagaatttatctcctagttattatcagttcagagttttagtttgattttaaagtattgctagatacactgtatagagtgagttgcttctcttaataatttatgggcaaagataaatttgcttcatgtaaaactgttactaaatttataagttttaaaggttttgttttatacaagcattgattgtgaatgtcatatcaaagattggctttcttaagaacacatgattgaaacaatttttttttaacatgacgtgtttcaatagactgttctcatagttcattataaagtgaataccaaataattctttgtccattttgaaagcataatatagggtaattttcaagtgatacaaaaagattcagttagaatcttgtaaactaaaccagtttatttttatgggatcttcatgtaataattttcttaaatttagtactctcaaccatgatagataatgccttaacatggattttaacgtttgcaggatttgctaaattcataagatagttattacctttctttgaaatttgtaatgttttatattcttgtttcatagccatttgtcagtccacagtggtcattatggttttactttttgatagttcttacaccttgttggagaaactacaaaagaaagttgtcctcgtccttccccttagctaacatcaaaattaaaaagttgaatattaatattagctaacattaaaatggaaggtaattcagttttagtgttagctaacattaacagtctaataatttagctttgtaaattccaaggctaaaaccctttcatgggcttcacagtatttagtcctaattaaatacccttctttattccatgaccttattttataacttaaatttttttgcaattgtataaattagtaattcagtcccagtcctggatctctgtagtgttttgacataataaactgatattctttaaatgtggacctgtaaggagatactatggtgtggtgtattgtgcttttagcctgttttccactattaattagcatttaccagtaagggtcattttgactcaagttatttatgtattaatagcctgtgaatattgcagtcctttttagattatattggtctaaatatgcattctgcagtgaacctgttaagctgttcacatgtatagactattgaaatactgtacttgtacacatctgactgttgacattttgtacttttttctagatccaatatttcacaataaaaaacttgtcaaaggc

SEQ ID NO: 132908 - DNA, 754 bp, Homo sapiens
  Payload ID: 5970
  Gene Symbol: FAM76B
  Gene Name: family with sequence similarity 76, member B
  ENST ID: ENST00000537749
  CDS Start-End: 614-754
atcaaagaaaatcaaggtatgtttttatagtttatgttgaatatgcttgttctcattttttcaaagttgaaaactcacagtatatattccttatatgatttgtacctatatgtgatgaaaagttaacattttctaaataaatgatatggtcattaaggtaactaggatattagtagaaggacgtttcctcaaattcttgattcatgagacttctctacatatgtacctttattttcgttctttaaaaccttttttatgtgtagtttttgtattatctaacagactatgcaaatcacaaatctatttctcacgatcttagagtaatagttacatgactagaaataaatactagttgaatgcatagaaatatggtataaaagttattgcatgtgacagggcaacaaacttgacagaaaacaaattttttacctgagttttcttaattccagaaatatgtctacaacactgggtatatgctatgccgcaaatatttaatgtttttaaaagtctcaaaatgtgtatgtttttcagcccaagccttgtcagtactgtaacataattgcagcatttattggtaccaagtgtcagcgttgcacaaattcagaaaaaaagtatggaccacctcagacctgtgaacagtgcaaacagcaatgtgcttttgatcggaaggaggaaggaagaagaaaggttgatggaaagttattatgctggctctgtactttatcgtacaaaagagttttacagaagacgaaag

SEQ ID NO: 132909 - DNA, 2546 bp, Homo sapiens
  Payload ID: 5970
  Gene Symbol: FAM76B
  Gene Name: family with sequence similarity 76, member B
  ENST ID: ENST00000536839
  CDS Start-End: 84-1100
gcccgggcggcggcggctctcgggttctccgtagggccccgcctcggagcgggcggcggcggaggaggagactgaggagcaggatggcggcctcggccctgtacgcctgcaccaagtgtacccagcgttatcctttcgaggagctctcccagggccagcagctctgcaaggaatgtcggattgcacatcctattgtaaaatgtacttactgcagatcagaatttcaacaagagagcaaaactaacacaatttgtaagaagtgtgctcaaaatgtgaagcaatttgggacgcccaagccttgtcagtactgtaacataattgcagcatttattggtaccaagtgtcagcgttgcacaaattcagaaaaaaagtatggaccacctcagacctgtgaacagtgcaaacagcaatgtgcttttgatcggaaggaggaaggaagaagaaaggttgatggaaagttattatgctggctctgtactttatcgtacaaaagagttttacagaagacgaaagaacaaaggaagagcctgggatcttcacattcaaattcatcttcttcatctcttactgagaaagaccagcatcatccaaaacatcatcaccaccatcatcaccatcaccatcgtcacagcagtagccatcacaaaatcagcaatctaagtccagaagaagagcagggactgtggaaacagagccataaatcctctgcaacaattcagaatgaaactccaaagaaaaagcccaaattggaatctaagccatctaatggagatagctctataaatcagtcagcagatagtgggggaacagacaattttgtccttataagtcaattgaaagaagaagtgatgtcacttaagcgtctcttacagcagagagaccagaccattttagaaaaagataaaaagttaactgaactaaaggcagactttcagtaccaagagtcaaatttgagaacaaaaatgaacagtatggaaaaagcccacaaagaaactgtggaacaacttcaggccaaaaacagagaactactcaaacaggtcgcagcattatcaaagggtaaaaaatttgacaaaagtggaagcatactaacatctccttgagaaagtcatttgtttagcatttcttcttacaatgtaaatttggggaaaaaaaattctgtgaagcccttaaattctgtgtagtagaaaaatatttttgcacaccaaatgaattggtgtgtttcctgttcacttttgtaattgatatacagcattttttaagttgtaaaacattcaaataaaacttcaactggtttgaagtaactttttaattatttgatatccaggaacttttttgccagcaatagtattaaacagttgtaaaggagtgcatgagtagtgctctttatgaaacgcaacatgcaataatagagtaggtatggtttcagaagtcagagcagcagggtttttttgttttgtttttgttttacactatgctaatttcagacaaacagttttcaatttagaaatacaaaaacttttaaactcgaaaaatggcgaacactggttttttgggaattgtgtttttactttgcatcaagatgaatttaggagaaaatcacggtgcttttattaaatgaacttcagatatatgtaaatttgttttttaaagttacatcattaacattagtaacctagcattttcattattggtataggaattaatgtttattgtacagtatctaaggtaaaatgtgtttctgttttgtaaaaactactgtagatttttacttacaagtgcctttttgccacctaatgtttttatttataggaatgctgatcttttgtacatacattttgttttaaaatcatgtttaataaatgtttgtatataaatgcatatgtacagaagcctatttcaaaaggaaatcaaagttgctagtaaaatgtttgagattacatttagaactaactgataatgcatatagattgtagaaaattttgtgatttgtttctgtgtgataagggaagctgttggtctttgaattcatttaattatgtcaaaatagttccccaaagatttaattttaagttgcttcttaaagagtaattttattttttatgtcatgtggcttcatattagtattgtgtgagttacatgttttgctttatattttataaaattttttaaaaattttaatgtttctgcaatgatccatgtatctgctttccctatgtgtggttatctaagttaatatttatgtacaatgtaatttgtaaatttaaagcaaatctgaaaaaaattaaatgatctttttaatccaatctgtgataatctttgaataaattggaatctactataagattcaggcattataagtaaattgtcctaaagtctttaaaattgtctataaaaggttaaggtagggtgggataggttatatgaagttattgactatattctgatccagcggttttcagcctgaaatagaatttatctcctagttattatcagttcagagttttagtttgattttaaagtattgctagatacactgtatagagtga

SEQ ID NO: 132910 - DNA, 730 bp, Homo sapiens
  Payload ID: 5970
  Gene Symbol: FAM76B
  Gene Name: family with sequence similarity 76, member B
  ENST ID: ENST00000540054
  CDS Start-End: 457-730
gacgtcacaaggtagcgcgtaacggggcccgctggggcagacaacgccggggttacaggccggctctgcggggattctacggagggtcgggcctcctccagtaagaagcgtgggcgagtagtggtgtcgccagtggcaactgaagggagtaatggagataaaacaaaagcgaaggcgaagttaaagcactccacgagttccctcggattaaacgccggagagagcgtgaatttgcctcggggacgcctctccaggaatgtcggattgcacatcctattgtaaaatgtacttactgcagatcagaatttcaacaagagagcaaaactaacacaatttgtaagaagtgtgctcaaaatgtgaagcaatttgggacgcccaagccttgtcagtactgtaacataattgcagcatttattggtaccaagtgtcagcgttgcacaaattcagaaaaaaagtatggaccacctcagacctgtgaacagtgcaaacagcaatgtgcttttgatcggaaggaggaaggaagaagaaaggttgatggaaagttattatgctggctctgtactttatcgtacaaaagagttttacagaagacgaaagaacaaaggaagagcctgggatcttcacattcaaattcatcttcttcatctcttactgagaaagaccagcatcatccaaaacatcatcaccaccatcatcaccatcaccatcgtcacagcagtagccatcacaa

SEQ ID NO: 132911 - DNA, 585 bp, Homo sapiens
  Payload ID: 5970
  Gene Symbol: FAM76B
  Gene Name: family with sequence similarity 76, member B
  ENST ID: ENST00000538316
  CDS Start-End: 291-440
acagctaaacagcaaccccctacccgcttcgtctccctccgccgctatcggggcctaagcgggagcggctggcacggcgtcactgggtgggctggggcggaagtggaggcggagggagacggtggcgtcgtccgcggggccctgggctctcgcggcgaggccctggtgggcgcgaggcagggggagggggaggaggaggagcccgcggcccgggcggcggcggctctcgggttctccgtagggccccgcctcggagcgggcggcggcggaggaggagactgaggagcaggatggcggcctcggccctgtacgcctgcaccaagtgtacccagcgttatcctttcgaggagctctcccagggccagcagctctgcaaggaaagcgaagcgactggtttgggaacagaatgctctgatttggagctcctcccatcccattaaagcctggatgctgtctgtgagcaacggaatgtcggattgcacatcctattgtaaaatgtacttactgcagatcagaatttcaacaagagagcaaaactaacacaatttgtaagaagtgtgctcaaaatgtgaagcaatttgggac

SEQ ID NO: 132912 - DNA, 1379 bp, Homo sapiens
  Payload ID: 5970
  Gene Symbol: FAM76B
  Gene Name: family with sequence similarity 76, member B
  Uniprot ID: Q5HYJ3
  ENST ID: ENST00000543641
  CDS Start-End: 313-1014
aaggaagcggatccacggccgcacagctaaacagcaaccccctacccgcttcgtctccctccgccgctatcggggcctaagcgggagcggctggcacggcgtcactgggtgggctggggcggaagtggaggcggagggagacggtggcgtcgtccgcggggccctgggctctcgcggcgaggccctggtgggcgcgaggcagggggagggggaggaggaggagcccgcggcccgggcggcggcggctctcgggttctccgtagggccccgcctcggagcgggcggcggcggaggaggagactgaggagcaggatggcggcctcggccctgtacgcctgcaccaagtgtacccagcgttatcctttcgaggagctctcccagggccagcagctctgcaaggaatgtcggattgcacatcctattgtaaaatgtacttactgcagatcagaatttcaacaagagagcaaaactaacacaatttgtaagaagtgtgctcaaaatgtgaagcaatttgggacgcccaagccttgtcagtactgtaacataattgcagcatttattggtaccaagtgtcagcgttgcacaaattcagaaaaaaagtatggaccacctcagacctgtgaacagtgcaaacagcaatgtgcttttgatcggaaggaggaaggaagaagaaaggttgatggaaagttattatgctggctctgtactttatcgtacaaaagagttttacagaagacgaaagaacaaaggaagagcctgggatcttcacattcaaattcatcttcttcatctcttactgagaaagaccagcatcatccaaaacatcatcaccaccatcatcaccatcaccatcgtcacagcagtagccatcacaaaatcagcaatctaagtccagaagaagagcagggactgtggaaacagagccataaatcctctgcaacaattcagaatgaaactccaaagaaaaagcccaaattggaatctaagccatctaatggagataggtgtatgtaatgtgtgccattagtaaggtaatttgccagttgcatccatttctgtcagtagctctataaatcagtcagcagatagtgggggaacagacaattttgtccttataagtcaattgaaagaagaagtgatgtcacttaagcgtctcttacagcagagagaccagaccattttagaaaaagataaaaagttaactgaactaaaggcagactttcagtaccaagagtcaaatttgagaacaaaaatgaacagtatggaaaaagcccacaaagaaactgtggaacaacttcaggccaaaaacagagaactactcaaacaggtcgcagcattatcaaaggatccaatatttcacaataaaaaacttgtcaaag

SEQ ID NO: 132913 - DNA, 610 bp, Homo sapiens
  Payload ID: 5970
  Gene Symbol: FAM76B
  Gene Name: family with sequence similarity 76, member B
  ENST ID: ENST00000542135
  CDS Start-End: 337-610
atcagggatgggaaagggaggccgagaaggaagcggatccacggccgcacagctaaacagcaaccccctacccgcttcgtctccctccgccgctatcggggcctaagcgggagcggctggcacggcgtcactgggaatgtcggattgcacatcctattgtaaaatgtacttactgcagatcagaatttcaacaagagagcaaaactaacacaatttgtaagaagtgtgctcaaaatgtgaagcaatttgggacgcccaagccttgtcagtactgtaacataattgcagcatttattggtaccaagtgtcagcgttgcacaaattcagaaaaaaagtatggaccacctcagacctgtgaacagtgcaaacagcaatgtgcttttgatcggaaggaggaaggaagaagaaaggttgatggaaagttattatgctggctctgtactttatcgtacaaaagagttttacagaagacgaaagaacaaaggaagagcctgggatcttcacattcaaattcatcttcttcatctcttactgagaaagaccagcatcatccaaaacatcatcaccaccatcatcaccatcaccatcgtcacagcagtagccatcacaa

SEQ ID NO: 132914 - DNA, 3659 bp, Homo sapiens
  Payload ID: 5971
  Gene Symbol: FAM78A
  Gene Name: family with sequence similarity 78, member A
  ENST ID: ENST00000372269
  CDS Start-End: 71-913
cttccaagcactggaaacaaacattggagaccaagtgaggcgtcactcaacagccgtagtaatcagggaaatgacaagttacatactgatatcctttgttttgctgattggagttgggtgcattgaaaaagatcagtcgtgcccagtgtttgggggaaggaagcgtcttcacctgttgtttgtgggaggacagttgaggcaggtgaggatgctgagagggtctccagaagcttccactgactgctgttggctgcaccaggcaacagggtctggctctgtcacccaggctggagtgcaatggtatgatctcggctcactgcaacctctgcctcccaggttcaagcgattctcctgcctcagcctcccgagtagctgggattacaggtccagctgggagctccccgacctccaggagggcaagatccaagccatcagcgactcggatggggtgaactacccctggtacggcaacaccacagagacctgcaccatcgtgggccccaccaagagggactccaagttcatcatcagcatgaatgacaacttttaccccagcgtcacatgggccgtgcccgtcagcgagagcaacgtggccaagctcaccaatatctaccgggaccagagcttcaccacctggctggtggccaccaacacctccaccaacgacatgatcatcctgcagacgctgcactggcgcatgcagctcagcatcgaggtgaaccccaaccggcccctgggccagcgcgcccggctgcgggagcccatcgcccaggaccagcccaaaatcctgagcaagaatgagcccatcccgcccagcgccctggtcaagcccaatgccaacgatgcccaggtcctcatgtggcggcccaagtacgggcagccgctggtggtgatcccgcccaagcaccggtgacagccaggaccacccgctaggttagactcacaaataataataccgctgaaaacaaaactcagactcactcttcagtcattcagcaagatacaaccattctaccctctccagcgggcggatctcactgtgctgatgcccccgggaaggcctccccggctctcggcacctgcttcctttcagggagaggggagatctaagcaggacagacagaccccacgtgcgccctcagggtgacctctggtctccttgcctctcctttttctcagtttcagtcgctcacttgtaacagattccctgaaacactgctttttccgttttttaaaaaaactcctcttttgggggctcaggggcaggaggagggggagctgattaggagggaagctccagcccccgatcaaagagacagatccacactgctgccgatttgtggcgctggccggccttccccccaggtccctccgccctctgtcatgcggccttatgtagacttgctttgccaaacttttgccttaagctgaattgaaaggaagaaaaccaatcggagaaagaaagcaggatctcttttctaccggacttttcctcttctgccagaggtggagggagggttggggtcgcccgcgagagtctcttgagcccttcttcccggttgtcttgggagaagggtgaggatgggcatttagacccgaaaccagctgctcactctttctttttggcagaaataaaaccacaggtagattctgcctgaacagccccttctctccctccacccccaggtcgtatccctgcacctgcggagaggggctgtgagctctggcggggggtggctccaccagtcgcctggcctcttctcccctctcttcccagcagccttaacttcccttgggcggctctaggaggagagaggcaggctcctgtgagcccagggaattttcaccctctcagtcctcaggacccacccccagttgagtccctggcccttcctccaggtgtgtggctttttccttctccatccacactggtcccaaatgcctgggggccggccacctggaccgccgacacacagcctcaatgttagtctcaaaggtaaggaaggcattcacgtcccttcttgcagggcattttaagacttgaatcgggtgggccccggcccctgtggctggctggcccctggtgtactgtaaaagggccaagacagggctcgttctcaggggcgcccctcccaggccctcagggcagcgggacggtgcagtcaggctctgggtgccacagtgatggaggtggaaggcacccaagctctagggaagtcttgggaggcagtcggccgagcccctgcttcctgtcctcaaataagtgaatccaggccaagggctgggagggctgggtgggcttatcgtcgagagggttcagagccactctggaggctgggctggcacagtggagagcaacaggtgaggacagacgtctggaagcccatccctgggacctgccctccctcggtcccaggtcactggagctccagggcttacttagtcctgacccattgtgccagggttctgagcagtgtcggccttgtggccacttgcaggggctattaggggacatcccgctgaagccacgctccttccagcttgccaaacccacagctacccgcccgggacccacactcagcctaataattatcaagcacagaaaaccgtccatttagaaaaataatccatttctgctgcagatgagccacttgtaagagtctccgtgacagcgtgggacggtgtgggaaccaaagtccctgccctgctcctttgtccacgggctattgcgtttattcaaggggtgcttaatgaccgtttagccactgccgtcggtctccgggcccagctcgtgccaggaggctgtcctgggacacactgggctggagctgccggctggcacggtgctcagggggcccctgatgggggccaggacctccccgcagaaactgcaggttctcttgtgaggatggaggccgtgccaccccgaaaggcagtagccttaggggaacagtgggtcccagctgcatgtctgaggatgggtggggacagggctgggactcagctttcattcactggagacttctccactcaggtctttgttgcactaaagcagggacaggaccctgggggttcaggaagcgggtctcaggccgctggtttattcctggaggtggggctggagaccagaatggaaaggggcttcctgagctgctagggggtgaaggacccccgaacccgcatttcttgagtgagagcaaacactcgaggcaggagccagcacccctcccactgcatgcccggcccccagcccaccttgccccctgacccaccttcacccgtgccccttctttctgcccttcctcaccgaagaagggctaggaacaccctggagaggctgcaggtccggccacggacgctcagctgagccccggtctgctccttcagcctccttgctcatgttggagcacaggccccaggcttcctgccagggccccgattcttcttatgtcctccagccccgccctggcgtggacatccactcactccttccagcaataagaaccgtccttggtcgtggagagtactgtgaaacaaaccaatgcacttaccaggaggcacaagactcttgaagaagatgtacaatgaacctttttttttttacaaaaaacaaaaagcaaatattcataaagagaaataaaatgtaattttaaagtagg

SEQ ID NO: 132915 - DNA, 3966 bp, Homo sapiens
  Payload ID: 5971
  Gene Symbol: FAM78A
  Gene Name: family with sequence similarity 78, member A
  Uniprot ID: Q5JUQ0
  ENST ID: ENST00000372271
  CDS Start-End: 369-1220
cttccttatttatgagtctgccggcgctcgcctgcttcctccgaagacttcagggagagtctgcgagctgccgtccccgcgtgtgaggcacagaagggctggatgtcagaaccgcataattattcattaaactacaaactttttttaacccaaagaatatcggtgatttttgtccactgcgaggagaagaagagagagcccagggctcatgaaatgcagcagaatccttatttataaacaggccgcggtagtgatatatgcaaccccagtctactcagtgagttttctatcctatggatatcggtcttgagagttgagattggagagcagcgccgtctgtactgggtcctgcagcctctgtcctttcaatgcctggttttttctgtgactgctggccttccctggagatcagagcgctcctgtatgccatgggctgtattcagagcatcggaggcaaagccagagtcttccgggaagggatcacggtgattgatgtgaaagcctccatcgaccccgtccccactagcatcgatgagtcctccagcgtggtgctccgctaccggacaccccacttccgggcctcggcccaggtggtcatgccgcccatccccaagaaggagacttgggtagttggctggatccaggcgtgcagccacatggagttctacaaccagtacggcgagcagggcatgtccagctgggagctccccgacctccaggagggcaagatccaagccatcagcgactcggatggggtgaactacccctggtacggcaacaccacagagacctgcaccatcgtgggccccaccaagagggactccaagttcatcatcagcatgaatgacaacttttaccccagcgtcacatgggccgtgcccgtcagcgagagcaacgtggccaagctcaccaatatctaccgggaccagagcttcaccacctggctggtggccaccaacacctccaccaacgacatgatcatcctgcagacgctgcactggcgcatgcagctcagcatcgaggtgaaccccaaccggcccctgggccagcgcgcccggctgcgggagcccatcgcccaggaccagcccaaaatcctgagcaagaatgagcccatcccgcccagcgccctggtcaagcccaatgccaacgatgcccaggtcctcatgtggcggcccaagtacgggcagccgctggtggtgatcccgcccaagcaccggtgacagccaggaccacccgctaggttagactcacaaataataataccgctgaaaacaaaactcagactcactcttcagtcattcagcaagatacaaccattctaccctctccagcgggcggatctcactgtgctgatgcccccgggaaggcctccccggctctcggcacctgcttcctttcagggagaggggagatctaagcaggacagacagaccccacgtgcgccctcagggtgacctctggtctccttgcctctcctttttctcagtttcagtcgctcacttgtaacagattccctgaaacactgctttttccgttttttaaaaaaactcctcttttgggggctcaggggcaggaggagggggagctgattaggagggaagctccagcccccgatcaaagagacagatccacactgctgccgatttgtggcgctggccggccttccccccaggtccctccgccctctgtcatgcggccttatgtagacttgctttgccaaacttttgccttaagctgaattgaaaggaagaaaaccaatcggagaaagaaagcaggatctcttttctaccggacttttcctcttctgccagaggtggagggagggttggggtcgcccgcgagagtctcttgagcccttcttcccggttgtcttgggagaagggtgaggatgggcatttagacccgaaaccagctgctcactctttctttttggcagaaataaaaccacaggtagattctgcctgaacagccccttctctccctccacccccaggtcgtatccctgcacctgcggagaggggctgtgagctctggcggggggtggctccaccagtcgcctggcctcttctcccctctcttcccagcagccttaacttcccttgggcggctctaggaggagagaggcaggctcctgtgagcccagggaattttcaccctctcagtcctcaggacccacccccagttgagtccctggcccttcctccaggtgtgtggctttttccttctccatccacactggtcccaaatgcctgggggccggccacctggaccgccgacacacagcctcaatgttagtctcaaaggtaaggaaggcattcacgtcccttcttgcagggcattttaagacttgaatcgggtgggccccggcccctgtggctggctggcccctggtgtactgtaaaagggccaagacagggctcgttctcaggggcgcccctcccaggccctcagggcagcgggacggtgcagtcaggctctgggtgccacagtgatggaggtggaaggcacccaagctctagggaagtcttgggaggcagtcggccgagcccctgcttcctgtcctcaaataagtgaatccaggccaagggctgggagggctgggtgggcttatcgtcgagagggttcagagccactctggaggctgggctggcacagtggagagcaacaggtgaggacagacgtctggaagcccatccctgggacctgccctccctcggtcccaggtcactggagctccagggcttacttagtcctgacccattgtgccagggttctgagcagtgtcggccttgtggccacttgcaggggctattaggggacatcccgctgaagccacgctccttccagcttgccaaacccacagctacccgcccgggacccacactcagcctaataattatcaagcacagaaaaccgtccatttagaaaaataatccatttctgctgcagatgagccacttgtaagagtctccgtgacagcgtgggacggtgtgggaaccaaagtccctgccctgctcctttgtccacgggctattgcgtttattcaaggggtgcttaatgaccgtttagccactgccgtcggtctccgggcccagctcgtgccaggaggctgtcctgggacacactgggctggagctgccggctggcacggtgctcagggggcccctgatgggggccaggacctccccgcagaaactgcaggttctcttgtgaggatggaggccgtgccaccccgaaaggcagtagccttaggggaacagtgggtcccagctgcatgtctgaggatgggtggggacagggctgggactcagctttcattcactggagacttctccactcaggtctttgttgcactaaagcagggacaggaccctgggggttcaggaagcgggtctcaggccgctggtttattcctggaggtggggctggagaccagaatggaaaggggcttcctgagctgctagggggtgaaggacccccgaacccgcatttcttgagtgagagcaaacactcgaggcaggagccagcacccctcccactgcatgcccggcccccagcccaccttgccccctgacccaccttcacccgtgccccttctttctgcccttcctcaccgaagaagggctaggaacaccctggagaggctgcaggtccggccacggacgctcagctgagccccggtctgctccttcagcctccttgctcatgttggagcacaggccccaggcttcctgccagggccccgattcttcttatgtcctccagccccgccctggcgtggacatccactcactccttccagcaataagaaccgtccttggtcgtggagagtactgtgaaacaaaccaatgcacttaccaggaggcacaagactcttgaagaagatgtacaatgaacctttttttttttacaaaaaacaaaaagcaaatattcataaagagaaataaaatgtaattttaaagtagg

SEQ ID NO: 132916 - DNA, 792 bp, Homo sapiens
  Payload ID: 5971
  Gene Symbol: FAM78A
  Gene Name: family with sequence similarity 78, member A
  ENST ID: ENST00000464831
  CDS Start-End: 1-759
ggccaagggattgctgcagccctcatccaccttccaagcactggaaacaaacattggagaccaaggtctccagaagcttccactgactgctgttggctgcaccaggcaacagggtctggctctgtcacccaggctggagtgcaatggtatgatctcggctcactgcaacctctgcctcccaggttcaagcgattctcctgcctcagcctcccgagtagctgggattacaggtccagctgggagctccccgacctccaggagggcaagatccaagccatcagcgactcggatggggtgaactacccctggtacggcaacaccacagagacctgcaccatcgtgggccccaccaagagggactccaagttcatcatcagcatgaatgacaacttttaccccagcgtcacatgggccgtgcccgtcagcgagagcaacgtggccaagctcaccaatatctaccgggaccagagcttcaccacctggctggtggccaccaacacctccaccaacgacatgatcatcctgcagacgctgcactggcgcatgcagctcagcatcgaggtgaaccccaaccggcccctgggccagcgcgcccggctgcgggagcccatcgcccaggaccagcccaaaatcctgagcaagaatgagcccatcccgcccagcgccctggtcaagcccaatgccaacgatgcccaggtcctcatgtggcggcccaagtacgggcagccgctggtggtgatcccgcccaagcaccggtgacagccaggaccacccgctaggttagactcacaa

SEQ ID NO: 132917 - DNA, 1597 bp, Homo sapiens
  Payload ID: 5972
  Gene Symbol: FAM78B
  Gene Name: family with sequence similarity 78, member B
  Uniprot ID: Q5VT40
  ENST ID: ENST00000338353
  CDS Start-End: 591-1376
gtcctgtgctgctccagccgttggggctctccaccccgggccacagcctcctggcgccccccgggccgaggcagccgggccgaggagtgtcggtgtggtccggctacggggcggggccggcggcggctgctgctgctgccgccgcggaggcagacagaccgggcgctgccaccgccgccctcccccggctccatgccgccgccgctgccgcctcctcctctccggcgaggggcggggggctccggcccggggtgggcaccattcctcgcagcgccgctcccctccctgccctccgcccgggcgctggagccggcgagggcacccgccgcctcctaggagtgcaccctccgcgcgccctgccggagcgagggggcgggcgtgggcggacgtcggggcagcggggaccccgcgcggctgcaagaggagggggcttccccaaggatgcccggcggctccccgctcctaggtgcgagctgagtctgaccgggagcgagcggcgcgtcgccatgccggcgtgacgggcgcccccggctgcccgcgcgggcccccgcgctgccccacgccgcgccgtgccggcaccgggctgcaggatgggctgtatccaaagcatcacctgcaaggcgcggatccggcgcgagaacatcgtggtgtacgatgtgtgcgccaccatcgaccagtgccccacgcgcatcgaggagacctcgcccatcgtcctgcgctacaagaccccctacttcaaagcctccgcccgcgtggtcatgccccccatcccccgccacgagacctgggtggtgggctggattcaggcgtgcaatcagatggagttcttcaacacctacagcgacctgggcatgtcaagctgggaactgcctgacttgagggaagggagagtaaaagccatcagtgactcagatggggtgagctacccttggtacgggaacaccacagaaactgtgaccctggttggccccaccaacaagatctccaggttctccgtcagcatgaatgacaacttctaccccagtgtgacatgggcagtgcctgtgagtgacagcaatgtgccactgctcacaagaatcaagagagaccaaagtttcacgacctggctggtggccatgaacaccaccacaaaggagaagatcattctgcagaccatcaagtggaggatgagggtggacattgaagtggaccctcttcagctcttggggcagcgggcccggctggtgggcaggactcagcaggagcagccccggatcctgagccggatggaacccatcccccctaatgcactagtgaaacccaatgccaatgatgcccaggtcctcatgtggaggcccaagcgggggccacctctggttgtgatccctcctaagtagaagcagactggcctgactgtgtgtggatcacacgcctctgagacatgcagtgagggtgccaggggtggcaggagccaaacagagtttctgagccaaagcagacctctcggtttgccagcctttgcagccacttttgaagagtagggctgctccttgggtggtagaaccataatccttaggaaaaatcccttcctcttaggaataaagaaatcactgatttg

SEQ ID NO: 132918 - DNA, 1475 bp, Homo sapiens
  Payload ID: 5972
  Gene Symbol: FAM78B
  Gene Name: family with sequence similarity 78, member B
  Uniprot ID: Q5VT40
  ENST ID: ENST00000354422
  CDS Start-End: 468-1253
cggctgctgctgctgccgccgcggaggcagacagaccgggcgctgccaccgccgccctcccccggctccatgccgccgccgctgccgcctcctcctctccggcgaggggcggggggctccggcccggggtgggcaccattcctcgcagcgccgctcccctccctgccctccgcccgggcgctggagccggcgagggcacccgccgcctcctaggagtgcaccctccgcgcgccctgccggagcgagggggcgggcgtgggcggacgtcggggcagcggggaccccgcgcggctgcaagaggagggggcttccccaaggatgcccggcggctccccgctcctaggtgcgagctgagtctgaccgggagcgagcggcgcgtcgccatgccggcgtgacgggcgcccccggctgcccgcgcgggcccccgcgctgccccacgccgcgccgtgccggcaccgggctgcaggatgggctgtatccaaagcatcacctgcaaggcgcggatccggcgcgagaacatcgtggtgtacgatgtgtgcgccaccatcgaccagtgccccacgcgcatcgaggagacctcgcccatcgtcctgcgctacaagaccccctacttcaaagcctccgcccgcgtggtcatgccccccatcccccgccacgagacctgggtggtgggctggattcaggcgtgcaatcagatggagttcttcaacacctacagcgacctgggcatgtcaagctgggaactgcctgacttgagggaagggagagtaaaagccatcagtgactcagatggggtgagctacccttggtacgggaacaccacagaaactgtgaccctggttggccccaccaacaagatctccaggttctccgtcagcatgaatgacaacttctaccccagtgtgacatgggcagtgcctgtgagtgacagcaatgtgccactgctcacaagaatcaagagagaccaaagtttcacgacctggctggtggccatgaacaccaccacaaaggagaagatcattctgcagaccatcaagtggaggatgagggtggacattgaagtggaccctcttcagctcttggggcagcgggcccggctggtgggcaggactcagcaggagcagccccggatcctgagccggatggaacccatcccccctaatgcactagtgaaacccaatgccaatgatgcccaggtcctcatgtggaggcccaagcgggggccacctctggttgtgatccctcctaagtagaagcagactggcctgactgtgtgtggatcacacgcctctgagacatgcagtgagggtgccaggggtggcaggagccaaacagagtttctgagccaaagcagacctctcggtttgccagcctttgcagccacttttgaagagtagggctgctccttgggtggtagaaccataatccttaggaaaaatcccttcctcttaggaataaagaaatcactgatttga

SEQ ID NO: 132919 - DNA, 2300 bp, Homo sapiens
  Payload ID: 5972
  Gene Symbol: FAM78B
  Gene Name: family with sequence similarity 78, member B
  Uniprot ID: Q5VT40
  ENST ID: ENST00000456900
  CDS Start-End: 134-919
cgctcctaggtgcgagctgagtctgaccgggagcgagcggcgcgtcgccatgccggcgtgacgggcgcccccggctgcccgcgcgggcccccgcgctgccccacgccgcgccgtgccggcaccgggctgcaggatgggctgtatccaaagcatcacctgcaaggcgcggatccggcgcgagaacatcgtggtgtacgatgtgtgcgccaccatcgaccagtgccccacgcgcatcgaggagacctcgcccatcgtcctgcgctacaagaccccctacttcaaagcctccgcccgcgtggtcatgccccccatcccccgccacgagacctgggtggtgggctggattcaggcgtgcaatcagatggagttcttcaacacctacagcgacctgggcatgtcaagctgggaactgcctgacttgagggaagggagagtaaaagccatcagtgactcagatggggtgagctacccttggtacgggaacaccacagaaactgtgaccctggttggccccaccaacaagatctccaggttctccgtcagcatgaatgacaacttctaccccagtgtgacatgggcagtgcctgtgagtgacagcaatgtgccactgctcacaagaatcaagagagaccaaagtttcacgacctggctggtggccatgaacaccaccacaaaggagaagatcattctgcagaccatcaagtggaggatgagggtggacattgaagtggaccctcttcagctcttggggcagcgggcccggctggtgggcaggactcagcaggagcagccccggatcctgagccggatggaacccatcccccctaatgcactagtgaaacccaatgccaatgatgcccaggtcctcatgtggaggcccaagcgggggccacctctggttgtgatccctcctaagtagaagcagactggcctgactgtgtgtggatcacacgcctctgagacatgcagtgagggtgccaggggtggcaggagccaaacagagtttctgagccaaagcagacctctcggtttgccagcctttgcagccacttttgaagagtagggctgctccttgggtggtagaaccataatccttaggaaaaatcccttcctcttaggaataaagaaatcactgatttgacagacttgctgtgattaccatgcaagtagccatattttggagctgaccaggatgattcttttatctgaactattgaccatttctttcctgtgagatgcaggggatggaaacgaaattaaacagtgcctgtggcaaatgctgcttcccagccaattagaagtaggagtgaaaacatccacaccaggtctcctagtaggacaaggaaagcccagcaagcacaaccacatggcagagactgagaaggaggaagtgagcaatggctggcggctccagaagctgaatccctggacagctgatttcccattaaaatgtgtgccatcctgcctacctcctcgccttcctcccgtcccgtgaccagtccctcctacccaccctccacgagccatgtggcacttgccctgggctgattgggctgcctgcttggcccatggggagctgtgttaaagtgagagttgtgcctgctgtatctttttgtgtgtagaaagatggggttcattcagatcccaagtcctttccccaaccctcaaagtgaagcctcctagggatgaagagctggtcagcctggactttaaatacctaatgtggcccagccttggttcccaaaccctgccttccctccctatgcttttgggtgggaaacgggggatttgtatctcccttcctcctccttctccatgtgggtggcctctctaggtttctctgtgttctctgatccttggagagccagagccaaggcagtcatcttgttcccccttccacggccaggctgggtgccttcaggtgaccaggggcagagtgtaagtcaccaggttcaatggggtgaggggagaaccaccttaagagggaaaaaatggtgtgcattggtttatttattggtttatttattggcttgcttactgatgtatttatttgtatttattatacaacacaaaatccatttccattttttaagcatcagccccagaatttgtcttcctgggcccatagagcacagcgaattatttctctttgaagcttcagaatagagagggaaatttttctccttacgcccaaacacctccacctcagccacattttcaaccagacatgggattagaaatcaccagctaacaaggctgtaaagtcacacaaatcagcagaggcttgactgtctagatag

SEQ ID NO: 132920 - DNA, 2264 bp, Homo sapiens
  Payload ID: 5972
  Gene Symbol: FAM78B
  Gene Name: family with sequence similarity 78, member B
  ENST ID: ENST00000441649
  CDS Start-End: 1-772
aagcatcacctgcaaggcgcggatccggcgcgagaacatcgtggtgtacgatgtgtgcgccaccatcgaccagtgccccacgcgcatcgaggagacctcgcccatcgtcctgcgctacaagaccccctacttcaaagcctccgcccgcgtggtcatgccccccatcccccgccacgagacctgggtggtgggctggattcaggcgtgcaatcagatggagttcttcaacacctacagcgacctgggcatgtcaagctgggaactgcctgacttgagggaagggagagtaaaagccatcagtgactcagatggggtgagctacccttggtacgggaacaccacagaaactgtgaccctggttggccccaccaacaagatctccaggttctccgtcagcatgaatgacaacttctaccccagtgtgacatgggcagtgcctgtgagtgacagcaatgtgccactgctcacaagaatcaagagagaccaaagtttcacgacctggctggtggccatgaacaccaccacaaaggagaagatcattctgcagaccatcaagtggaggatgagggtggacattgaagtggaccctcttcagctcttggggcagcgggcccggctggtgggcaggactcagcaggagcagccccggatcctgagccggatggaacccatcccccctaatgcactagtgaaacccaatgccaatgatgcccaggtcctcatgtggaggcccaagcgggggccacctctggttgtgatccctcctaagtagaagcagactggcctgactgtgtgtggatcacacgcctctgagacatgcagtgagggtgccaggggtggcaggagccaaacagagtttctgagccaaagcagacctctcggtttgccagcctttgcagccacttttgaagagtagggctgctccttgggtggtagaaccataatccttaggaaaaatcccttcctcttaggaataaagaaatcactgatttgacagacttgctgtgattaccatgcaagtagccatattttggagctgaccaggatgattcttttatctgaactattgaccatttctttcctgtgagatgcaggggatggaaacgaaattaaacagtgcctgtggcaaatgctgcttcccagccaattagaagtaggagtgaaaacatccacaccaggtggtcgtaagacagactcctgctgtctgactggagggtgctggggaaatgggtggtgaaagaatgggtgatggggagaggaaagaataaggttttatgacacattaatacttctgcatttattagttgataatcagatcaacacactcaatggaatgaatgcttagaaaactagacaaatactgatatttgctcctttctgagggagaaagcctccttggaactgtccaaggtgctgatgtgaactaacggaaacacttcattagttccgtctacccacctctttccaaaaagattgcttattcagagtatttttaatcacagtctcctagtaggacaaggaaagcccagcaagcacaaccacatggcagagactgagaaggaggaagtgagcaatggctggcggctccagaagctgaatccctggacagctgatttcccattaaaatgtgtgccatcctgcctacctcctcgccttcctcccgtcccgtgaccagtccctcctacccaccctccacgagccatgtggcacttgccctgggctgattgggctgcctgcttggcccatggggagctgtgttaaagtgagagttgtgcctgctgtatctttttgtgtgtagaaagatggggttcattcagatcccaagtcctttccccaaccctcaaagtgaagcctcctagggatgaagagctggtcagcctggactttaaatacctaatgtggcccagccttggttcccaaaccctgccttccctccctatgcttttgggtgggaaacgggggatttgtatctcccttcctcctccttctccatgtgggtggcctctctaggtttctctgtgttctctgatccttggagagccagagccaaggcagtcatcttgttcccccttccacggccaggctgggtgccttcaggtgaccaggggcagagtgtaagtcaccaggttcaatggggtgaggggagaaccaccttaagagggaaaaaatggtgtgcattggtttatttattggtttatttattggcttgcttactgatgtatttatttgtatttattatacaacacaaaatccatttccatttt

SEQ ID NO: 132921 - DNA, 4410 bp, Homo sapiens
  Payload ID: 5972
  Gene Symbol: FAM78B
  Gene Name: family with sequence similarity 78, member B
  ENST ID: ENST00000435676
  CDS Start-End: 1-763
ctgcaaggcgcggatccggcgcgagaacatcgtggtgtacgatgtgtgcgccaccatcgaccagtgccccacgcgcatcgaggagacctcgcccatcgtcctgcgctacaagaccccctacttcaaagcctccgcccgcgtggtcatgccccccatcccccgccacgagacctgggtggtgggctggattcaggcgtgcaatcagatggagttcttcaacacctacagcgacctgggcatgtcaagctgggaactgcctgacttgagggaagggagagtaaaagccatcagtgactcagatggggtgagctacccttggtacgggaacaccacagaaactgtgaccctggttggccccaccaacaagatctccaggttctccgtcagcatgaatgacaacttctaccccagtgtgacatgggcagtgcctgtgagtgacagcaatgtgccactgctcacaagaatcaagagagaccaaagtttcacgacctggctggtggccatgaacaccaccacaaaggagaagatcattctgcagaccatcaagtggaggatgagggtggacattgaagtggaccctcttcagctcttggggcagcgggcccggctggtgggcaggactcagcaggagcagccccggatcctgagccggatggaacccatcccccctaatgcactagtgaaacccaatgccaatgatgcccaggtcctcatgtggaggcccaagcgggggccacctctggttgtgatccctcctaagtagaagcagactggcctgactgtgtgtggatcacacgcctctgagacatgcagtgagggtgccaggggtggcaggagccaaacagagtttctgagccaaagcagacctctcggtttgccagcctttgcagccacttttgaagagtagggctgctccttgggtggtagaaccataatccttaggaaaaatcccttcctcttaggaataaagaaatcactgatttgacagacttgctgtgattaccatgcaagtagccatattttggagctgaccaggatgattcttttatctgaactattgaccatttctttcctgtgagatgcaggggatggaaacgaaattaaacagtgcctgtggcaaatgctgcttcccagccaattagaagtaggagtgaaaacatccacaccaggtggtctcctagtaggacaaggaaagcccagcaagcacaaccacatggcagagactgagaaggaggaagtgagcaatggctggcggctccagaagctgaatccctggacagctgatttcccattaaaatgtgtgccatcctgcctacctcctcgccttcctcccgtcccgtgaccagtccctcctacccaccctccacgagccatgtggcacttgccctgggctgattgggctgcctgcttggcccatggggagctgtgttaaagtgagagttgtgcctgctgtatctttttgtgtgtagaaagatggggttcattcagatcccaagtcctttccccaaccctcaaagtgaagcctcctagggatgaagagctggtcagcctggactttaaatacctaatgtggcccagccttggttcccaaaccctgccttccctccctatgcttttgggtgggaaacgggggatttgtatctcccttcctcctccttctccatgtgggtggcctctctaggtttctctgtgttctctgatccttggagagccagagccaaggcagtcatcttgttcccccttccacggccaggctgggtgccttcaggtgaccaggggcagagtgtaagtcaccaggttcaatggggtgaggggagaaccaccttaagagggaaaaaatggtgtgcattggtttatttattggtttatttattggcttgcttactgatgtatttatttgtatttattatacaacacaaaatccatttccattttttaagcatcagccccagaatttgtcttcctgggcccatagagcacagcgaattatttctctttgaagcttcagaatagagagggaaatttttctccttacgcccaaacacctccacctcagccacattttcaaccagacatgggattagaaatcaccagctaacaaggctgtaaagtcacacaaatcagcagaggcttgactgtctagatagccctcagaatccggcctccaccccaaccaccttgcaccagtcttctcattctcctttactcaggtggggattgaccagccatcttcagcctaacagtgcagaacaaaacttctcattctgctctgatgtagtattctaacatcagatgcacgttagaatcatctgaggagcttaaaaaatatccatgcctggtcccctgcccaaaccaattatagcatcgaagggtagatcctgggcatcggagttttttaagttacccagatgactctaatgtgaaaatagggttggaaagttctagtatcacctctcccttgcccctccccacccagattctttcatctctacttcccaagctttctctggagtcctcttcccgttcctccagccccttctcctctctgcaccttccccatcagctcagccaaccatagcagatccctggagagggggcaggtcccatgagtggtactctgaggctggttcctgcatccagcctgcgggctgctcccaaacaatttccagcttttctaggagcagaaacctactctctgcaggattctctgttcacctgcaccttctccaggttcccaaactccaaaagtttaaagggcactttggcgacatttctgtctccaagccccagtcttgatggtatggcccatgtaagtcttataacccaagccttggccatttctgcagagccacctgagttgaatgaggatctactgttaacagagaaaggggtcacagtgctcccccagcaagtcctttttccaacaaccaacctcctcagccatctaggatttgggtccacaatgcagcagctactgtgcattcaaatcctagatggctgagaagaggcatctcacccttcacatctacaagatctccactgctgggtatgagtaaatgtgtgtgtgagtgcgtgtacacgtacatgtgcacacactgtctacatacaaaccatctagatctatagagatgccaggcttcactttacatgtgattacattctacatgaaaacagttgagggcttttgttatctttcacttgatggagtttcactgtattatgttcatgatgggccccagtgaactccatatcaggtatatacatagaatgtataatatatacaaactgttagacacactacacacacacacacacacacacacacacacacacacaaagcctagggaaacctgtgatgtgggtaagttcattttgccatcccatctcctccatctaagtaatttcccggggcaagcattgtttcacacactcccctcagctgcccagccattccctctccagcgtcccataccaccaagccttctttccccatcagtccaaatgtccctgccctatgtcccatctctcagggtcctactctctgataggtgacagttcagtcagtgggtgctaaagagtcgagtgttacccttcccaggtgacatttacattttaataggggctacagataatgccttaatcagaaagagtggctgtagtggtgggaatttcaggcccagaagtgggccagtaagggagattcttttatatcaggagggcattttagagcccccgagtcatacctgtctgtaagcgcagcccttcataagtgcatgagcacaagcaagcacacttgcctacattataccctccataattttgagatacctcccttgcattggccctatctttaaaaatgaaaaaaaaaaacccaaaaaaaacaaaaacaaaacagggaactagctaaattaatttagatctcgctgggaaacgtagcctattttttcaccggctgccagccatctggcccaccccaccctgttcaatttcccttctgctctttatcttttcagctatgactgactatatcagttaatttacttgtacgtgtcctctctgctgtctccttaccctgctcccctacaccatgtatttccttcctttaccatttcctccttggaattgtgctgtgtttcgttgtcctggaggacagaagagcaggttaaggcatgagcatgtgtgtatcactttgaagaaagagaaaccaggtattctgctacagtttggagaaaaacccaatgaaggaagaaatgaaagctggctctgcagagtgccttaaaaatgactttaattaggaaattctgagttgtcagtcttcagatgttacataaactcaaacagatgttgcatttcacttctctgggattaaaaaaagttaaatacagtgtgtattcaacaacaacaacaaaa

SEQ ID NO: 132922 - DNA, 4677 bp, Homo sapiens
  Payload ID: 5973
  Gene Symbol: FAM8A1
  Gene Name: family with sequence similarity 8, member A1
  Uniprot ID: Q9UBU6
  ENST ID: ENST00000259963
  CDS Start-End: 56-1297
gggggagggaaacggagcagtgacaggtatcccagagggtgctgctgaggcgacgatggccgaggggcccgaggaagcccgaggccaccctcccgggcaggacgatggcggaggggaccacgagcccgtcccttccctgagaggccctcctaccaccgccgtcccatgcccccgcgacgacccccaggccgaaccccaggccccgggccggcccacagccccgggcctcgcggctgccgccgcagccgacaaattggagccgccgcgcgagctcaggaagcgcggggaggcggcctccggctccggtgcagagctgcaggagcaggcgggctgcgaggcgcccgaagccgcggcgccacgagagagaccagctcggctgagcgcccgcgagtactcccggcaagtgcacgagtggctgtggcagtcctactgcggctacctcacctggcacagcggcctggccgccttcccagcctactgcagcccccagccctccccgcagagcttcccttcgggcggcgctgcagtcccccaggccgcggcgccgccgcccccgcagctgggctattacaaccccttctacttcctgagccccggggccgcggggcctgacccgcggacagctgccggcatcagcacccctgctccagtcgcgggcctgggaccccgggctcctcacgtgcaggcgtcggtccgggccactccagtgacgagggtaggatccgcagccccttcgcgaagcccgagcgagaccgggcgacaggcaggcagagaatatgttattccatccttggcccacagatttatggcagagatggtggatttctttattctcttctttataaaagcaaccattgtcttaagcattatgcacctcagtgggataaaggatatctctaagtttgctatgcattatataatagaagaaatagatgaagacacatcaatggaagacttgcagaaaatgatggttgtggcacttatatacagattattagtttgtttctatgagataatttgcatttggggagcaggtggagctaccccagggaagttcctgctggggcttcgagttgtgacatgtgatacatcagtgcttattgcaccaagtcgggttttagtgattccttcctcaaatgttagcattacaacgtccactatccgagctttgatcaagaatttttcaattgcttcttttttccctgctttcatcacactgctgttttttcagcataatcgaacagcttatgacattgtagcaggaaccattgtggtaaaaagaaatggggtcagatgatgccccccaaaaccctgatttccacacactaagactaaattatgtatcaaggccatcagtatccctgggttacactaattgatgatttagaaattaaagcagtcactccagtgtgatgcaggtgactactctgaaagtattgattatacttgaatgccaaagaacttgtccagaagaaaaacctgttaaattcaagtattaaaatttttagatcaaaaaggcaaatgattttataaacaatggacaatatatactttcttaagatctaaggtactttcttaagatctaagaatttgctgaaagcattttcagctttgaaatctccaaatgaaactttaaaatttattttggtttatcccaaaataatggaaaatgtccagttgtgttttgtaaacacctatgtaactcatcttttagtttacacttcctggggaaattgtctttggtgtttagaggagggaatgagaacacaaattggataatccactgtctcccatcccaggaggtggtgagttggctacaagagaaagggacaagtgaggcaggcctagcagttcccttacctgaagttttcaaatccatactgcagttccctctcgtaatgatgtaactttacaactattcttaatgcttgaacatgtatttaggggcaagtttctcatgatgatgaaaaagtatcaagtcatattgctatgttaattggtttttttttttaaaaggtaagttagtgattactgttaatggtgggggagtaagttttcactgtaaattgaacttataatttatgtgcaagtgttttcagtgccctgaatcaaactataaatgtggggagaaatcacctccatcaaacagttgcatatttactgtaaaagtattcccagtatgtgtgcagcatgaagaaagtattagtgcttctcagtgttctcagtgtaaattctatttatatacagcatattcacatactactttccttatattttatatagttctatgactgttgaaacatcaaggagttaaaaaaatcttaatatttcatgattaactctaagtactattaattaatagcttgcgaaatattagcaattttcccattatggactattctctctaaagcaagagagactagcattcccagacatcattctagggtctttaagctcattttgggtctgctaaagtttggggggaaatgttacgcaaagtgatactgtgtatgttgccattttgctttattcttctgttgaagcaaaattgtggggttttattatgtgtgtgtgcttttcctagatgtcccagttagctgtgctgagatatacctgtactatttatggtttaagttttgattcttaggtattttctccagctctgacattgttttccaaagacacactaaactgcattgcacagttcaaaatttgattacttaagggatcaatctaggtggtgttcttggtcttaaatttaacagcaaacacagcacatatctattatcactatattaattttcaaaggtttttctttgacgtttaaaactgtgacaacagatattcacatttgattatagaaacttaatgtctattaataattttagtacaaaatttcataaaccgtgtttttcaaaataagtttatgtcaaatccagcttcccagaaacactaataattaagtacatcaatgtactaaataaatcattcagttgcacccatggggaagattgtgttactgcccttcacagtgaaaaaaagaaaaatctttcatttttaaaattaggagatgttacgtaacttggcactttagtagtgtatacactagcattagtttatacaccacttttgccgctggggaattcaagttgaaatgtccctcaatcatataggtctggaatacatctttcattcataatttctgctcagataattgaatagtttgccatcgagattattttcatttatactataaaacaaaagcaaactagtccagtttaattttttgtacttagaatattgcacattttctatatatgagttattcagattagtatctatgtaggttcagtcagatccaaccatggattcgaggtattatactgtataaccctacaaaatacatagaagtattatttgccttcataatagaacccaagagtctgtttcaatttatgaattcagtatttgcaccgagattttgattcccaaagtttggaaaaaaatgacaaaacaacgagggaagaaggaaccagaccttagtgccacatatttttctcttggggttgtaaggtagtctcctgctttccagaacactttattatatttcacttatagacctgattttctgtgtcaaagtataattctcatgctgaagctgtagcctaaaaagccaaaagaaagttgtcttcattgtacaaacatattcatcactttaacaataagggaacaaaatttagtattcaagctgagtgagaatactgtttcaatgagcatgtccctaagataaaccagaattggcagttaatttaggcgtctagaaaatctcagttcccaccagtaaaattatcctgagtagctaatgcaccttgagaaaaatctggcatactgaataaataacattaacttgggagccaagagctgggtaagccttacctttagactactctgtgactacagaaataaagccagcacttttggaactaataagccttcacttgtcagtatcataaagagtattgcccaactgaactttgctcccactggtttaatagttacttatttctgcctaagcactcaccttccgattttacccaagtatatatataggatagaaaaaaatgcattatatttgagagctacttcgcccaaattacaaaatgagtgtttttagattcaagtgacagtaaaaggatttgttcccttcagtgacttgagtgttttagttatgcataagtatttctagcaaaggaagggtagaaaggaattgaaaattaatttacactagttgctacttgggaataaagggctttttgaggggggtatggatattaaatgttttcgttatatacttatccctattaaaacaggcagttgtttctttgaatatgcctaaataacagtattcttaaaatctgacagacaagtaacatgtcaattacttgatattccttgtctccagtaccacaggccactcttgacatcccatgtttgcctggataaagttcctcatttcaaacagtatacatacttctttgcagttcattatagtaaggcttaacctgtaaacagtatctgatggcccacctataaataaaattcagcattctatttttaataatttgtatgccaccaatttgtattatttgtctcaataaatacttagtcatcaatgca

SEQ ID NO: 132923 - DNA, 3465 bp, Homo sapiens
  Payload ID: 5974
  Gene Symbol: FAM81A
  Gene Name: family with sequence similarity 81, member A
  Uniprot ID: Q8TBF8
  ENST ID: ENST00000288228
  CDS Start-End: 188-1294
gcggcgcgggcccgcagccgggcgccctgctcagccagcgccagcggccgccgcacccagccgcgccggcgaggacatgggcagccgcggcgcgcccaccccccgcgccgatgtgaattattaaaaagaaaatggcccaacggagcactgtatttccttctcgtgtcaccaaggaaaggtataatatatggaaaatatgcatctaaggcgagtgagaaccatgccccgacacagccagtccctgaccatggcaccatactcatctgtaagcctcgtggagcagctggaagacaggatcctctgccatgagaaaaccaccgccgccctcgtagagcacgcctttcggattaaagatgacattgtcaacagtttgcagaaaatgcaaaacaaagggggaggtgaccgcttggccaggcttttcttggaggagcatatcagaaacataactgccatagtgaagcaacttaatcgggatatcgaggtactccaggagcagattcgtgcccgggacaacattagctatggaactaattctgccttaaagaccctggagatgcgccagctctccggtttgggagatcttcgaggaagagtggcaagatgtgatgccagcatagctagactttctgcagagcacaaaacgacctatgaggggctccagcacttgaacaaagaacagcaggctgccaaacttatcttggaaacgaaaatcaaagatgcagagggacagatttctcagcttttgaacagagtggacttgtcaatatcagagcagagcaccaaactgaagatgtctcacagagacagtaaccaccagcttcagcttttggacactaaatttaaaggtacagttgaggaactcagtaaccagatattatctgcacggagttggttgcaacaggaacaagaacggatagaaaaagagcttttacagaaaattgatcagctttccttgattgttaaggaaaacagtggagccagtgaaagggatatggagaagaagctcagccagatgtcagccaggcttgacaaaatagaagagggtcaaaagaagacttttgatggtcagagaacaaggcaagaagaggagaagatgcacgggcgaatcaccaagctggagttacagatgaaccagaacatcaaggaaatgaaagcagaagttaatgctgggtttacagccgtctatgaaagcataggatccctcaggcaagttctcgaggccaagatgaagctggacagggaccagctacagaagcaaatccagctgatgcagaagccagagacccccatgtgaagggagctgggacaaggtcctaaaagacagttttgccagtggggctaggagccggatacctctgtagccaggccatcgctgcattcaggattgttccatccatggcgtgcatgtgccaagaaatgtgtttttatgggtctaaatgtttaccttgagtcttgaaaatactcttttgttaaaagtatgaaatacagtttttaccagtttatttcacttctctaaattcaatggaaatcccccgccctggattttgaaaggcttttatcttcttcattttacgaatggaaagacgacaatttttcttcaatgcttgatgcactaatgaagactgtttactattttgaaaaatgtcatggggatttttttttaattaagaaactaatgaatcatcacaggaatgtgttgctcctcaccctaaattaagagaatgtcccagtagattagacttcaacctttgagtccaatttggattttattatcgttgtctatgcacttcttatattggttatcttcttgtaaatcttctgtcttttgtaaggggaaaggatttaacatttagaataaaccccaccatttatgtaatggaaatagtttaaaaattgctaactgccatgtggattgcaaattaaatggaaacttatttagataacgtaaggctcaatatctgcgttgaccacctagatattacaggttttaatatttaaaactatttttgaattatccacaacctgtatagtgatagccatatatttaataatggaatggtggttaacagtctatttactgcacaattaattgttcactaatcaaatagaatgtggtaatttttcagactttatgatctgtttccaaaattggcacaaagtgctagggtttatatacacttatcgtaactgtatttttgtgccttggttttatcatgtcaatgcactgtactctgtaaaagttttgcagacaaaatagaaagtatgataatccgtcagaagtatgatgtaaaactggaatcctctgtattttttaaatgttctaaaaattttatcgctgttaaggtattaatcattcagtattactaatggaatagaaattcatacttttgtatggacaacaattcaaattgatattgcatttatagcactgtaagaaactttcatcttgagcaactttgtagatgatgggtgttttattttcaatcgccatatttgatcagtcattgaaaattggccccagtgctgtttgttcatctctgtatgtaaaaactgacagtgagacacaacgttctgaactgtgagggtgtcccaggaaaaagaaaaacaggaatactttaacaattaaaaagaaaaaaatgttttttgtttgccaaggactcaggaaaataaaaagcattttctatttttaggacaaatcacaaatgaagtgtctaactggctattactgtttacccatataaaatatgctgctaaagtacatattttgctgtcaatggcttgacaattttttttttcaaatttggacatgagaggttatatagggactatattatccaacacatattttcttattttgccacaaatttccacttaacaaataaaaaaaggcgaatgctgttttgcaatcagaaagtgaatttcttttgtggtagcgtacacgtggttcatgtggttctccacgtttaagcacaaaccacagcacaggaagccacaccccctccagcatctctgtcttgtggggtctttgaggagaaggaatcagaacatcgacacctgggaagagggaggcggggaacaccagctggactctggccaaggagtgatgtaagcaggtgacacttggctgtcagctgagcttctcaggtgcttctgacattgccagccccttgagatgagccaccgcaggtgtgctcaccttggctacatgttgaaatcatccagaggagttgggaaatctactgatgccccgctgtgcctcccagaccgattaagtcagaacctctgggaggtgggtcgcaggcatcagtgcgtgcccgaggcctccgcgtgtttgggtgtgcagccgaggtggtgagctgtcgagccacagtgcagttctcttctcaccaaagctcaaatgagaatcagcttccatgttctttcctttaccagaaatttgcaataaaaagaaaaataaaattttca

SEQ ID NO: 132924 - DNA, 513 bp, Homo sapiens
  Payload ID: 5974
  Gene Symbol: FAM81A
  Gene Name: family with sequence similarity 81, member A
  ENST ID: ENST00000560474
  CDS Start-End: 74-513
agccgcgccggcgaggacatgggcagccgcggcgcgcccaccccccgcgccgatgtgaattattaaaaagaaaatggcccaacggagcactgtatttccttctcgtgtcaccaaggaaaggcgagtgagaaccatgccccgacacagccagtccctgaccatggcaccatactcatctgtaagcctcgtggagcagctggaagacaggatcctctgccatgagaaaaccaccgccgccctcgtagagcacgcctttcggattaaagatgacattgtcaacagtttgcagaaaatgcaaaacaaagggggaggtgaccgcttggccaggcttttcttggaggagcatatcagaaacataactgccatagtgaagcaacttaatcgggatatcgaggtactccaggagcagattcgtgcccgggacaacattagctatggaactaattctgccttaaagaccctggagatgcgccagctctccggtttgggagatcttcgaggaagagtggcaag

SEQ ID NO: 132925 - DNA, 528 bp, Homo sapiens
  Payload ID: 5974
  Gene Symbol: FAM81A
  Gene Name: family with sequence similarity 81, member A
  ENST ID: ENST00000557914
  CDS Start-End: 325-528
agccagcgccagcggccgccgcacccagccgcgccggcgaggacatgggcagccgcggcgcgcccaccccccgcgccgctgaacccaccttctctcccgagcaccagagcctgagtgaacaacttgccgcagaagagccttctctagtgtcctccaccgtctcaccagagtagggatgctcttccgcttctccttagtgctgcctccaaaccaatgcaccatcaccaaccaagtctcctctcggaagatgtgaattattaaaaagaaaatggcccaacggagcactgtatttccttctcgtgtcaccaaggaaaggtataatatatggaaaatatgcatctaaggcgagtgagaaccatgccccgacacagccagtccctgaccatggcaccatactcatctgtaagcctcgtggagcagctggaagacaggatcctctgccatgagaaaaccaccgccgccctcgtagagcacgcctttcggattaaagatgacattgtcaacagtttgcagaaaatgcaaaacaaa

SEQ ID NO: 132926 - DNA, 656 bp, Homo sapiens
  Payload ID: 5974
  Gene Symbol: FAM81A
  Gene Name: family with sequence similarity 81, member A
  ENST ID: ENST00000560394
  CDS Start-End: 258-656
agtttccaaagatctctggatcctgtagtcctcctcccgcgccagccaccgaagaacgctgcggacccagctcgctcctggtagcaagacccgaactatccagaacatttctgccttcaactccagcaaggatctgaaggtccaggaccttaggaaagctgcctgcagagaggtggagagatgtgaattattaaaaagaaaatggcccaacggagcactgtatttccttctcgtgtcaccaaggaaaggtataatatatggaaaatatgcatctaaggcgagtgagaaccatgccccgacacagccagtccctgaccatggcaccatactcatctgtaagcctcgtggagcagctggaagacaggatcctctgccatgagaaaaccaccgccgccctcgtagagcacgcctttcggattaaagatgacattgtcaacagtttgcagaaaatgcaaaacaaagggggaggtgaccgcttggccaggcttttcttggaggagcatatcagaaacataactgccatagtgaagcaacttaatcgggatatcgaggtactccaggagcagattcgtgcccgggacaacattagctatggaactaattctgccttaaagaccctggagatgcgccagctctccggtttgggagatcttcga

SEQ ID NO: 132927 - DNA, 567 bp, Homo sapiens
  Payload ID: 5974
  Gene Symbol: FAM81A
  Gene Name: family with sequence similarity 81, member A
  ENST ID: ENST00000560087
  CDS Start-End: 189-567
gctgaagttgggcacagagcgcaactggcgttgcattttcgcgggggctgcatgctagcgaaccaaccgacgcccggagggactgtttgggggagctggggtggtgcacggattgccaggggtaaaggcgagtcagccgacccactactcagagtgagtgaccttggatgtgaattattaaaaagaaaatggcccaacggagcactgtatttccttctcgtgtcaccaaggaaaggcgagtgagaaccatgccccgacacagccagtccctgaccatggcaccatactcatctgtaagcctcgtggagcagctggaagacaggatcctctgccatgagaaaaccaccgccgccctcgtagagcacgcctttcggattaaagatgacattgtcaacagtttgcagaaaatgcaaaacaaagggggaggtgaccgcttggccaggcttttcttggaggagcatatcagaaacataactgccatagtgaagcaacttaatcgggatatcgaggtactccaggagcagattcgtgcccgggacaacattagctatggaactaattctgcct

SEQ ID NO: 132928 - DNA, 572 bp, Homo sapiens
  Payload ID: 5974
  Gene Symbol: FAM81A
  Gene Name: family with sequence similarity 81, member A
  ENST ID: ENST00000559628
  CDS Start-End: 370-572
gctcagccagcgccagcggccgccgcacccagccgcgccggcgaggacatgggcagccgcggcgcgcccaccccccgcgccggtaaaatcaaaacccaatcgtggcaggcagcagcaaattaactgaacccaccttctctcccgagcaccagagcctgagtgaacaacttgccgcagaagagccttctctagtgtcctccaccgtctcaccagagtagggatgctcttccgcttctccttagtgctgcctccaaaccaatgcaccatcaccaaccaagtctcctctcggaagatgtgaattattaaaaagaaaatggcccaacggagcactgtatttccttctcgtgtcaccaaggaaaggtataatatatggaaaatatgcatctaaggcgagtgagaaccatgccccgacacagccagtccctgaccatggcaccatactcatctgtaagcctcgtggagcagctggaagacaggatcctctgccatgagaaaaccaccgccgccctcgtagagcacgcctttcggattaaagatgacattgtcaacagtttgcagaaaatgcaaaacaa

SEQ ID NO: 132929 - DNA, 581 bp, Homo sapiens
  Payload ID: 5974
  Gene Symbol: FAM81A
  Gene Name: family with sequence similarity 81, member A
  ENST ID: ENST00000561361
  CDS Start-End: 235-581
agatttccgggtggcgagctgctgagcttactgggaacttcagtcttcctccctgaaggtgtctgcgtttgctgactggttgtcaccccctgccccacttcagaacgcgtttgtgaagaagacattctctctggatgaagcaactacagaagtgcagatgtgaattattaaaaagaaaatggcccaacggagcactgtatttccttctcgtgtcaccaaggaaaggtataatatatggaaaatatgcatctaaggcgagtgagaaccatgccccgacacagccagtccctgaccatggcaccatactcatctgtaagcctcgtggagcagctggaagacaggatcctctgccatgagaaaaccaccgccgccctcgtagagcacgcctttcggattaaagatgacattgtcaacagtttgcagaaaatgcaaaacaaagggggaggtgaccgcttggccaggcttttcttggaggagcatatcagaaacataactgccatagtgaagcaacttaatcgggatatcgaggtactccaggagcagattcgtgcccgggacaacattagctatggaactaattc

SEQ ID NO: 132930 - DNA, 573 bp, Homo sapiens
  Payload ID: 5974
  Gene Symbol: FAM81A
  Gene Name: family with sequence similarity 81, member A
  ENST ID: ENST00000560123
  CDS Start-End: 399-573
atcagactcaaatgcctgctcctcaagtgcttttcctgatggcccagttcaaactgatcctgccttctgcccagtggcactgaccagcccctccattcttgcacggtggcttgctagtgttatttccctgcataatgggagttcctgcagcgcaggggctgtgtcttgttcagcactgtagaggctcaatgaatatttgttgactggactaaattatttgatgaaatcattaagcaagtgcacagaataaccgtggagctgtctgctagcacgtggtgtgcgatggtggatgtgagacccatgccttacccgaagagtcagatgtgaattattaaaaagaaaatggcccaacggagcactgtatttccttctcgtgtcaccaaggaaaggtataatatatggaaaatatgcatctaaggcgagtgagaaccatgccccgacacagccagtccctgaccatggcaccatactcatctgtaagcctcgtggagcagctggaagacaggatcctctgccatgagaaaaccaccgccgccctcgtagagcacgcctttcggattaaagatgacattg

SEQ ID NO: 132931 - DNA, 557 bp, Homo sapiens
  Payload ID: 5974
  Gene Symbol: FAM81A
  Gene Name: family with sequence similarity 81, member A
  ENST ID: ENST00000560074
  CDS Start-End: 213-557
gcattttcgcgggggctgcatgctagcgaaccaaccgacgcccggagggactgtttgggggagctggggtggtgcacggattgccaggggtaaaggcgagtcagccgacccactactcagagtgagtgaccttggatgtgaattattaaaaagaaaatggcccaacggagcactgtatttccttctcgtgtcaccaaggaaaggtataatatatggaaaatatgcatctaaggcgagtgagaaccatgccccgacacagccagtccctgaccatggcaccatactcatctgtaagcctcgtggagcagctggaagacaggatcctctgccatgagaaaaccaccgccgccctcgtagagcacgcctttcggattaaagatgacattgtcaacagtttgcagaaaatgcaaaacaaagggggaggtgaccgcttggccaggcttttcttggaggagcatatcagaaacataactgccatagtgaagcaacttaatcgggatatcgaggtactccaggagcagattcgtgcccgggacaacattagctatggaactaat

SEQ ID NO: 132932 - DNA, 573 bp, Homo sapiens
  Payload ID: 5974
  Gene Symbol: FAM81A
  Gene Name: family with sequence similarity 81, member A
  ENST ID: ENST00000558348
  CDS Start-End: 248-573
agggcgagacggcggcgacttagcaggcggggcgcatgctgcggagggcaagagtccactcgtactcgccggtcgccgccggcccagatccagaacatttctgccttcaactccagcaaggatctgaaggtccaggaccttaggaaagctgcctgcagagaggtggagagatgtgaattattaaaaagaaaatggcccaacggagcactgtatttccttctcgtgtcaccaaggaaaggtataatatatggaaaatatgcatctaaggcgagtgagaaccatgccccgacacagccagtccctgaccatggcaccatactcatctgtaagcctcgtggagcagctggaagacaggatcctctgccatgagaaaaccaccgccgccctcgtagagcacgcctttcggattaaagatgacattgtcaacagtttgcagaaaatgcaaaacaaagggggaggtgaccgcttggccaggcttttcttggaggagcatatcagaaacataactgccatagtgaagcaacttaatcgggatatcgaggtactccaggagcagattcgtgcccgggacaa

SEQ ID NO: 132933 - DNA, 1560 bp, Homo sapiens
  Payload ID: 5975
  Gene Symbol: FAM81B
  Gene Name: family with sequence similarity 81, member B
  Uniprot ID: Q96LP2
  ENST ID: ENST00000283357
  CDS Start-End: 47-1405
gtcacccttgggaagaggccccagaaacaggaagaccttagttaggatgcaattacaattccttggtacattggcttcctcagaaaaaagaaaaaaatcacagagattgtttttcaaaaatatcaaatctacaaaaaataaagctggaaaagcaagcatcatgagttcagatacaaatgtaaacaaaagtgcctctccaactgcgactgcagaggaacagccagttgaacctgatggcccccttcctggctcagacaataaccaagaaaagaaagtaagattatctccagccaaaatgtcaaccaagaattctacagatctagttgaatatgttgacaagagtcatgcttttctccccatcattccaaacacccagagaggtcagctagaagacagactgaacaaccaggcgcgtaccatagctttccttcttgaacaagccttccgcatcaaggaggacatctctgcttgcctgcaggggacccatggctttcgaaaagaggaatcgctcgccaggaagttactggaaagccacatccagaccatcaccagcatcgtcaaaaaactcagccaaaatattgagattttagaagaccaaataagagctcgagatcaggcggccacaggaactaactttgcagtacacgagataaacatcaaacacctacaaggagttggagatcttcgaggaagagtagccagatgtgattcaagcattgtgaagctttctggagacattcacttattcaggcaagagcaccggcaaattgagaaagccattcaagaattcgtgcccgccctggaaactctttccaagaacttggacatgaaggtgatgcagctcttaggaaagatagaaactgccagttctgagcaaacctcgaatttaaagatggtccagggggattatcgccacgaaatgaaccttttggaattcaaatttcattcactttcaagtaatctgtacgaagaagttgagaataataaaaaatggacagaaaaccaatttctcaaatatagaaaagaccacctgggccatataaatgaatgtctgaaggtcctacaggagaaactggaaaagtctgaaaataaaatggaagaaaaactgctgcagctttcaagcaaagtagagaatttcattaacacacagaaacaggaaacacaactaagtaaagtaaagcatatggaaaataaattgtccaaaaagatggaacaaatggaaaagcagatctggggtgaattagagacaatgcagaatgaatatcaatcaggatttaaatcaattcatgactctctcagctccctccaacaaatacagaaaacaaagatggatttagagaaatataaagtacagaaagacctaaagaaattacagcgcaagatagtggaactccaggaagtataaaccttttcagtcatcttctttttcatcagccaatggagtgatttgttggaaaaagttctgaagaagaaagttactatctctgggatgtttactgcttctaatgtctccttttaaggagacgaatgtaccagaaaaataataaagcaaagaagctt

SEQ ID NO: 132934 - DNA, 556 bp, Homo sapiens
  Payload ID: 5975
  Gene Symbol: FAM81B
  Gene Name: family with sequence similarity 81, member B
  ENST ID: ENST00000512365
  CDS Start-End: 1-384
attcaagaattcgtgcccgccctggaaactctttccaagaacttggacatgaaggaaaagtctgaaaataaaatggaagaaaaactgctgcagctttcaagcaaagtagagaatttcattaacacacagaaacaggaaacacaactaagtaaagtaaagcatatggaaaataaattgtccaaaaagatggaacaaatggaaaagcagatctggggtgaattagagacaatgcagaatgaatatcaatcaggatttaaatcaattcatgactctctcagctccctccaacaaatacagaaaacaaagatggatttagagaaatataaagtacagaaagacctaaagaaattacagcgcaagatagtggaactccaggaagtataaaccttttcagtcatcttctttttcatcagccaatggagtgatttgttggaaaaagttctgaagaagaaagttactatctctgggatgtttactgcttctaatgtctccttttaaggagacgaatgtaccagaaaaataataaagcaaagaagcttcggatgtcttgaattta

SEQ ID NO: 132935 - DNA, 596 bp, Homo sapiens
  Payload ID: 5975
  Gene Symbol: FAM81B
  Gene Name: family with sequence similarity 81, member B
  ENST ID: ENST00000513110
  CDS Start-End: 1-162
gtgatgcagctcttaggaaagatagaaactgccagttctgagcaaacctcgaatttaaagatggtccagggggattatcgccacgaaatgaaccttttggaattcaagaaaagtctgaaaataaaatggaagaaaaactgctgcagctttcaagcaaagtagagaatttcattaacacacagaaacaggaaacacaactaagtaaagtaaagcatatggaaaataaattgtccaaaaagatggaacaaatggaaaagcagatctggggtgaattagagacaatgcagaatgaatatcaatcaggatttaaatcaattcatgactctctcagctccctccaacaaatacagaaaacaaagatggatttagagaaatataaagtacagaaagacctaaagaaattacagcgcaagatagtggaactccaggaagtataaaccttttcagtcatcttctttttcatcagccaatggagtgatttgttggaaaaagttctgaagaagaaagttactatctctgggatgtttactgcttctaatgtctccttttaaggagacgaatgtaccagaaaaataataaagcaaagaagcttcgga

SEQ ID NO: 132936 - DNA, 1527 bp, Homo sapiens
  Payload ID: 5975
  Gene Symbol: FAM81B
  Gene Name: family with sequence similarity 81, member B
  ENST ID: ENST00000507832
  CDS Start-End: 1-547
aactgcgactgcagaggaacagccagttgaacctgatggcccccttcctggctcagacaataaccaagaaaagaaagtaagattatctccagccaaaatgtcaaccaagaattctacagatctagttgaatatgttgacaagagtcatgcttttctccccatcattccaaacacccagagaggtcagctagaagacagactgaacaaccaggcgcgtaccatagctttccttcttgaacaagccttccgcatcaaggaggacatctctgcttgcctgcaggggacccatggctttcgaaaagaggaatcgctcgccaggaagttactggaaagccacatccagaccatcaccagcatcgtcaaaaaactcagccaaaatattgagattttagaagaccaaataagagctcgagatcaggcggccacaggaactaactttgcagtacacgagataaacatcaaacacctacaaggagttggagatcttcgaggaagagtagccaggacctccctccttgcccgcttatacctgagagaaactggctgaagtgcgacaggctgaggaaggagagagatttgatactgcaagcctgaatagaggatgctatctaccagccaccaaacacactcactgatcctctgcagatgtgattcaagcattgtgaagctttctggagacattcacttattcaggcaagagcaccggcaaattgagaaagccattcaagaattcgtgcccgccctggaaactctttccaagaacttggacatgaaggtgatgcagctcttaggaaagatagaaactgccagttctgagcaaacctcgaatttaaagatggtccagggggattatcgccacgaaatgaaccttttggaattcaaatttcattcactttcaagtaatctgtacgaagaagttgagaataataaaaaatggacagaaaaccaatttctcaaatatagaaaagaccacctgggccatataaatgaatgtctgaaggtcctacaggagaaactggaaaagtctgaaaataaaatggaagaaaaactgctgcagctttcaagcaaagtagagaatttcattaacacacagaaacaggaaacacaactaagtaaagtaaagcatatggaaaataaattgtccaaaaagatggaacaaatggaaaagcagatctggggtgaattagagacaatgcagaatgaatatcaatcagatcatggaatttttactaattcatggaattgtcagacttggaaaatccttggacatacccaagacgtgacttgtgggatttaaatcaattcatgactctctcagctccctccaacaaatacagaaaacaaagatggatttagagaaatataaagtacagaaagacctaaagaaattacagcgcaagatagtggaactccaggaagtataaaccttttcagtcatcttctttttcatcagccaatggagtgatttgttggaaaaagttctgaagaagaaagttactatctctgggatgtttactgcttctaatg

SEQ ID NO: 132937 - DNA, 567 bp, Homo sapiens
  Payload ID: 5975
  Gene Symbol: FAM81B
  Gene Name: family with sequence similarity 81, member B
  ENST ID: ENST00000503099
  CDS Start-End: 1-124
acctgatggcccccttcctggctcagacaataaccaagaaaagaaagtaagattatctccagccaaaatgtcaaccaagaattctacagatctagttgaatatgttgacaaagaggtcagctagaagacagactgaacaaccaggcgcgtaccatagctttccttcttgaacaagccttccgcatcaaggaggacatctctgcttgcctgcaggggacccatggctttcgaaaagaggaatcgctcgccaggaagttactggaaagccacatccagaccatcaccagcatcgtcaaaaaactcagccaaaatattgagattttagaagaccaaataagagctcgagatcaggcggccacaggaactaactttgcagtacacgagataaacatcaaacacctacaaggagttggagatcttcgaggaagagtagccagatgtgattcaagcattgtgaagctttctggagacattcacttattcaggcaagagcaccggcaaattgagaaagccattcaagaattcgtgcccgccctggaaactctttccaagaacttggacatgaag

SEQ ID NO: 132938 - DNA, 510 bp, Homo sapiens
  Payload ID: 5975
  Gene Symbol: FAM81B
  Gene Name: family with sequence similarity 81, member B
  ENST ID: ENST00000513529
  CDS Start-End: 1-263
gtgcctctccaactgcgactgcagaggaacagccagttgaacctgatggcccccttcctggctcagacaataaccaagaaaagaaagtaagattatctccagccaaaatgtcaaccaagaattctacagatctagttgaatatgttgacaagggacccatggctttcgaaaagaggaatcgctcgccaggaagttactggaaagccacatccagaccatcaccagcatcgtcaaaaaactcagccaaaatattgagattttagaagaccaaataagagctcgagatcaggcggccacaggaactaactttgcagtacacgagataaacatcaaacacctacaaggagttggagatcttcgaggaagagtagccagatgtgattcaagcattgtgaagctttctggagacattcacttattcaggcaagagcaccggcaaattgagaaagccattcaagaattcgtgcccgccctggaaactctttccaagaacttggacatgaaggtgat

SEQ ID NO: 132939 - DNA, 740 bp, Homo sapiens
  Payload ID: 5975
  Gene Symbol: FAM81B
  Gene Name: family with sequence similarity 81, member B
  ENST ID: ENST00000503361
  CDS Start-End: 1-381
gcagaggaacagccagttgaacctgatggcccccttcctggctcagacaataaccaagaaaagaaagtaagattatctccagccaaaatgtcaaccaagaattctacagatctagttgaatatgttgacaagagtcatgcttttctccccatcattccaaacacccagagaggtcagctagaagacagactgaacaaccaggcgcgtaccatagctttccttcttgaacaagccttccgcatcaaggaggacatctctgcttgcctgcaggggacccatggctttcgaaaagaggaatcgctcgccaggaagttactggaaagccacatccagaccatcaccagcatcgtcaaaaaactcagccaaaatattgagatgtgattcaagcattgtgaagctttctggagacattcacttattcaggcaagagcaccggcaaattgagaaagccattcaagaattcgtgcccgccctggaaactctttccaagaacttggacatgaaggtgatgcagctcttaggaaagatagaaactgccagttctgagcaaacctcgaatttaaagatggtccagggggattatcgccacgaaatgaaccttttggaattcaaatttcattcactttcaagtaatctgtacgaagaagttgagaataataaaaaatggacagaaaaccaatttctcaaatatagaaaagaccacctgggccatataaatgaatgtctgaaggtcctacagg

SEQ ID NO: 132940 - DNA, 1858 bp, Homo sapiens
  Payload ID: 5976
  Gene Symbol: FAM83A
  Gene Name: family with sequence similarity 83, member A
  Uniprot ID: Q86UY5
  ENST ID: ENST00000276699
  CDS Start-End: 177-1280
attgctcaggacagcggtaaatcacttcttggaggtgccctgcacgccggtcctgggagcaggcggcctcccgggggtgcgggagccccactcctccgtggtgtgttccatttgcttcccacatctggaggagctgacgtgccagcctcccccagcaccacccagggacgggaggcatgagccggtcaaggcacctgggcaaaatccggaagcgtctggaagatgtcaagagccagtgggtccggccagccagggctgactttagtgacaacgagagtgcccggctggccacggacgccctcttggatgggggttctgaagcctactggcgggtgctcagccaggaaggcgaggtggacttcttgtcctcggtggaggcccagtacatccaggcccaggccagggagcccccgtgtcccccagacaccctgggaggggcggaagcaggccctaagggactggactccagctccctacagtccggcacctacttccctgtggcctcagagggcagcgagccggccctactgcacagctgggcctcagctgagaagccctacctgaaggaaaaatccagcgccactgtgtacttccagaccgtcaagcacaacaacatcagagacctcgtccgccgctgcatcacccggactagccaggtcctggtcatcctgatggatgtgttcacggatgtggagatcttctgtgacattctagaggcagccaacaagcgtggggtgttcgtttgtgtgctcctggaccagggaggtgtgaagctcttccaggagatgtgtgacaaagtccagatctctgacagtcacctcaagaacatttccatccggagtgtggaaggagagatatactgtgccaagtcaggcaggaaattcgctggccaaatccgggagaagttcatcatctcggactggagatttgtcctgtctggatcttacagcttcacctggctctgcggacacgtgcaccggaacatcctctccaagttcacaggccaggcggtggagctgtttgacgaggagttccgccacctctacgcctcctccaagcctgtgatgggcctgaagtccccgcggctggtcgcccccgtcccgcccggagcagccccggccaatggccgccttagcagcagcagtggctccgccagtgaccgcacgtcctccaaccccttcagcggccgctcggcaggcagccaccccgttcctgaaagtaaacaaaacaaaacaaaaacaaaaaaacaaacaacactttggttcctgatggctttctgaacccagccctgaccttgttgtttcacagctgacggctgagatgaggttagaatgactgggcccggctgaacattccaaattggatttcaccatctgctgagaaagtttaaggaaggcaaagcttgccaggtcacagaagctcccaagcccagctttccaaaggcctcagcctgtgcctgtgtcgagctcagtcctgggagataggggagaacctgcaggcaggaacaagcccccctactcctgaccaccctccatcagcagtctcccctccgtggtcgtctttgttgacaaaggtgcagtttctcctctcctgggcacctgtaacatgtgatgcgctgcctgctgggaggttaggtcggggctgccccggcgagtggagcatgagcagaaccgccgagggtcacttctgggcagaagctttgagagcctgggtccaggttgccacatagaagcagctctccagttgaaaccctcctctgccagcctggggtcctaagcgatgagcagaatcccccactcccaccccaccaacccacaatggatatgtagtgagcaagaaataaacctttgttgtttaa

SEQ ID NO: 132941 - DNA, 1604 bp, Homo sapiens
  Payload ID: 5976
  Gene Symbol: FAM83A
  Gene Name: family with sequence similarity 83, member A
  Uniprot ID: Q86UY5
  ENST ID: ENST00000522648
  CDS Start-End: 177-1061
attgctcaggacagcggtaaatcacttcttggaggtgccctgcacgccggtcctgggagcaggcggcctcccgggggtgcgggagccccactcctccgtggtgtgttccatttgcttcccacatctggaggagctgacgtgccagcctcccccagcaccacccagggacgggaggcatgagccggtcaaggcacctgggcaaaatccggaagcgtctggaagatgtcaagagccagtgggtccggccagccagggctgactttagtgacaacgagagtgcccggctggccacggacgccctcttggatgggggttctgaagcctactggcgggtgctcagccaggaaggcgaggtggacttcttgtcctcggtggaggcccagtacatccaggcccaggccagggagcccccgtgtcccccagacaccctgggaggggcggaagcaggccctaagggactggactccagctccctacagtccggcacctacttccctgtggcctcagagggcagcgagccggccctactgcacagctgggcctcagctgagaagccctacctgaaggaaaaatccagcgccactgtgtacttccagaccgtcaagcacaacaacatcagagacctcgtccgccgctgcatcacccggactagccagaacatttccatccggagtgtggaaggagagatatactgtgccaagtcaggcaggaaattcgctggccaaatccgggagaagttcatcatctcggactggagatttgtcctgtctggatcttacagcttcacctggctctgcggacacgtgcaccggaacatcctctccaagttcacaggccaggcggtggagctgtttgacgaggagttccgccacctctacgcctcctccaagcctgtgatgggcctgaagtccccgcggctggtcgcccccgtcccgcccggagcagccccggccaatggccgccttagcagcagcagtggctccgccagtgaccgcacgtcctccaaccccttcagcggccgctcggcaggcagccaccccggtacccgaactgacggctgagatgaggttagaatgactgggcccggctgaacattccaaattggatttcaccatctgctgagaaagtttaaggaaggcaaagcttgccaggtcacagaagctcccaagcccagctttccaaaggcctcagcctgtgcctgtgtcgagctcagtcctgggagataggggagaacctgcaggcaggaacaagcccccctactcctgaccaccctccatcagcagtctcccctccgtggtcgtctttgttgacaaaggtgcagtttctcctctcctgggcacctgtaacatgtgatgcgctgcctgctgggaggttaggtcggggctgccccggcgagtggagcatgagcagaaccgccgagggtcacttctgggcagaagctttgagagcctgggtccaggttgccacatagaagcagctctccagttgaaaccctcctctgccagcctggggtcctaagcgatgagcagaatcccccactcccaccccaccaacccacaatggatatgtagtgagcaagaaataaacctttgttgtttaagcca

SEQ ID NO: 132942 - DNA, 5393 bp, Homo sapiens
  Payload ID: 5976
  Gene Symbol: FAM83A
  Gene Name: family with sequence similarity 83, member A
  Uniprot ID: Q86UY5
  ENST ID: ENST00000518448
  CDS Start-End: 2015-3319
gatgacttggagaacagtcacttcctctttctgggctacagttttctcatcagtaactgaagagcttgcagtaccttcaacattccttcaggtgaggacttctctttgatcactgctatggtttgaatgtgtctcctaaagttcatgtgttggaagcttgatccccagtgcaaaagtgttgggaggtggggcctaatgagaagtaattaggccatgagtattctgccctcatgtattcatgagattaatgtcattatcatgggagcgggtttgttaaaatgagttcggccccttccttctctctctttcttctgccatacagtatgggatgcacagtgcagaaggtcttaccagatactggcaccatgcttttggacttctcagcccccagaaccatgagccaaataaatttctgttcattataaatcacccagtctgtggcatcctgttagagcagcataaatggactaagataatccctataaagagtggcaacagaacagttcccagctcactggcagaatcctatgatcaactagtaatgtctgccagggaaggaggatgagtggcactaacatgtacggtgtgtttgctcactgttctacaggattcaactagaatctctgggtctgtgtgaagaccaagagctgggaacagaagcagggctctagagggaaaagtttctttcggattccttttttttgttttgttttaaagagctgctctgtgagaagacaaggagaaaatggtccctacaggatactcacctctgtctcagggagacactcaagcatttattcaaccaagaaagagaattagttccaggtgaaaggagaaccccagaatacccacctacttttaaaattctcccctatgcatattcaggaaccaatcagaggatctgtaatgcgctgtgagtagaaagggaaggggaatgggaaagaaaaaagtgaagcttggaatggtggaaagtacatgggctctgccatttaccagctaagtgatcttgggcaagtaacttgacctttctgagcctcggtttcctctttggtgaaatgaggactaataatccatttctccctcagtacagacagccagcatgcagtgagcactcagcgatggccaagtatgggagaagccatgctggaatgaacatgtgggaccattttgtgcagtttctcagcgccaacactgactggtcccctgggctcgtgggccgccggcagcctcggctcgttctccagacagtgttccaagaagccacttccagcgaggaagcgttggcctgagaactggaacctctgcggtctctgcaaacacgacaatgacaaacacttgagagggcatgggagaaaggagctccttcatagggcagggaggggtgggcacttgggtgtgaccaaggagaggaggcgcgcctggtcaacagctctccctggcccgtgtccagctccctcctcacacagagaggggggcgcatctcagggatggcatctttcccccccacagggaaattcttatctttgaaacagcatgggaatcgaggcacccaggaggggagcagaggcaggcaggcctccttcaggcccatcctccagctgggctggtggtgccagggaggctccctgcttggtaacaaaggcctgagggagagttgcgaaacccagcaggaaagccggctcaccttcgcctccccctgcggctgggaggagaggaaatatcccatggctgactgtgccaaggaggtgtctgagccagccctcccggcccgagggcagggcaggtggccctgagagataagccaatcccgcagctgcagatgaggagttctgagaagcattgctcaggacagcggtaaatcacttcttggaggtgccctgcacgccggtcctgggagcaggcggcctcccgggggtgcgggagccccactcctccgtggtgtgttccatttgcttcccacatctggaggagctgacgtgccagcctcccccagcaccacccagggacgggaggcatgagccggtcaaggcacctgggcaaaatccggaagcgtctggaagatgtcaagagccagtgggtccggccagccagggctgactttagtgacaacgagagtgcccggctggccacggacgccctcttggatgggggttctgaagcctactggcgggtgctcagccaggaaggcgaggtggacttcttgtcctcggtggaggcccagtacatccaggcccaggccagggagcccccgtgtcccccagacaccctgggaggggcggaagcaggccctaagggactggactccagctccctacagtccggcacctacttccctgtggcctcagagggcagcgagccggccctactgcacagctgggcctcagctgagaagccctacctgaaggaaaaatccagcgccactgtgtacttccagaccgtcaagcacaacaacatcagagacctcgtccgccgctgcatcacccggactagccaggtcctggtcatcctgatggatgtgttcacggatgtggagatcttctgtgacattctagaggcagccaacaagcgtggggtgttcgtttgtgtgctcctggaccagggaggtgtgaagctcttccaggagatgtgtgacaaagtccagatctctgacagtcacctcaagaacatttccatccggagtgtggaaggagagatatactgtgccaagtcaggcaggaaattcgctggccaaatccgggagaagttcatcatctcggactggagatttgtcctgtctggatcttacagcttcacctggctctgcggacacgtgcaccggaacatcctctccaagttcacaggccaggcggtggagctgtttgacgaggagttccgccacctctacgcctcctccaagcctgtgatgggcctgaagtccccgcggctggtcgcccccgtcccgcccggagcagccccggccaatggccgccttagcagcagcagtggctccgccagtgaccgcacgtcctccaaccccttcagcggccgctcggcaggcagccaccccggtacccgaagtgtgtccgcgtcttcagggccctgtagccccgcggccccacacccgcctccaccgccccggttccagccccaccaaggcccttggggagccccgagtccccaggcccacctctccccgcggccccacgacggcccgcccgccgctgtctacagcaacctgggggcctacaggcccacgcggctgcagctggagcagctgggcctggtgccgaggctgactccaacctggaggcccttcctgcaggcctcccctcacttctgaaggtcccatcccctgctgccctccgcaggcccagggctgggcactccctgagacccaaagacccacctcaacgacgagtggcgttgagccacttccctttgaaaagacactcaaaatcactgccatggttcaatgttcccaggccccaggccatccacttgccggcccccaccagttcttgggttccccgctctagtttgacctgtgcagcacattccagaaggttccagggaggttgtggggcagctagaggacaaaatcatgaaaacagagtccctgtcttccagagatcatccggggctttaatattaatggcccccaaaactccgtaagaagcaggaaatgcagcccaagttttacaaatgggtaaacagaggcactgagagatagatggtagtttggtacttctggttcccagtgcccaggaatggtccactcccaagaaattcaggaaagaaagactgaggagaaggtgtgggaacattctggatgtttcgggagagttggggaaactcctcctcttaggaaaggctaatactagggtatccttgggcccaatgaattaggggtgaggccccagaacccgttatctatgagttgtatgggggagccatctgaagctgtagccaccagggatgcagctagctgaggagtttggggtgttgggttggacaaggcaggttagtagactcagattcttgcttcaaagagccttgggctggcctggaggtccctggagtctagactggacctaggagcttgagttgtcaggggccaggactggccccactgcagtgcccaggccagtcttgagcagcagggagggctcagctgtccccagatccaggtgcctctgaccagcctggtcacctcctgaggaataaatgctgaacctcacaagccccatcattcatttcttctcaattcacagtgcccctctttgtttctggggtggaactaggtcctgagggcacagcctagctgagtgcaaagaaatataggatgcttagaaagcatacaggaggggccaggcgtggtggctcatgcctgtaatcccagaactttgggatgccaaggtggttggattacctgagatcaggtggattacctggtctcgagaccagcctgaccaatatggtgaaaccccgtctctactaaaaatacaaaaattaggctgagacaggagaattgcttgaacccaggaagcagaggttgcaatgagctgagattgcatcactgcactccagcatgggcaacaaagcaagactccgtcacagaaaaaaaaaaaaaaaagagagagagcatagaggagggttggccagccctgtggtgggtgggatgtcagagacacttcccagataaagtaagagttaaccctgcacctcaggtgtgatagtggggtcagtggtatgtgatccaggctggggagccagaggggagcaggtgccaactccacatccttctcctgtttctaggccctctcctcccttgtcggtttttggcggggaagctcagccttcgctgtggagggacgagagcacagagctcttcctcctggtggcctctgacccctgacggcctgtggcatcctccctagtcccctctgcccatccatccctctgttccaattctccactgctcccagcatgatctggggcatcttggcttctggtttcttttattattattattattattaattattgtattcctgtccttcacttttttcctccttagttcctgaaagtaaacaaaacaaaacaaaaacaaaaaaacaaacaacactttggttcctgatggctttctgaacccagccctgaccttgttgtttcacagctgacggctgagatgaggttagaatgactgggcccggctgaacattccaaattggatttcaccatctgctgagaaagtttaaggaaggcaaagcttgccaggtcacagaagctcccaagcccagctttccaaaggcctcagcctgtgcctgtgtcgagctcagtcctgggagataggggagaacctgcaggcaggaacaagcccccctactcctgaccaccctccatcagcagtctcc

SEQ ID NO: 132943 - DNA, 3701 bp, Homo sapiens
  Payload ID: 5976
  Gene Symbol: FAM83A
  Gene Name: family with sequence similarity 83, member A
  Uniprot ID: Q86UY5
  ENST ID: ENST00000536633
  CDS Start-End: 2015-3118
gatgacttggagaacagtcacttcctctttctgggctacagttttctcatcagtaactgaagagcttgcagtaccttcaacattccttcaggtgaggacttctctttgatcactgctatggtttgaatgtgtctcctaaagttcatgtgttggaagcttgatccccagtgcaaaagtgttgggaggtggggcctaatgagaagtaattaggccatgagtattctgccctcatgtattcatgagattaatgtcattatcatgggagcgggtttgttaaaatgagttcggccccttccttctctctctttcttctgccatacagtatgggatgcacagtgcagaaggtcttaccagatactggcaccatgcttttggacttctcagcccccagaaccatgagccaaataaatttctgttcattataaatcacccagtctgtggcatcctgttagagcagcataaatggactaagataatccctataaagagtggcaacagaacagttcccagctcactggcagaatcctatgatcaactagtaatgtctgccagggaaggaggatgagtggcactaacatgtacggtgtgtttgctcactgttctacaggattcaactagaatctctgggtctgtgtgaagaccaagagctgggaacagaagcagggctctagagggaaaagtttctttcggattccttttttttgttttgttttaaagagctgctctgtgagaagacaaggagaaaatggtccctacaggatactcacctctgtctcagggagacactcaagcatttattcaaccaagaaagagaattagttccaggtgaaaggagaaccccagaatacccacctacttttaaaattctcccctatgcatattcaggaaccaatcagaggatctgtaatgcgctgtgagtagaaagggaaggggaatgggaaagaaaaaagtgaagcttggaatggtggaaagtacatgggctctgccatttaccagctaagtgatcttgggcaagtaacttgacctttctgagcctcggtttcctctttggtgaaatgaggactaataatccatttctccctcagtacagacagccagcatgcagtgagcactcagcgatggccaagtatgggagaagccatgctggaatgaacatgtgggaccattttgtgcagtttctcagcgccaacactgactggtcccctgggctcgtgggccgccggcagcctcggctcgttctccagacagtgttccaagaagccacttccagcgaggaagcgttggcctgagaactggaacctctgcggtctctgcaaacacgacaatgacaaacacttgagagggcatgggagaaaggagctccttcatagggcagggaggggtgggcacttgggtgtgaccaaggagaggaggcgcgcctggtcaacagctctccctggcccgtgtccagctccctcctcacacagagaggggggcgcatctcagggatggcatctttcccccccacagggaaattcttatctttgaaacagcatgggaatcgaggcacccaggaggggagcagaggcaggcaggcctccttcaggcccatcctccagctgggctggtggtgccagggaggctccctgcttggtaacaaaggcctgagggagagttgcgaaacccagcaggaaagccggctcaccttcgcctccccctgcggctgggaggagaggaaatatcccatggctgactgtgccaaggaggtgtctgagccagccctcccggcccgagggcagggcaggtggccctgagagataagccaatcccgcagctgcagatgaggagttctgagaagcattgctcaggacagcggtaaatcacttcttggaggtgccctgcacgccggtcctgggagcaggcggcctcccgggggtgcgggagccccactcctccgtggtgtgttccatttgcttcccacatctggaggagctgacgtgccagcctcccccagcaccacccagggacgggaggcatgagccggtcaaggcacctgggcaaaatccggaagcgtctggaagatgtcaagagccagtgggtccggccagccagggctgactttagtgacaacgagagtgcccggctggccacggacgccctcttggatgggggttctgaagcctactggcgggtgctcagccaggaaggcgaggtggacttcttgtcctcggtggaggcccagtacatccaggcccaggccagggagcccccgtgtcccccagacaccctgggaggggcggaagcaggccctaagggactggactccagctccctacagtccggcacctacttccctgtggcctcagagggcagcgagccggccctactgcacagctgggcctcagctgagaagccctacctgaaggaaaaatccagcgccactgtgtacttccagaccgtcaagcacaacaacatcagagacctcgtccgccgctgcatcacccggactagccaggtcctggtcatcctgatggatgtgttcacggatgtggagatcttctgtgacattctagaggcagccaacaagcgtggggtgttcgtttgtgtgctcctggaccagggaggtgtgaagctcttccaggagatgtgtgacaaagtccagatctctgacagtcacctcaagaacatttccatccggagtgtggaaggagagatatactgtgccaagtcaggcaggaaattcgctggccaaatccgggagaagttcatcatctcggactggagatttgtcctgtctggatcttacagcttcacctggctctgcggacacgtgcaccggaacatcctctccaagttcacaggccaggcggtggagctgtttgacgaggagttccgccacctctacgcctcctccaagcctgtgatgggcctgaagtccccgcggctggtcgcccccgtcccgcccggagcagccccggccaatggccgccttagcagcagcagtggctccgccagtgaccgcacgtcctccaaccccttcagcggccgctcggcaggcagccaccccgttcctgaaagtaaacaaaacaaaacaaaaacaaaaaaacaaacaacactttggttcctgatggctttctgaacccagccctgaccttgttgtttcacagctgacggctgagatgaggttagaatgactgggcccggctgaacattccaaattggatttcaccatctgctgagaaagtttaaggaaggcaaagcttgccaggtcacagaagctcccaagcccagctttccaaaggcctcagcctgtgcctgtgtcgagctcagtcctgggagataggggagaacctgcaggcaggaacaagcccccctactcctgaccaccctccatcagcagtctcccctccgtggtcgtctttgttgacaaaggtgcagtttctcctctcctgggcacctgtaacatgtgatgcgctgcctgctgggaggttaggtcggggctgccccggcgagtggagcatgagcagaaccgccgagggtcacttctgggcagaagctttgagagcctgggtccaggttgccacatagaagcagctctccagttgaaaccctcctctgccagcctggggtcctaagcgatgagcagaatcccccactcccaccccaccaacccacaatggatatgtagtgagcaagaaataaacctttgttgtttaagccac

SEQ ID NO: 132944 - DNA, 3167 bp, Homo sapiens
  Payload ID: 5977
  Gene Symbol: FAM83B
  Gene Name: family with sequence similarity 83, member B
  Uniprot ID: Q5T0W9
  ENST ID: ENST00000306858
  CDS Start-End: 117-3152
aaaccttcggcggccggcgctgtgcggcgggcgcggttgcgcgcggcttggggcaaatacttctcaccactgcatgaatggacatttgaaagtgccatagccaaacacttgcaagcatggagacctcatcaatgctttcctcattgaatgatgagtgtaaatctgacaactacattgagcctcactacaaggaatggtatcgagtagccattgatattctgattgaacacgggttagaagcataccaagaatttcttgtccaggaacgagtttcagactttcttgctgaggaagaaattaattatattttgaaaaatgtccagaaagttgcacaaagcacagcacatggtactgatgattcctgtgatgataccttatcttcagggacctactggcctgttgagtctgatgtggaagctccaaatcttgacttaggctggccatatgtgatgcccggactcttagggggcacccatatagatctcctttttcatccaccaagagcacatctacttacgataaaagaaactattcggaagatgataaaagaagcaagaaaggtcattgctttagtgatggatatatttacagatgtggacattttcaaagaaatcgttgaggcatcaactcgaggagtatctgtttacattctgcttgatgagtccaattttaatcattttctaaatatgactgagaaacaaggttgttcagttcagcgtctcaggaatattcgagtgcgaacagtaaaaggccaagattatctttcaaaaacaggggcaaaattccatggaaaaatggaacagaaatttttgttagttgactgccagaaagtgatgtacggttcttacagttatatgtggtcatttgagaaagctcacctcagcatggttcagataattacaggacaacttgttgagtcctttgatgaagaatttagaactctctatgccagatcctgtgtccctagttcatttgctcaggaagaatcagcaagggtgaagcatggaaaagccctctgggaaaatggcacttaccagcattcggtgtcttcattagcatctgtttccagccagagaaacctttttggtagacaagacaagattcataaactagattccagttacttcaaaaacagagggatatatactttaaatgaacatgacaaatataacataagaagtcacggatacaaacctcattttgttcctaactttaatggtccaaacgcaatacgtcagtttcaacccaatcagataaatgaaaattggaaaaggcatagttatgctggggaacagccagaaacagtgccatacctcctgcttaatagggctctgaatagaaccaataatccacctggtaattggaaaaagccatctgatagtctcagtgtggcgtcctcatcacgggaaggctatgtaagccaccacaacacacctgcccagagttttgccaatcggcttgcgcagagaaaaacaacaaatcttgcagacaggaattcaaatgttcggaggtcttttaatgggacagataaccatatccgctttttgcaacaacgaatgccaacccttgaacataccacaaagtcattcctacgtaactggagaattgaatcctacttaaatgatcattcagaagctacaccggactcaaatggatcagctttaggtgaccgatttgagggctatgataatcctgagaatttgaaggccaatgccctttatactcattctcggcttcgttcctctttagtatttaaacccactttacctgagcaaaaggaagttaacagttgtacaactggctcctcaaattcaactatcattggttctcagggaagtgagacacctaaagaggtcccagacacccctacgaatgtacagcatttgacagacaaacccttgccagaatcaatccccaagctcccattgcagtcagaggcaccaaaaatgcacaccttgcaggttcctgaaaaccactcagtagccttaaaccaaactacaaatggccatactgaatcaaataactatatatataaaaccttgggtgtaaataagcagacagaaaatctaaagaatcaacagactgagaatctacttaaaaggcgaagtttcccgttatttgacaactcaaaagccaacttagatcctggaaatagtaagcattatgtatatagtacacttaccaggaatcgagttagacaaccagaaaagcccaaagaagatttgctgaaaagttctaaaagcatgcacaatgtgactcataacttggaggaggatgaggaggaagttaccaagagaaactctccaagtggcactactaccaaatcagtttccattgctgctttacttgatgtgaataaagaggaatctaacaaagaacttgcttcaaagaaggaagttaagggttccccaagttttttgaaaaaggggtctcagaagttaaggtcattacttagccttaccccagataagaaagaaaatctatccaaaaataaagcacctgccttttatagattgtgtagtagctctgacacattagtttctgagggtgaagaaaatcaaaaaccaaagaaatcagacacaaaagttgattcatctcctagaagaaagcattcttcctcatcgaattctcaaggcagcatccacaagagtaaggaagatgtaacagttagcccatctcaagagataaatgctccaccagatgaaaataaaagaacaccttctccaggtccagttgaaagcaagttcttggaaagggcaggagatgcctctgccccaagatttaacactgaacagatccaataccgagattcaagggagattaatgcagttgttacccctgaaagaagacctacttcttctccaaggccaacgtccagtgagcttctacgatctcattcaactgatcggcgtgtttacagtcgttttgagccgttttgtaagattgagagctctattcagccaacaagcaacatgccaaataccagtataaatcgcccagaaataaaatctgcgactatgggcaacagttatggcaggtctagtccattgcttaattacaacactggtgtttatcgctcatatcaacccaatgagaacaagtttcgaggatttatgcaaaagtttggaaactttatacacaaaaataaatagctattaaaatgcaaa

SEQ ID NO: 132945 - DNA, 3145 bp, Homo sapiens
  Payload ID: 5978
  Gene Symbol: FAM83C
  Gene Name: family with sequence similarity 83, member C
  Uniprot ID: Q9BQN1
  ENST ID: ENST00000374408
  CDS Start-End: 98-2341
gcagaaggcggttctgctggtctcctcttcctgctgcagccagcccagcgtgcgggccatgggccctgccggcgggtgaggcagccgcgtggcaggcatgttcggaggcccggggcctggggtcctgggagcccagggcatggcgggacccctgcggggccgggtggaagagctgaagctgccgtggtggcgggagagctcaccgctggtgctgcggcacagcgaggcggctcggctggcggccgacgccctcctggagcggggtgaggctgcctacctgcgggtcatctccgaggagcgggagctgcccttcctgagcgccctggatgtggactacatgaccagccatgtgcgcgggggccctgagctcagcgaggctcaggggcaggaggcctccgggccagaccgcctcagcctgctctctgaagtcacctcagggacttacttccccatggcctctgacatagaccccccagacctggacctgggctggcccgaggtgccacaggccacaggcttcagccccacccaggctgtggtccacttccagagggacaaggccaagaacatcaaggacctgctgcgcttccttttcagccaggcccacacggtggtggctgtggtgatggacatattcactgacatggagcttctgtgtgacctcatggaggcctcaagccggcgtggtgtccctgtgtacctgctccttgcccaggagcacctgaggcacttcctggagatgtgctacaagatggacctcaatggggagcacctgccgaacatgcgtgtgcggagcacgtgtggggacacatactgcagcaaggctggccgccgcttcacggggcaggccctggagaagttcgtcctcattgactgtgagcaagtggtggcgggcagttacagcttcacctggctttgcagccaggcccacactagcatggtgctgcagctgaggggccgcatcgtggaagactttgaccgggagttccgctgtctgtacgctgagtcgcagcctgtggagggcttctgtggcggtgaggacccgctgtctccccgggcactgcgtcctccccctgtggccctagccttcaggcctgatgtcccaagccccacgtcgtccctgccctccagcaccagcctcagcagcatcaagcagtcaccgcttatgggtcgctcctcctacctcgctctaccaggaggtggtgattgcagtgatacgggtgtggtgtcctcgtccctgggtcctgcccgccgtgaggccagtggccagccctccctacatcgccaactgtcagaccctaaccacggctcccctcctgggctctatagggccaatctcggcaagctaggggcatacccatggtcccagtcctcccctgccctcaaccataatagtaccagccccttaaccttggcagtggggtcacctctgcttcctcgctcccggcccctcctccagttccatcggggtgccccagctctgtcccggttcccagagaatgggctcccaggaagccaagagcccagccccctgcggggtcgatgggtacctggcacaaccctggagacagtggaggagaaggagaagaaggcatctccaagtcagagccgtggccagctggatctccttgtccccttccccagagcccgagaagtgggagaccctgactctggggttacccccaactcaggcccccttcggcctggcgagcaggccccagaggacaggaggttgtccccaagccaggccgacagccagctggatctcctgtcccgagccctgggtactgggggtgcccctgagttgggttccctcagacctggtgatcgggccctggaggacaggaggctgtccctaaaccaaagccgtggccaatcagacctcctgatgcagtaccccaaggcccagggttccagagtgccccttgaaaccaactcctcagccagacctgccagacgggcaccagatgagcggcggcagaccctggggcacagccagctggacctcatcacaaagttcggcccattccgtggtgaggggcctgggcccaatggtctcccgatatcaagccctgctcgcacggctggagctgggtctggggatgagaaacggctaaccctgggccacagcaagctggacctcatcaccaagtatcatcagttgcacggggccaggcagggaactgagcctgggggtcccaagggtggccatctcaatggtggtaacagtgacctggtcagggatgagaaacggctgaccctgggtcacagcaaactggacctcatcactaagtacaacaagtccaagttcaagcagctccgaagccgctttgagtcctagccaaaggactggcatcgggggtgcactggcaagggcaggcccctcctctgtccaccgagactctggacttgctcaggtcccagactggggaagggaggtgtctagaaacccaggtcagacacactctctgggctcaagattcttgtgtacacacacacacacacacacacacacacacaccctaactagtatcttcttgaatctaggctgtgtttccagccctgtgctgggcctgtagagctgacaggtgggtcacactcagacctggggacagaggtgaaatgcacaagctgctggagaaggggtcagagccatatcaagttaaaggttaaccagttacagagggtgttagaaaacaaagggcagagagtcctggagaaggtggagtagtcagaaaactttcttagaggagatggaggtggcctttgagccaggccctgaaggatggggaggttttggacagagggaggagagagttagaaaaatttttggtagagagaatcaggtgaaagagatgccctaaagaggactgagtgggtctgaggtgaatgagtgaggaagagcagagtatgtggatacccggaaacacacacacacacacatcatcattatcatcatcatcattgtcgtcgtcatcatcttgctgagtcatcatcatcatcatcatcattgtcgtcgtcatcatcttgctgagtgtctcttgaagtacaggctgtgacaggttgtgggccattttcctgaactcaccacttacccgggatagtaaacatgatacacatcaataaaggcagactttattgtgaa

SEQ ID NO: 132946 - DNA, 2425 bp, Homo sapiens
  Payload ID: 5979
  Gene Symbol: FAM83D
  Gene Name: family with sequence similarity 83, member D
  ENST ID: ENST00000217429
  CDS Start-End: 42-1889
aaagcagccaatgggagagccgaggcggggaggtgcggccaatggcgcgggcctgtttgattcaaaggttgcctataaagcgggactgcacgccggtttttgtccgagggctgtcgagtccgagcgccgccatggctctgctgtccgagggcctggacgaggtgcccgccgcctgcctgtcgccgtgcgggccgcccaacccgaccgagctgttcagcgagtcacggcgcctggctctggaggagctggtggcgggcggccccgaagccttcgcggccttcctgcgacgcgagcgcctggctcgtttcctgaaccccgatgaggtgcacgccattctgcgcgcggcggagaggccgggagaggagggcgcggcggcggcggcggcggccgaggactcgttcggctcctcgcacgactgctcttcgggcacctacttccccgagcagtcggacctggagccaccgctgttggagcttggctggcccgccttctaccagggcgcctaccgcggcgccacgcgtgtcgagacgcacttccagccccgcggcgctggcgaaggtggcccctacggctgcaaggacgctctgcgccagcagctccgctcggcgcgagaggtgattgcagtggtcatggacgtgttcacagacatcgacatcttcagagacctgcaagaaatatgcaggaaacagggagttgctgtgtatatccttctggaccaggctctcctctctcaatttctggatatgtgcatggatctgaaagttcatcctgaacaggaaaagttaatgacagttcggactatcacaggaaatatctactatgcaaggtcaggaactaagattattgggaaggttcacgaaaagttcacgttgattgatggcatccgcgtggcaacaggctcctacagttttacatggacggatggcaaattaaacagcagtaacttggtaattctgtctggccaagtggttgaacactttgatctggagttccgaatcctgtatgcccagtccaagcccatcagccccaaactcctgtctcacttccagagcagcaacaagtttgatcacctcaccaaccgaaaaccacagtccaaggagctcaccctgggcaacctgctgcggatgcggctggctaggctgtcaagtactcccaggaaggcggacctggacccagagatgcccgcagagggcaaggcagagcgcaagccccatgactgtgagtcctctactgttagtgaggaagactacttcagcagccacagggacgagctccagagcagaaaggccattgacgctgccactcaaacagagccaggagaggagatgccagggctgagtgtgagtgaggtgggaacacaaaccagcatcaccacagcatgtgctggtacccagactgcagtcatcaccaggatagcaagctctcaaaccacgatttggtccagatcgaccactactcagactgacatggatgagaacattctctttcctcgaggaactcaatctacagaagggtcaccagtctcaaaaatgtctgtatcgagatcttccagtttgaagtcttcctcctctgtgtcttcccaaggctctgtggcaagctccactggttctcccgcttccatcagaaccactgacttccacaatcctggctatcccaagtacctgggcaccccccacctggaactgtacttgagtgactcacttagaaacttgaacaaagagcggcaattccacttcgctggtatcaggtcccggctcaaccacatgctggctatgctgtcaaggagaacactctttactgaaaaccaccttggccttcattctggcaatttcagcagagttaatttgcttgctgttagagatgtagcactttatccttcctatcagtaactgctccgtgttcagactcctggtttcttccaggcttacagtggacatcatcagcttcctgctttaaaaaatatcttatgtccctaattgcctttcttttacctgactttgtcacctttgttgtctttgaattctttaggctgcatattattttacatgctttgttttgtcatgtatataccaggtattggttttatggtttaaacactatggatacaggggtttgttttgcacaattttaatagtcatgcactacataatgatgttttggtcaatgacagaccacgtatatgttggcagtctcataagattataatactgtatttttactataccttttctgtgtttagatacaaataccattatgttacagttgcctacagtattcagtgcagtaacatgatgtacaggtttgtagcctgttttgcatttttcttaggttgtatgctcttctgttttaaaggtttgaatcaccagcatttttgtgatcaaaatcctatttagaaaaaataaaactactttctgtttatctcttt

SEQ ID NO: 132947 - DNA, 2475 bp, Homo sapiens
  Payload ID: 5979
  Gene Symbol: FAM83D
  Gene Name: family with sequence similarity 83, member D
  ENST ID: ENST00000619304
  CDS Start-End: 42-1889
aaagcagccaatgggagagccgaggcggggaggtgcggccaatggcgcgggcctgtttgattcaaaggttgcctataaagcgggactgcacgccggtttttgtccgagggctgtcgagtccgagcgccgccatggctctgctgtccgagggcctggacgaggtgcccgccgcctgcctgtcgccgtgcgggccgcccaacccgaccgagctgttcagcgagtcacggcgcctggctctggaggagctggtggcgggcggccccgaagccttcgcggccttcctgcgacgcgagcgcctggctcgtttcctgaaccccgatgaggtgcacgccattctgcgcgcggcggagaggccgggagaggagggcgcggcggcggcggcggcggccgaggactcgttcggctcctcgcacgactgctcttcgggcacctacttccccgagcagtcggacctggagccaccgctgttggagcttggctggcccgccttctaccagggcgcctaccgcggcgccacgcgtgtcgagacgcacttccagccccgcggcgctggcgaaggtggcccctacggctgcaaggacgctctgcgccagcagctccgctcggcgcgagaggtgattgcagtggtcatggacgtgttcacagacatcgacatcttcagagacctgcaagaaatatgcaggaaacagggagttgctgtgtatatccttctggaccaggctctcctctctcaatttctggatatgtgcatggatctgaaagttcatcctgaacaggaaaagttaatgacagttcggactatcacaggaaatatctactatgcaaggtcaggaactaagattattgggaaggttcacgaaaagttcacgttgattgatggcatccgcgtggcaacaggctcctacagttttacatggacggatggcaaattaaacagcagtaacttggtaattctgtctggccaagtggttgaacactttgatctggagttccgaatcctgtatgcccagtccaagcccatcagccccaaactcctgtctcacttccagagcagcaacaagtttgatcacctcaccaaccgaaaaccacagtccaaggagctcaccctgggcaacctgctgcggatgcggctggctaggctgtcaagtactcccaggaaggcggacctggacccagagatgcccgcagagggcaaggcagagcgcaagccccatgactgtgagtcctctactgttagtgaggaagactacttcagcagccacagggacgagctccagagcagaaaggccattgacgctgccactcaaacagagccaggagaggagatgccagggctgagtgtgagtgaggtgggaacacaaaccagcatcaccacagcatgtgctggtacccagactgcagtcatcaccaggatagcaagctctcaaaccacgatttggtccagatcgaccactactcagactgacatggatgagaacattctctttcctcgaggaactcaatctacagaagggtcaccagtctcaaaaatgtctgtatcgagatcttccagtttgaagtcttcctcctctgtgtcttcccaaggctctgtggcaagctccactggttctcccgcttccatcagaaccactgacttccacaatcctggctatcccaagtacctgggcaccccccacctggaactgtacttgagtgactcacttagaaacttgaacaaagagcggcaattccacttcgctggtatcaggtcccggctcaaccacatgctggctatgctgtcaaggagaacactctttactgaaaaccaccttggccttcattctggcaatttcagcagagttaatttgcttgctgttagagatgtagcactttatccttcctatcagtaactgctccgtgttcagactcctggtttcttccaggcttacagtggacatcatcagcttcctgctttaaaaaatatcttatgtccctaattgcctttcttttacctgactttgtcacctttgttgtctttgaattctttaggctgcatattattttacatgctttgttttgtcatgtatataccaggtattggttttatggtttaaacactatggatacaggggtttgttttgcacaattttaatagtcatgcactacataatgatgttttggtcaatgacagaccacgtatatgttggcagtctcataagattataatactgtatttttactataccttttctgtgtttagatacaaataccattatgttacagttgcctacagtattcagtgcagtaacatgatgtacaggtttgtagcctgttttgcatttttcttaggttgtatgctcttctgttttaaaggtttgaatcaccagcatttttgtgatcaaaatcctatttagaaaaaataaaactactttctgtttatctctttagaatatctgtgttcttagcattaaataaatataaacttgtgcttctgta

SEQ ID NO: 132948 - DNA, 2361 bp, Homo sapiens
  Payload ID: 5979
  Gene Symbol: FAM83D
  Gene Name: family with sequence similarity 83, member D
  Uniprot ID: Q9H4H8
  ENST ID: ENST00000619850
  CDS Start-End: 18-1775
cgagtccgagcgccgccatggctctgctgtccgagggcctggacgaggtgcccgccgcctgcctgtcgccgtgcgggccgcccaacccgaccgagctgttcagcgagtcacggcgcctggctctggaggagctggtggcgggcggccccgaagccttcgcggccttcctgcgacgcgagcgcctggctcgtttcctgaaccccgatgaggtgcacgccattctgcgcgcggcggagaggccgggagaggagggcgcggcggcggcggcggcggccgaggactcgttcggctcctcgcacgactgctcttcgggcacctacttccccgagcagtcggacctggagccaccgctgttggagcttggctggcccgccttctaccagggcgcctaccgcggcgccacgcgtgtcgagacgcacttccagccccgcggcgctggcgaaggtggcccctacggctgcaaggacgctctgcgccagcagctccgctcggcgcgagaggtgattgcagtggtcatggacgtgttcacagacatcgacatcttcagagacctgcaagaaatatgcaggaaacagggagttgctgtgtatatccttctggaccaggctctcctctctcaatttctggatatgtgcatggatctgaaagttcatcctgaacaggaaaagttaatgacagttcggactatcacaggaaatatctactatgcaaggtcaggaactaagattattgggaaggttcacgaaaagttcacgttgattgatggcatccgcgtggcaacaggctcctacagttttacatggacggatggcaaattaaacagcagtaacttggtaattctgtctggccaagtggttgaacactttgatctggagttccgaatcctgtatgcccagtccaagcccatcagccccaaactcctgtctcacttccagagcagcaacaagtttgatcacctcaccaaccgaaaaccacagtccaaggagctcaccctgggcaacctgctgcggatgcggctggctaggctgtcaagtactcccaggaaggcggacctggacccagagatgcccgcagagggcaaggcagagcgcaagccccatgactgtgagtcctctactgttagtgaggaagactacttcagcagccacagggacgagctccagagcagaaaggccattgacgctgccactcaaacagagccaggagaggagatgccagggctgagtgtgagtgaggtgggaacacaaaccagcatcaccacagcatgtgctggtacccagactgcagtcatcaccaggatagcaagctctcaaaccacgatttggtccagatcgaccactactcagactgacatggatgagaacattctctttcctcgaggaactcaatctacagaagggtcaccagtctcaaaaatgtctgtatcgagatcttccagtttgaagtcttcctcctctgtgtcttcccaaggctctgtggcaagctccactggttctcccgcttccatcagaaccactgacttccacaatcctggctatcccaagtacctgggcaccccccacctggaactgtacttgagtgactcacttagaaacttgaacaaagagcggcaattccacttcgctggtatcaggtcccggctcaaccacatgctggctatgctgtcaaggagaacactctttactgaaaaccaccttggccttcattctggcaatttcagcagagttaatttgcttgctgttagagatgtagcactttatccttcctatcagtaactgctccgtgttcagactcctggtttcttccaggcttacagtggacatcatcagcttcctgctttaaaaaatatcttatgtccctaattgcctttcttttacctgactttgtcacctttgttgtctttgaattctttaggctgcatattattttacatgctttgttttgtcatgtatataccaggtattggttttatggtttaaacactatggatacaggggtttgttttgcacaattttaatagtcatgcactacataatgatgttttggtcaatgacagaccacgtatatgttggcagtctcataagattataatactgtatttttactataccttttctgtgtttagatacaaataccattatgttacagttgcctacagtattcagtgcagtaacatgatgtacaggtttgtagcctgttttgcatttttcttaggttgtatgctcttctgttttaaaggtttgaatcaccagcatttttgtgatcaaaatcctatttagaaaaaataaaactactttctgtttatctctttagaatatctgtgttcttagcattaaataaatataaacttgtgcttctgta

SEQ ID NO: 132949 - DNA, 1926 bp, Homo sapiens
  Payload ID: 5980
  Gene Symbol: FAM83E
  Gene Name: family with sequence similarity 83, member E
  Uniprot ID: Q2M2I3
  ENST ID: ENST00000263266
  CDS Start-End: 191-1627
tgtcagaacagtgtggcaggggctgctgcagggagccatttggacatctgcagggccccgccggaggcctcggatggccacgtagggtctgcctatcaggagaacccccagatgatcacagtccccagagacagccagacccccggggacccagcctctcacagtcagtcctcccacccgagtgaccccgatggcggcctcccagctggcggcgctggaaggagtggactccggtcccagggtgcccggggccagccccggctttctatattccgagggccagcggctggcactggaggctctgttgagcaagggcgcggaggcgttccagacctgcgtgcagcgcgaggagctgtggcccttcctcagtgcggatgaggttcagggcttggcagcggcagctgaagactggacagtggccaagcaggagcccagcgggatggcagagggagccaccaccaccgatgtggacgcgggcagcctgagctactggcctgggcagtcggagcagccggcgcccgtcctgcggctgggctggccagtggactctgcgtggaaaggcatcacccgggcgcagctgtacacccagcctcctggagagggtcagccgcccctcaaggagctggtgcggctggagatccaggctgcccacaagctggtggccgtggtcatggacgtcttcactgacccagacctgcttttggacttggtggatgctgccacgcgccgctgggtacctgtctacctgctcctggaccgccagcagctgcctgccttcctggaactggcccagcagctgggggtgaacccctggaacacggagaacgtggatgtccgtgtcgtgcggggctgcagcttccagagccgctggcgacggcaggtgagcggcaccgtgcgggagaagtttgtgctgctggacggcgagagggtcatctcaggatcctacagcttcacgtggagtgacgcacgcctgcaccgaggcctggtgaccctgctgactggtgaaattgttgacgccttcagccttgagttccggacgctgtacgcggcctcctgcccgctcccacctgcgcccccccagaaaccctcggtcataggtggcctgcagcggggccgcagcccgcaccgcgtgtcccgccgccgctccgtggcccccgcgtcgcctccgccgcctgacggcccgctggcccaccgcctggccgcctgccgcgtctcccctgctaccccggggccggcactcagtgacattctaaggagtgtgcagcgcgcccggacccccagcggccccccggcccggcccagccgctccatgtgggacctaagccgcctgtcccagctgtctggctccagtgatggggacaacgagctcaagaaatcctggggctccaaggacactccagccaaggctctgatgaggcagcggggcactggaggaggcccctggggggaagtggactcccgacctccgtggggcggtgccctgcccctgccccccgcccaccgcctccgctatctgtccccagcccgaaggcggttcggtggggatgctacattcaaacttcaagagcccagaggcgtcaggccgtcagactgggccccccgggcaggacttggggggcaaccctgaacaggagcccaagccaaatctgctggcccacccaaggagcagtgccggacaactgtcggctcagagccctctgcctcaatgccctgccttggacaaggcttctggcctcggcgtctgtcaagcagaagggatgtttgtcacttgttctgcaacttgggccgggagtggtggctcatgcctgtaatccctgcactttgggaggctaaggtgggagggttgcttaaggccaggagttggagaccagcctgggcaacatagtgagaccccatctctacaattaaaaaaacaaattagttggg

SEQ ID NO: 132950 - DNA, 565 bp, Homo sapiens
  Payload ID: 5980
  Gene Symbol: FAM83E
  Gene Name: family with sequence similarity 83, member E
  ENST ID: ENST00000593772
  CDS Start-End: 293-565
gaagccgggaagcaccgcagaagtagaagccggggagccacagcctacgttctcggaaaaagcaggcactggaagggaggccattgagcccggcactagccggtgtggccccggctttctatattccgagggccagcggctggcactggaggctctgttgagcaagggcgcggaggcgttccagacctgcgtgcagcgcgaggagctgtggcccttcctcagtgcggatgaggttcagggcttggcagcggcagctgaagactggacagtggccaagcaggagcccagcgggatggcagagggagccaccaccaccgatgtggacgcgggcagcctgagctactggcctgggcagtcggagcagccggcgcccgtcctgcggctgggctggccagtggactctgcgtggaaaggcatcacccgggcgcagctgtacacccagcctcctggagagggtcagccgcccctcaaggagctggtgcggctggagatccaggctgcccacaagctggtggccgtggtcatggacgtcttcactgacccagacctgcttttggacttggtg

SEQ ID NO: 132951 - DNA, 15561 bp, Homo sapiens
  Payload ID: 5981
  Gene Symbol: FAM83F
  Gene Name: family with sequence similarity 83, member F
  Uniprot ID: Q8NEG4
  ENST ID: ENST00000333407
  CDS Start-End: 95-1597
gaggcgccccgcccctcggcggctccaggtgcggctgtgggacctcggaccgcggcggggccggggccagggccggggccggggccggggcgccatggccgagtcccagctgaactgcctggacgaggcgcacgtgaacgagaaggtgaccgaggcgcaggccgccttctactactgcgagcggcggcgggccgcgctggaggcgctgctgggcggcggcgagcaggcctaccgcgagcggctcaaggaggagcagctgcgggacttcctctccagcccggagcgccaggccctgcgggccgcctggagcccctacgaggacgccgtccccgccgccaacgcccggggcaagagcaaggccaaggccaaggcccccgcgccggcgccggctgagtccggcgagtccctggcctactggcccgaccgttccgacaccgaggtgcctcctctggacctgggctggacggacactggtttctaccgcggcgtgagccgggtcacgctcttcacccacccgcccaaggacgagaaggcgccgcacctcaagcaggtggtcaggcagatgatccaacaggcccagaaggtcattgctgtggtcatggacctcttcactgatggtgatatctttcaagacattgtggatgctgcctgtaagcgccgggtcccagtgtacatcatcctggacgaggcaggagtgaagtatttcctggagatgtgtcaggacctgcagctcactgacttccggattcggaacatccgtgtccgctctgtgacaggcgtcggcttctacatgcccatggggaggatcaaggggaccctgtcatcaaggttcctgatggtggacggtgacaaagtggccactggatcttacaggttcacctggagttcctcccatgtggacagaaacctcctcctgctcctgacaggacagaacgtagagccctttgacacggagttccgggagctgtacgccatctccgaggaggtggacttgtaccggcagctgagcctggcgggcagggttggcctccattactcctccactgtggctcgaaagcttatcaaccccaagtacgccttggtgtcaggctgccgccacccgcctggggagatgatgcgctgggctgcccggcaacagcgggaggcgggcggcaacccggaggggcaggaggagggcgccagcggtggcgagtcggcctggcgcctggagagcttcctgaaagacctggttacggtggagcaggtgctgccccccgtggagcccatccccttgggagagctgagccagaaggatggcaggatggtctctcacatgcacagagacctgaagcccaaatcccgagaggcacccagccgaaacggcatgggagaagcggcccggggggaggccgcccccgccaggcgcttcagcagcaggctcttcagtcgccgagccaagaggcctgcggcgcccaatggcatggccagctctgtctccaccgagacctctgaagtggagtttctgacggggaagaggcccaacgagaattccagtgctgacatctcaggtaaaacaagtcccagttctgccaagcctagcaactgtgtgatttcctgagctgcgggatggtggtgggcaggacgtgtggatgcctgcctgccctgccctgtgctgtggagagcgcaggtcgcacactgcaccagtttgcacatcagacgccaactggccttctgccctgcagcctccgtcctggcctcagggacgctggatcccaaatgagagggtccgaagcatctcagtcacacgcctccaccggactgtcggtggctgggcaggggtcagtgccacggcctccttgtttacatgaagtggaagcttgaccagtgtctgctcgcctttgtgccccaccccctccgctgattgccagatggggtgagggcccattctttaaacctttatggggtggggtgtctggggcagctgcagtggcttctcctttcccaggcttcctggtgcttctggttccccacgccactccccacccaagagattggtggaataaaagggaagagggcagggccctgagcctgggatcccaagttccagtctttctctagcctctgaactccagatgtaaggtgcagctggaactgcaggggcactggctgcagtggccttcctggccccatccctgcaggctcctgaactagacttgaatgagggtaagatcctgcggcctcccgcagtgggggcagaatttgacactgcttttctgagagcgctcgcactgaggtctctttttccctgcccagtgccgtcctggcagtctcggcatgggtggttgagacctccttggctgctgcctgctgcgggcctatgtgggggtccttacagggcctttacctgggactgctccttccctcagtcagtaaactttggtttacagcccaaggcagggagggagcttggctgagaggggattgggggtgtgggaggctgggccctgaggacaggagcatttgccttttctccctcaactctaacggggtcctcggaccccttcaccaaccagggcttccaggttacactttggccagactggcctttgcctcctgcgagagtcaggccatttttaggagcctgtgcctcgccagagcaggtcagcctaatggccatgaggctgagctgggaggcccagtaagcaattccattctgccttccccacttgggtgactggagagggccgaggagagtttgtgaatggacctgggagaaattgccaaactgcagactctgtgagccggccctgccggcagggcgatgggggatccaagccctgtggaagagccatgcagcggactttcttgccctctgacctctgaaccaaactctcatcctctttctttccttctaaaaaaccctaggacactaccagcacctgggggaggggtacagatgtctgcaaggcagctgatgtgagagcaagaaaaggggctgctctggctgggctgtgggagccaggcattgcttctgaggaagcaggaagtggggaccacatgtggcggccattgaggagatgcaatctctctggcagtggggaggggaagggaaaggaagggtgagcctgtccccagggtcttctctgttaatcccaaggctggcttctagggcgtgtggagaagggactctggcccacctccctgagcttttatgaaggtgaaatgcttctgggaagtgtttccttaggcaccaagaccaggcagtgtggcatgagctcattctggaggggagggaagggagagaggggggaggtgggatgtgggggtgttacacctcagctcgaggcggacaccttgaaggtatgggacatgaaatgtgtaaactgcaacgcggcaaagagatcactctctggtgtggagggtgggtgtctctggggattagggaggcagcctggggaagggaccggcctccaagcaagtcagccaagggcatctgtgcctcccctgccagaagagcaggccctgctttgtccctttacctcctctaggcccaaagcacacccaggtccctcccctgccctgacatctaatctgggaggatccctgattggaatctccaagtcaccacagccttgagccaggccttcctttctgcctcagtttctccatgtgccaagatggcgtttttcacactttcttggtagaaatgatggggagaccatatgttaggaagcaagttggcatagtgggaagagggccagccacaaggcaggagtgcccaggcagggtgcctctccctgctggcctgtgtcctcgtccttatagcagtgtggacaagatggtgtcggcaccccccgctccaaaaggcttgagacagaaactgtagtccgagatggcaaggattttgaactcacaaaatgcagctcttcatgtttgcctgtctgcctaggcaccggcccactctgttctgcctcttggcttctcagctgtgagtacgcctgccctctgttccagcacttgcacatactttgtgaagcagtctcttactcatcaaatctcaagggtacatctggccctcccagttggatggcaagttcaagggtggatcatgcccttggtccctgcacagcagcttctgcaaggctggttacattggaagggctctaggaggaacaggataaggcagcactctcggggctggggtctggcttcactgcacccccctcccaccccacaccaccaccaagctgctgtctttctgagtcagcttctgtagggtaagtgttcacagctggtgcagctctttgggaaacctaacctcccagtgagctgagcccctggtgcggccgccacgcttgcttctgccccacaagggcagtaagcacaggacttctggatggatctgggagcctgccccttgggatttggcaaaacttcccatctccttagctacctgtccttaatcttatccctgacccctcgagggctttcaagatagcctctgttaacatcactaccctctgcctgtgtagaactttatagaaaggctaggcaaaaaatgagacccagagatatggaagaaactggccaaagaggggaaagtgggctatttcttttttttttttcttttttttttctgagacagagtctcaccctgttgcccaggctggagtgcagtgacagcgatcttggctcactgcaagctccgcctcccgggttcacgccattcttctgcctcagcctcctgagcagctatgactacaggtgcccaccaccatgcctggctaatttttttatatttttattagagacagggtttcaccatgttagccaggttggtcttgatctcctgaccttgtgatccgcccgccttggcctcccaaagtgctgggattacaggccaccgtacccggccaggctatttttttgttttgtttttgtttactactgtattgcttttctctttttcatatttattgagcacctactatatgccagtcaccatgctagatgctttagtaacatgaaggtttcaaactaagaaaagctcaacaaagagccctttagaaaggtaacagttttcctgtgtattgggggagtgggtctcataaggttgtatgatgagaagcgcaagtaattgttttgttttttttttgagacaatgtcttgctctgtcgatcaggctggagtgcagtggcgtcatctcagctcgctacaacctccacctcctgggtttaagtgattctctggcctcagcctcctgagtagctgagattacaggcacgcgccaccacgcccggctaatttttgtatttttagtagagacagggtttcactatgttggtcaggctgatcttgaactcccggcctcaggtgatctgcctgccttggcctcccaaactgctgggattacaggcatgagccaccacgcccagcctggctaaggttcattatccccatctttcagatgaggaggcacacaactctccccagatcccacgtcacagagaatgcaggtctgagtctgttccttgagctcagggtcttggcaatggtgatgctttggagctgcagaatcctctgttggggatggggctgccctgtgcattatagtacgtttagcaacatccctagcttccacctactaaatgccactagcactccttcagatgagaccaccaaaaatgtctccagatgttaccacatgtcccctggggggtaaaagtgcccccgttgagagcactggctcttttcttcacagtcctgacctggtggcctgcacaggccacttctccgaagtgtttcaatgcactctctgccctgggtaccttggacacagcaccctggcccagagaggttggctgacttgcctgagacgctgcttcctgggagacgcagtagcatctttcctttctgttctggttatctttcttagttctttaccaccttatattccccatgacaggtgtgtttatgtacacacatctgcctcactccactcagctccctgtcaggtttcctgccagtctgtccctcttccttcaggctcagctacgtcctgcacagacagtaccactgcacatacctgtgtgtgcccagcggtggacccacctccaaaagcagccagtgctgacagcagagagccttccacactcaagtcaggccaagcaggaatcgctacctgcctgtcatgaccacattctcagtgaacattgacaaagcccccttagcagctaattagccctgccgtgcgctagggatgcaatttctcatctggcagtgcgccacactcctgcctccctgcccaaaggacgtagtggctgctgctgatcgtctgcactgctgttccaggggcaggaggtttgctgcaaatcaggtacccccagctcagtgagcagaaccagtccaaggttgagtgaggagaagggcaagaagggcaggcacagccgtgagtatgttctggggctaagtaaccatgagatcagcccagagaccttgcacagttaggcaggcctggacttctcgcccttccccttgcagcttctgctctcccagctagggactgaggaaagccctgcttctagatgccatgtgctgctgcctggcacgataggtacccatctgtccttggggttcctgagcctggagagcgggctttgtgagcactggtgcctcacctgcctggctcagctctgcagccacaatatatgcttaatacctatttgttaaatgattgaagacttgactgccattcagtacagagaattagccaggtgaataaacaggatgtgtcatagaggttctagaattgatcatgaccctttctgtctcattcctgacttctaataccgtatatgccaaatggggttctgctgtgatttaatttcttaaggactgggtttatcaaaagtccctcctgatctaatcctttcctctaggaaggcttctcctttcttcatctgtcctaagtgcatggtcttcatctcctgggtggtccagactaggtggcactgggcctgcaggcctctagctgctcaaggatggccctgtctgcatgcttcctttcaaaagctagcatagaaaggagggcccaaggtgaggaaatttgtccaaagtcacccaatgagtcgcaggaagggctagaatctggttatctggaccgtcctagagcactttcacagtgacagccggctggaatcaagttttcatttagaaaaatggctagaagttagggcattgcctgcagccactgaaaagcagctttaggagcagatgtccacgtaatagaaggagatgggctagggcctgccacggaagccagcaagcgcgtgggagctgggggaggaaaggagcaaaaggcaagaacaggcagtatgtccgcggtgcccacagtgctgtgggtacaagcaaggggaaaagagcccatggtgtgcagaaaaccatgcgtcatgattcttatttcctgctcgcagctttgactctctgcctcatctcttcctggaagtgtcttggaagttaggcgactgcacagggaaaggttcgctgcagtgcttgcaggcctgcacccatttattcatccggtggatatttgctgggtgcccggcctggggatccatggtgagcgaggaaggcatggtattgaagtggtatgcctgcatgaccttggcgggggcgcatggcatagagaggacaggcttcagaacaggcaggcaagggctgaaatcctatctctgccaccgaacagctaatgaccccagcaagcaatttcacatccccgaactttcctgtttcctcatgtgtcaaatggggatgatctcgagacgactctccagagtaaccacgtgaagcacctagcacaggggctgacgcaaacagctgggcatcggaggagcctccagggttgtgacctccagtggcttattttccttttgggatcttctctcctagatcctcccctttaattccctgtgaaatttaccactttcatattgaatcgttggcacacagggctaactgcttgttcacctgaaggaagctacagagttcaggtttcttttttctttctttctttcttttttgcttttttaagatgatcttgctccgtcacccaggctggagtgcagtggcgtaatcatggcttcctgcagcctcaaactcctgggctcaatgagttccttgagatcttccatcctcagcttcccaagtagctagtagtagtagtggcttgcaccaacgctcctgccctaattttcaatatttttttgtagagataggatctcactgtgttacccaagctagacttgaactcctggcctcaagcgatccttccgccttggcctcccaaagtgttgggattacaggcattagctaccacacctggccaaggcccaggtttcgacagaaagggagagaaaacctgccagagatgccatttcggagccactctgcttggcagggacctgtgttcccctcatgcaggttcatccttagagggctgcggtcttatctggttgtgcaaaagtcccacaacctttctggattgatagtttgtggtgaaataaacaattttagtttgtttggagaatcttttgtatacaaaatacaaataaaacctaaatcaaagaaacagagcatgtccggagaagtctgccaacccttctccaggccatggggcttcccaagccaggcctgtactcctcatgtagattccacaccccgccttgatgtctttggctttcacactagtgactatagcctggtgggacggggtctaggggccacagtcctggtcctgcgcaggtggccctggagagaagccttggagaacttggagaagcccacgcggctggcagcatcatggtgagaggctgacaccttgtggctggctggcagcatacgtccttcctcccctaggtcagctagacggccaaagcagggatctgcaagctccttctgtggcgggccaaaaagtgaacattcagtgtgtctgttgcagctactgtcatagcactgaggcacccctagacagtacagaaacaagcaggtgtggccatgttccagtgaaaccttatgaatactgaaatctgaatccataattttcatgtatcacaaagtagtaatattcttttaatatgcaaaaaccggccaggtgcggtggctcatgcctgtgacctcagcactttgggaggccgaggtgggtggatcacctgaggtcaggagttcgaaaccagcctggccaacgtggtgaaaccctgtctctattaaaaatacaaaaattagcctggtgtggtggcacatgcctgtaatcccagctactcgggaggctgaggcgtaggaattgcttaaacctgggaggcggaggttgcagtgagctgagatcatgccactgcacttcagcctgggcaacagagctagactccatctcaaaaacaaacaaacaaaaaaacaaaagcaaaaaccagtcttagctcacaggctgtgccaaaacaggcagtgggctggatttggtcctcaagcctgggcttgctgacctctggcctaggacacctctcctttatgcctccgctcccaacacggactctcaactctcatgtttaccttgtcattgttctgtcaagaggaattcactagtctcactcctccaaccagaccgctgccactaaggcttcttctgaacagaaattctggatttgttctcacccatttcataaatgtacataagcacccatcaggtgccaagccctgtgctgagatgcctgcagagcccagagttttcaccaactttttttttaagagatgggggtctctgttgccaggttggagtgcaatgacataatcataactcaccgcaacctcaaactcctaggttcaggtgatcctcccgcctcagcctcccaagtagctgggactacaggcatgcaccaccctgcccagctaattaaaaaaaaaactttagggatggggtcttgctatgttgtctaggctggtctctaactcctgggctcaagtgatcctcccacctcagcctcccaagtagctgggcttacagatgtgagccactgcacctgctcaacatttaattttttcattcattcattcgttcattcatttgttcaaacgaacttattgagaacttactgtgttccaggcactgtgataagatagacctggcctttaccttcaaatgttcagaacatggttaggaagatggatactgggaggcaagtgttctgatgggaaagcacagcatgtaaagaagcccagaggaggcacttaacctgggggagaagaacagggtaggcttcctggaggaggaggtaatctctgagccgatacctgaggagtgaatggaggaggggacaatgaggcaaggcattccagggaaaggtccagagcctagacagaactcttttaggagaattatgagaatcacaattatcgaggacacagtgaagactcagataactcaaatataggttttgcccgcaaagccttcctgtctggtgggtgagacagtctacagcaagctgctccaaggatatggagaaaaaagtttttcctctggccttgtaggattggttattactgagcctggagtacgcaaaggccagcgagtgctcctaaggcagggagggggctgccttcactatgggtgctcaggaaatctgccaggggaagggagatgtgggcctgcctcggctgcagaaacccctcagaggaggaggaggggcttgaactgagctttgaagaaagtgtagacttggggacaggcagaggaagagggggcatcataggcagcagaaaccacatggacaaactctctgccggagaatgggcatggccgggctgaggggtccctggacaggaaccagccttccctatgcacctgcacccgtgagtctcacaacagccccaacaggcaagtgttattttcctcaattctaccaattaaaaactgaccttgggcaactgcttaacctatctctgccttactttcttcatctgtatctacctcagaaagttactatgaggactgaataagctcatacatatacaatgcttggagcagaggctggtactagagctggcttcatgggcatgaaacctgtgaacacagaaccccatgctttcattttccacttagtcctgcctggcatagtatgcagtttttttaatttgagatggagtctccctttgttgcccaggcttgagtgcagtggcgcgatctcagctcactgcaacctccacctcccaggttgaagcagttctcctgcctcagcctcctgagtagctgggattacaggtgcgcgccaccatacccagctaatttttgtatttttagtagagatgaggttttgccattttggccagcctggtcttgaacctctgacttccatgatccacctgcctctgcctcccaaagtgctgggaggattacaggcatgaaccactacgcctggcctggtatgtgggttaaaatgttaggttttatcattatcttaggtggagaataacaaatccgattcaatatattcattttagaaacgaggaaactgaagcttagatagtttgtgtgacttgcaaaaagtcacgcagcaaacaagctgcagaatgaagggtggagatggagagatagaattctcatcttagaggtgaaagtaggataatgacccagctgagcttgctgagtcctgcgagcgtcgcacgcccccagagacaacataaggagagaagtgcagacagattcctttgaaggagcttagagaaagagatggtagggaaaagagcatgaacagttgtagaggtaggaggaaagctggctatttggggaagcaaagaaaagattctcagagtaaaacgtattggtgaagccatggaaacaaggactgagaaagtctcttggatcttggccacaaaaaggttatagatgagcttagagaaatgaatttcagtagagttagggctagaagccaggttcagagagagaaaacgagagagcattcctggtggtggagatggccgcaggccattatttaaaaagctaggataagaaaatagagaagaaagggaaggaagctatttgaagggagtgggagaaaagccagatctcagttgggacgtggaggaaggaccaccagaggcagtaatttagccggaaagaggtgtatttctttccttgagtttatagggggtaaagaggatggggctgagatactaaagactacgaggacaactgttcattgagggctggtcatctccccagctgcactgtggggttcccaagtcagacatcccagaggcaatatagcagcgtggacaagagcttactcgttggagtcagaccgcctaggttcaacgatgggttagttagcccttcagtgcctccattttcctatctagaaaatgtggataacaatggttgttgtgaagattaacagccataatccacgtaaagccctcagtacagtgtatgacacacagcaagtgtccaccaaagggtagttattattaaccataatcctggttctcttgtgagctgcctcctgtgtgtctagcattggccagcacacatgagggggtccagtgtttgctgcttaactaagtagcttctcaggaagtgtggtcataaaaaatgataggtgatttagaaggtgagacagacacaagggatgtgttgcacagtaaatgctcccagacatgcaataaatgcttataagcatgccctctgtaatcagccctctttagagagtttccctgcctcattgctcttggtctttggcaatggctacacccactgcccaagcaagcagtatcagctgtcagctgtccccttgtcttttggatcagattcctttacagggatcttcccattgttataagcttcaagaattggagaatgcttaatgaacacttccaaattcttcatagctatgaggggccagtgcaaagggcggaaggagttcttctgtgtcacagaaattagagctggagcagatccagcttgctatccccccttcccccagcttgtgggttattgcagaattgttcacaaaaattcccattgccttggaatttgtccaagccgagggcagggatcacaacacaacctctcaagggaaaaaaggaaggcctgttgcttgagatggctcagagcacttttggtagccagccaaggcagctatcactcatgaaatctgccttcccctccagcaaaaagccaactgtatagaacaccacatatagagcgctaagaatagcacagcgctccaagaacatagtgcacttggcctgcatacaagtgtgcagggcttaacgagtctttttactctgaaagctgggtgggttggaacaaacaaacagaaaaatattttccccaagtagcatgcagagaggaaatgagagcaagcacaagagagcaccctggcatagcattctctgacctgggctgccttttcagggtatgagttgattccgcaggcaccaaggcatgcctgtaagccctacagggcagacgccctcaccccaatcattggcttaacattcacaccaggctgagtaagccccaaaagtcctgccattggctctgacaggaattgaaacccatcttctccacaataaatatttgattgacagattggcttccttcctataagtatagaaagcgagggcaggttccatccaaagccgcagttctgggtgatgagagctctgagagcccagaaaagaccctgaaccacatcccactgtttgttggaagaagaaactcatttgtgggtctgttcataaaagagtctgggaagatagtctccttaacagtgtctggatgtaacagactatgggcggcttttactttataactttctatattgtctgaaatacagaatattaaatattgagttaatattatatttactcaatgttactttttttttttttgagacagggtcttgctctattgcccaggctggagtgcagtggtgtggctcactgcagccttgaactcccaggctcaagcaatcctcccacctcagcatcccaagtagctgggactgtaggcgcaggccaccatgcgcaactatttattttctttctttttgtagaaatgggctctgcctgtgttgctctagctagtctcaagctcctggcctcaagcaatccttccgccttggcctctcaaattgctgggattacaagcataagccaatgtgcctggcctcaatgttacttttatgatcagaaaaacggccatcttatttggaaattattttcctattctcaagtgggcaaataggagaaggtttcaggcatttgttttgtctctgggagggaaggcacaatgaggtggagtggacaaattgctgaggcctttatggacaaagattctaagaagaacaggctttggccatctctggatattcccattctgctccctgccaccagagagcaaatgtcgtaggtcaccacacatcaccagtctcttgcctagctaaccgtaactcattctttagttctccttgaaggtgtcacttcttccaggaagccatttctgtccctcccgagatggagtcccatgtccctaccatttgcttccagggcaccttctcacagcactgcatcatggttatctgcttatctgctggacacccctactcgactgaggtccttgaaggaagagagagtgtatcactcatctgcatagcctttgtaacttagtaaaagtgcctgacatgctcactaaacatttactgagtaattatttatttgggggccttttacgatcagaacaatgtgaaggacacaaagatgaaaaagaaaccatctgcttcaaggtacttacaactgaaatgtatcaaacaattacccagaaagtcaagcaccaacttaagtgctaaaataggggtccaagcaaccaactttgaagattaggaaggttttagattctgaatgtttctcattcattgtgtttttgagttcagaatccccatactggaaggctaatatggggtatgtgcatacaattttaaggactcacgttcttacaacctatattagaatttgacgcacgatctttcttctgtccttcttgcagttgccctaggaatacatgccacttactcttaattgacgtttatgaaataccttggcttcatttgctgaaaggctctaagtgttgagcattgttactatgttacaatggttgttttattattaaagcagtgccaaggaggttacacaacagcttggatcaggaagtgaaacaagggcggtgatcccactgaagctacaggggatggggatttgggacggtaaaatgttaattacccaagatggaatgtgggctagagtccagcgttgtgctcctggagatcatttcggtcgcaaaagctcactggcaatgggtcctaagcgtcctgccctcctctggctgaaatgttggattcacttcgatgaatgctgctatagggaaagaacccagtggccaccagccaggagcacacgtcttgctcagcatcaactatcctggaagatttccaggagctgaagggctgttctctttgcatgcaataaattattcatttctaa

SEQ ID NO: 132952 - DNA, 1917 bp, Homo sapiens
  Payload ID: 5981
  Gene Symbol: FAM83F
  Gene Name: family with sequence similarity 83, member F
  Uniprot ID: Q8NEG4
  ENST ID: ENST00000473717
  CDS Start-End: 453-1451
ggggagtgcctgtgtggctgagggacacgtccaagctgcagtcggctctgtggttgtggacacctggcagagccatgccttctctagtctgggtcatccaaacacacgtggggtgcaggggccaggtggagccctcttgtcgtttttgttatctaacggtaattacggagtccagaaagagaattggaaatgccggcagtttaattaaagctgaatggcaggagaggggcatttggaggctccctccctgccttcactccccgtcctgccgcccaggcaggatgtcagatgaggagacgttgagctcatcaaacacccaatgagaagtcttacaacatcagaagctgtctgccaatgcgcctgcgacagcttatagaaactgctgccgcctcgaatcaacctctctccccaggcattgcacgtcagtaggtaaccaggtcattgctgtggtcatggacctcttcactgatggtgatatctttcaagacattgtggatgctgcctgtaagcgccgggtcccagtgtacatcatcctggacgaggcaggagtgaagtatttcctggagatgtgtcaggacctgcagctcactgacttccggattcggaacatccgtgtccgctctgtgacaggcgtcggcttctacatgcccatggggaggatcaaggggaccctgtcatcaaggttcctgatggtggacggtgacaaagtggccactggatcttacaggttcacctggagttcctcccatgtggacagaaacctcctcctgctcctgacaggacagaacgtagagccctttgacacggagttccgggagctgtacgccatctccgaggaggtggacttgtaccggcagctgagcctggcgggcagggttggcctccattactcctccactgtggctcgaaagcttatcaaccccaagtacgccttggtgtcaggctgccgccacccgcctggggagatgatgcgctgggctgcccggcaacagcgggaggcgggcggcaacccggaggggcaggaggagggcgccagcggtggcgagtcggcctggcgcctggagagcttcctgaaagacctggttacggtggagcaggtgctgccccccgtggagcccatccccttgggagagctgagccagaaggatggcaggatggtctctcacatgcacagagacctgaagcccaaatcccgagaggcacccagccgaaacggcatgggagaagcggcccggggggaggccgcccccgccaggcgcttcagcagcaggctcttcagtcgccgagccaagaggcctgcggcgcccaatggcatggccagctctgtctccaccgagacctctgaagtggagtttctgacggggaagaggcccaacgagaattccagtgctgacatctcaggtaaaacaagtcccagttctgccaagcctagcaactgtgtgatttcctgagctgcgggatggtggtgggcaggacgtgtggatgcctgcctgccctgccctgtgctgtggagagcgcaggtcgcacactgcaccagtttgcacatcagacgccaactggccttctgccctgcagcctccgtcctggcctcagggacgctggatcccaaatgagagggtccgaagcatctcagtcacacgcctccaccggactgtcggtggctgggcaggggtcagtgccacggcctccttgtttacatgaagtggaagcttgaccagtgtctgctcgcctttgtgccccaccccctccgctgattgccagatggggtgagggcccattctttaaacctttatggggtggggtgtctggggcagctgcagtggcttctcctttcccaggcttcctggtgcttctggttccccacgccactccccacccaagagattggtggaataaaagggaagagggcagggccct

SEQ ID NO: 132953 - DNA, 2929 bp, Homo sapiens
  Payload ID: 5982
  Gene Symbol: FAM83G
  Gene Name: family with sequence similarity 83, member G
  Uniprot ID: A6ND36
  ENST ID: ENST00000345041
  CDS Start-End: 167-2638
gcccccgccgcccctccccgcgcggcccgccctccccgattgctcatgggcagagaagcagaggccgcggagaggcccccgagcgcgcggtgccccagctgggccggagctaggagctggaccttgcccacccacccccggcagcagtgcccgggcaggcggcgccatggccttctctcaggtgcagtgtctggacgacaaccatgtgaactggcgctccagcgagtccaagcctgagttcttctacagcgaggagcagcggctggcgctggaggccctggtggcccgcggccgggacgccttctacgaggtgctcaagcgggagaacatccgagacttcctctcggagctggagctcaagcgcatcctggagaccatcgaggtgtacgacccgggctctgaggaccctcggggcacgggcccctctcaggggcccgaggacaatggggtcggcgacggcgaggaagccagcggggcggatggggtccccatcgaggccgagccgctgccctccctggagtactggccccagaagtcggaccgctccatcccgcagctggacctgggctggcccgacaccatcgcctaccgcggcgtgacccgggctagcgtctacatgcagccccccatagacgggcaggcccacatcaaagaggtggtgcggaagatgatcagccaggcacagaaggtgatagctgtggtcatggacatgttcaccgacgtggacatcttcaaggacctgctggacgccggcttcaagaggaaagtggccgtgtacatcatcgtggatgagagtaacgtcaagtacttcctgcacatgtgtgagcgggcctgcatgcacctggggcacctcaagaatctcagagtgcggagcagcgggggaactgagttcttcacgcggtcggcaaccaagttcaagggtgccctggcccagaagttcatgtttgtggatggagaccgggctgtgtgcggctcctacagcttcacgtggtcggccgcgcggacggaccggaatgtgatctctgtgctgtctggccaggtggtggagatgtttgaccggcagttccaggagctgtacctcatgtcacacagtgtgagcctcaagggcatccctatggagaaggaaccggagccggagcctattgtgctgccctctgtggtccccctggtgcccgcgggcactgtggccaagaagctcgtcaaccccaagtacgcacttgtcaaggccaagagcgtcgacgagattgccaagatctcctctgagaagcaggaggccaagaagcccctggggctgaaaggcccagcgctggctgagcatccaggggaactccccgagctgctgccacccatccacccaggactgcttcacctggagagggccaacatgtttgagtacctgcccacgtgggtggagccagacccggagcctggcagcgacatcctgggctacatcaatatcatcgaccccaacatctggaacccccagcccagccagatgaaccgcatcaagatccgtgacacctcccaggccagcgcccagcaccagctgtggaagcagagccaggacagcaggccccgtccagagccttgccctcccccagagcccagtgccccccaggacggtgtcccagctgagaacggcctcccccagggggaccctgagccattgccccccgtgcccaagccccggacagtccctgtggcagatgtactagcccgggacagcagtgatattggctgggtcctggagctccccaaagaggaagctccccagaatgggacagaccataggctacccaggatggcaggcccaggccacgccccactccagcggcagctatctgtgacccaggatgaccccgagagcctcggggtggggctccccaatgggctggatggggtggaagaagaagatgatgacgactacgtaaccctcagtgaccaggacagccactcaggcagctccggccgtggccctggcccccgacggccctcagtggcttcctctgtgtcagaggagtacttcgaggtgagagagcactcagtccctctccggaggcgccactcagagcaagtggccaacgggccaaccccaccaccgcgccggcagctgagtgccccccatataacccgagggacctttgttggaccccagggtggctccccatgggcccagagtcggggaagagaagaagcagatgcgttgaagaggatgcaggcccagcgctccacagacaaggaggcacagggccagcagtttcatcatcacagggtccctgcctcagggactagggataaagacggcttcccaggaccccctaggtaccgctctgctgctgacagcgtccagagctctaccagaaacgctggcccagccatggctggcccccaccactggcaggccaagggaggtcaggtaccccgcctgcttccggatcccggcagcccaagactggcccaaaatgcccgccccatgaccgatggcagggccaccgaggagcatccgagtcccttcggaatcccatactccaaactgtctcagtcgaagcacctaaaggccaggacgggcggtagccagtgggcctcatcggattctaaacggagggctcaagccccccgggaccgcaaagacccctagcagcatgtcccagcctggagccacaccttctgaggccccagcccagactcatgacgcggagggcagacaggccgcctgggcctaccagagcccactgggacggcaggaaggtgggatgggcgggagacgttggcactcacctggtcggtgcaccagtaccaggtggccatgatggtcaggccaaaggtcatcccggtccacggcaggtcccctgtgtgggggtctcgaaacatgtgcatggcgtctgtacgtggcaggtggcaggtggtgttggcaatggtcctggaggga

SEQ ID NO: 132954 - DNA, 5266 bp, Homo sapiens
  Payload ID: 5982
  Gene Symbol: FAM83G
  Gene Name: family with sequence similarity 83, member G
  Uniprot ID: A6ND36
  ENST ID: ENST00000388995
  CDS Start-End: 225-2696
agcggggcggccctgagtcaccggcgcgcccccgcccagcctcgcgccgccgccgcagccgccgcgtgtgcgccccgctccgccagcgcccgctcgattgctcatgggcagagaagcagaggccgcggagaggcccccgagcgcgcggtgccccagctgggccggagctaggagctggaccttgcccacccacccccggcagcagtgcccgggcaggcggcgccatggccttctctcaggtgcagtgtctggacgacaaccatgtgaactggcgctccagcgagtccaagcctgagttcttctacagcgaggagcagcggctggcgctggaggccctggtggcccgcggccgggacgccttctacgaggtgctcaagcgggagaacatccgagacttcctctcggagctggagctcaagcgcatcctggagaccatcgaggtgtacgacccgggctctgaggaccctcggggcacgggcccctctcaggggcccgaggacaatggggtcggcgacggcgaggaagccagcggggcggatggggtccccatcgaggccgagccgctgccctccctggagtactggccccagaagtcggaccgctccatcccgcagctggacctgggctggcccgacaccatcgcctaccgcggcgtgacccgggctagcgtctacatgcagccccccatagacgggcaggcccacatcaaagaggtggtgcggaagatgatcagccaggcacagaaggtgatagctgtggtcatggacatgttcaccgacgtggacatcttcaaggacctgctggacgccggcttcaagaggaaagtggccgtgtacatcatcgtggatgagagtaacgtcaagtacttcctgcacatgtgtgagcgggcctgcatgcacctggggcacctcaagaatctcagagtgcggagcagcgggggaactgagttcttcacgcggtcggcaaccaagttcaagggtgccctggcccagaagttcatgtttgtggatggagaccgggctgtgtgcggctcctacagcttcacgtggtcggccgcgcggacggaccggaatgtgatctctgtgctgtctggccaggtggtggagatgtttgaccggcagttccaggagctgtacctcatgtcacacagtgtgagcctcaagggcatccctatggagaaggaaccggagccggagcctattgtgctgccctctgtggtccccctggtgcccgcgggcactgtggccaagaagctcgtcaaccccaagtacgcacttgtcaaggccaagagcgtcgacgagattgccaagatctcctctgagaagcaggaggccaagaagcccctggggctgaaaggcccagcgctggctgagcatccaggggaactccccgagctgctgccacccatccacccaggactgcttcacctggagagggccaacatgtttgagtacctgcccacgtgggtggagccagacccggagcctggcagcgacatcctgggctacatcaatatcatcgaccccaacatctggaacccccagcccagccagatgaaccgcatcaagatccgtgacacctcccaggccagcgcccagcaccagctgtggaagcagagccaggacagcaggccccgtccagagccttgccctcccccagagcccagtgccccccaggacggtgtcccagctgagaacggcctcccccagggggaccctgagccattgccccccgtgcccaagccccggacagtccctgtggcagatgtactagcccgggacagcagtgatattggctgggtcctggagctccccaaagaggaagctccccagaatgggacagaccataggctacccaggatggcaggcccaggccacgccccactccagcggcagctatctgtgacccaggatgaccccgagagcctcggggtggggctccccaatgggctggatggggtggaagaagaagatgatgacgactacgtaaccctcagtgaccaggacagccactcaggcagctccggccgtggccctggcccccgacggccctcagtggcttcctctgtgtcagaggagtacttcgaggtgagagagcactcagtccctctccggaggcgccactcagagcaagtggccaacgggccaaccccaccaccgcgccggcagctgagtgccccccatataacccgagggacctttgttggaccccagggtggctccccatgggcccagagtcggggaagagaagaagcagatgcgttgaagaggatgcaggcccagcgctccacagacaaggaggcacagggccagcagtttcatcatcacagggtccctgcctcagggactagggataaagacggcttcccaggaccccctaggtaccgctctgctgctgacagcgtccagagctctaccagaaacgctggcccagccatggctggcccccaccactggcaggccaagggaggtcaggtaccccgcctgcttccggatcccggcagcccaagactggcccaaaatgcccgccccatgaccgatggcagggccaccgaggagcatccgagtcccttcggaatcccatactccaaactgtctcagtcgaagcacctaaaggccaggacgggcggtagccagtgggcctcatcggattctaaacggagggctcaagccccccgggaccgcaaagacccctagcagcatgtcccagcctggagccacaccttctgaggccccagcccagactcatgacgcggagggcagacaggccgcctgggcctaccagagcccactgggacggcaggaaggtgggatgggcgggagacgttggcactcacctggtcggtgcaccagtaccaggtggccatgatggtcaggccaaaggtcatcccggtccacggcaggtcccctgtgtgggggtctcgaaacatgtgcatggcgtctgtacgtggcaggtggcaggtggtgttggcaatggtcctggagggaatggcctgggcgtaggctgcctccagctgcccgtaaccaccgatctggtcaaaagctggaggggtcagggtggaacagggacagtttggtggttgcggggccctgactccctgggctcccccctgccttcatctcacaagaaacttcctgatgcatcaaacttgagttttttccacctcatctttcccagtgtttggaaaggtgtgagggtagagggttgtttttttttttaaggtgtatttgaatgactattttattcgtatttaaaataatactattaagtaagcattttgcacatgggcaccccagtgtcccgctggcccagcaggagtcactgttggcctctggacactcatcggccttgggcaagtggttctcagccaggtttccgattgtcgattcaaggaagcaaaagtaatttttcttgacatttgaggaccttcctgaggcttctaaagtgttcatcctgatcacctgaagggtgtgattttagcagagctgagagtggctggtggtgatgtggccccaccccctgaggcacagagaagagggagacaggtccagagagggatggggcctccaccaagaccatatagaccatctggcgggctcaagccggggctttttcctctccagtccaaaacacctcactgttcctgtctacctcggggtcagggcccggcatggccaagccctggcccatctgtgtctgtgtcactcccctcccttccagactgggcctggctgctgggatccctctcatgcggtgggtcccagggacactagagcccctggtctgagagggagaagcctggatgtaggaaaacccgtttccaccccaggccctactccctagccttttccaagtgggacatggaagaggcagcctgctgcctggatgctggtctccccagcatcactgttcccatggagctcaggtcaggctctgtattcagaccgagggtttgtgtgaggctcagagcaaatgaacaagtgccattcaagggttagaaactgctcagccacagggtcccagtgtctgagtctggaagagtctttagagatttgttcactctctgagggatcctcctggctctgcttacatacttccagggacggtgagctcacgctctctccgggcagccctgtgagtttcctatctgttccagactagtatcgccaatctctcccagctctcttctttcctccctggcctttgtcctgcaggaggtagcatcacctcttggcattttgtacatgcttttaaacaattggaggagctgcccaggcagttttatggcctcctggttgtgtgccttcacacccgcctacagccccacctcaccatcaagcgctgagccaatgcgggtgtggctggccctgagttcctgagtcagctccttgccagggccagagctggtaacagcggggcagcagggtgggtagcctctaccagccagggcagtccctgaggggccagcaggggggctgactgcctagtggctcaacctcctgaacccacccactcccagcgatgctacccagaaccccaacggcatgaatcctgcacagtgccgggcagtgccagactccaaagggctcgctgtggggacagccccgccatggccacagactctgtcctcacctttgattgtcaggatgacagcccccaccaccatgatgagcgtctgcagggcgtccgtgtagattacagcagccaggccccctgccagtggaagcaaggttgctggagggggccctggccccagggaggagggacacggggaggaacttctggggctcctgctggggccacttcctgggctgctccctcgggcctgtagggggaggtggccttctgacccctttacacgtcccctgggtggacctccctgctgcaggcaccatacctgcgatggtgtacagggctgtgatgccgagcgtgaggatggtggagaggtagaagttccagcccaggcagatgtgcacaaacagagcccccgcgtacaggtccagctgcggagggagagagccttgtgtgggactgttattcccagggctccagcaagccactccctgggtgacctcgggcaaggccctctctgggcctcggtggcctgtggataaggaggggagacccccactcgcctgcctgcctgcatcacggggccattgtgaggttgggggaagacctggccgtggagctacaagcttgtgcggatgtcaggggacattactgttgctaataaagtccaaagtggccaatgcctttcccaaaa

SEQ ID NO: 132955 - DNA, 426 bp, Homo sapiens
  Payload ID: 5982
  Gene Symbol: FAM83G
  Gene Name: family with sequence similarity 83, member G
  ENST ID: ENST00000580115
  CDS Start-End: 1-426
aggacagccactcaggcagctccggccgtggccctggcccccgacggccctcagtggcttcctctgtgtcagaggagtacttcgaggtgagagagcactcagtccctctccggaggcgccactcagagcaagtggccaacgggccaaccccaccaccgcgccggcagctgagtgccccccatataacccgagggacctttgttggaccccagggtggctccccatgggcccagagtcggggaagagaagaagcagatgcgttgaagaggatgcaggcccagcgctccacagacaaggaggcacaggacaaggtcccagaaccctgggtgccctgcagcctgggttcagtgcccggagcccgtcctacctgggaacaatgcgcggctgatcatgcccggcatgatgatcaggcccatggggagcatc

SEQ ID NO: 132956 - DNA, 5654 bp, Homo sapiens
  Payload ID: 5983
  Gene Symbol: FAM83H
  Gene Name: family with sequence similarity 83, member H
  Uniprot ID: Q6ZRV2
  ENST ID: ENST00000388913
  CDS Start-End: 127-3666
ggccgggcgggccgcggcagggagtggctgccggaccgaccggaccgcgaggccgctgggcggcggtcggctcctgctgcccctgtgccgagaccccgcgcacctggccaggcccctggccccaacatggcccgtcgctctcagagctcctcgcagggggacaacccactggcacccgggtacctgccgcctcactacaaagagtactaccgcctggcggtggatgcactggccgagggtggctcggaggcctacagccgcttcctcgctaccgagggggcaccagacttcctgtgccctgaagagctggaacatgtgagccgacaccttcggcctccgcagtatgttacccgagagccacctgaaggcagccttctcgacgtggacatggatggctcctcgggtacatactggccagtgaactcagaccaggccgtgcctgagcttgatttgggctggcctctgaccttcggcttccagggcaccgaggtgaccaccttggtgcagccaccgccccccgacagccccagtatcaaggatgaggcccgcaggatgatccgttccgcccagcaggtggtggccgtggtgatggacatgttcactgatgtggacctgctcagcgaagtgctggaggccgcggcccgtcgggtcccagtctacatcctgctggatgagatgaacgcgcagcacttcctggacatggccgacaagtgccgtgtcaacctgcagcacgtggatttcctgcgcgtacggactgtggcgggccccacctactactgccgcactgggaagtccttcaagggccacgtcaaggagaagttcctgctggtggactgtgccgtggtgatgagtgggagctacagcttcatgtggtcctttgagaagatccaccgcagcctggcgcacgtgttccaaggagagctggtctccagcttcgacgaggagttccgcatcctcttcgcgcagtccgagccgcttgtgccctcggccgcggccctggcccgcatggacgcctatgccctggctccgtatgccggggccgggcctctcgtgggcgtccctggggtcggggcgccaacccccttctccttccctaaacgagcgcacctcctgttcccgccaccccgggaagagggcctgggcttcccctccttcctcgacccggaccgccacttcctgtcggccttccgccgggaggagccgccgcggatgccggggggcgcgctggaaccgcacgcggggctgcggccgctctcgcggcgcctggaggccgaggccgggccggctggggagctcgcgggcgcgcggggcttcttccaggcgcggcacctggagatggacgccttcaagcggcacagcttcgcgaccgagggcgcgggcgccgtggagaacttcgcggccgcgcggcaggtgtcgcggcagacgttcctcagccacggcgacgacttccgcttccagaccagccacttccaccgtgaccagctctaccagcagcagtaccagtgggacccgcagctcacgccggcgcgcccgcaaggcctgttcgagaagcttcgcgggggccgcgcgggtttcgcggacccggatgacttcaccctgggcgccgggccccgcttcccggagctcggacccgacgggcaccagcggctggactacgtgccgtccagcgcgtcccgcgaggtgcgccacggctcggaccccgccttcgcgcccggaccccgcggcctggagcccagcggagccccgcgccccaacctgacccagcgcttcccatgccaggccgcggcgaggccgggcccagaccccgctcccgaggcggagccggagcgcaggggcgggcccgaggggcgggcagggctgcggcgctggcgtttggcctcctacttgagcggctgccacggcgaggatgggggcgacgacggcctaccggcgcccatggaagcggaggcttacgaagacgacgtgctggctcccgggggccgggcacctgccggcgacctgctcccctcggccttccgcgtcccagcagccttccccaccaaggtcccggtgccaggcccgggcagcggcggcaacggcccagagcgcgagggcccggaggagcctggcctggccaagcaggactcattccgctcgcgcctgaaccccctggtccagcgcagctccaggctgcgctcctcgctcatcttcagcacgtcacaggccgagggcgcggccggggctgcggcggccactgagaaggtgcagctgctgcacaaggagcagacggtcagcgagacgctggggcccggcggagaggccgtgcgctccgcggcttccaccaaggtggcggagctgctggagaagtacaagggcccagcccgtgatcccggcggcggcgcgggcgccatcaccgttgccagccacagcaaggccgtcgtgtcccaggcgtggcgggaagaggtggcggccccaggtgccgtggggggcgagcgccgcagcctcgagagctgcctgctggacctgcgcgactcctttgcacagcagctgcaccaggaggcggagcggcagccgggagccgcgtcgctcaccgcggcgcagctgctcgacacactgggccggagcggctccgaccgcctgccttcccgcttcctctctgcccagagccactcaacgtccccgcaagggctggacagccctctgccgctggaagggtccggagcgcaccaggtgctccataatgagtcaaaagggagccccacctcggcttaccctgagcggaaggggagccccacgcctgggttttccactcgaagaggaagtccaactacaggatttatcgagcagaaggggagccccacctcagcctaccccgagcgcaggggtagtccggtgccccccgtgccggagcgcaggagcagtccggtgccccccgtgccggagcgcaggggcagcctcacccttaccatctccggggagtccccgaaggccgggcccgcggaggaggggccgagcggccccatggaagtcctgcgcaaaggctccttgcgtcttaggcagctgctgagccccaagggcgagcggcgcatggaggatgagggtggcttcccagtgccgcaggagaacggccaacccgagagcccgcggcgtctgtcactgggccagggtgacagcacggaggctgccacagaagagcggggtccgcgggcgcgcctgtcctcagccacggccaacgccttgtacagcagcaaccttcgggatgacacgaaggccattctggagcagatcagtgcccacggccagaagcaccgtgcggtccctgccccgagccccggcccgacccacaacagccccgagctaggccgtccaccggctgctggcgtcctggccccagatatgtccgacaaggacaagtgttcagccatcttccgctcggacagcttggggacccagggccggctgagccgcacgctgccagccagcgcggaggagcgcgatcggctgctgcgccgcatggagagcatgcgcaaggagaagcgcgtgtacagccgcttcgaggtcttctgcaagaaagaggaggccagcagccctggggcaggggaaggccccgcggaggagggcaccagggacagcaaggtgggcaagttcgtgcccaagatcctgggcacgttcaaaagcaagaagtgagtcttctggcctggcaacccaggccagggtgcccgcatcgctgccccggtcatccagaagccccgcggaacagagagccctgctcatctgcttgagcagcggctgtcaggccacggccgcttggggcttggctgagtgcgccagacctcggctccactggaggctcacctggcagctgccgtctctgccccctggcctccccaacgctggggctgcacccctcgccaccagtgcctttctcccctcagcaccttcatctctgcaccgtcagccttgcgtggcgcagcgtctggctccgccatctctttgtgcctcagtcccccccgccccctttatttttttgagacctagggctggagtgcagttgagcggtctgggctcactgcaacctctgcctcccgggttccagcgattctcctgcctcagcctcctgagtagctgggattacagatgtatgctaccacgcccaggtagtttttgtatttttagtagagacagggtttcactatgttggccaggctggtctccaactcctggcctcaaatgatcagcccgcttcagcctcccaaagtggggggattacaggcgtgagccttgcaccccgctaagtcccctatcctcttgcaagggtctcgcctctgtgcctcaattcctcattctctgggcccttctcctcctcagggcctcctgttctcagggcctcccccctccccgctccctccctctctcaaggtctcctccttccctcccccccccccccccccgtctcccccctcccccgcctgggcttcacttcctttcctacttggattctcctgctcgctgcctcccagcatcttttttggaggcccgtctcttgctgtggggaagactgggctggctgcgggcagtttgcaaggggtgggtggggcaggggggggggagctggaccagaagatgccccttggagtggcaaggaagctggacagggcaggcctctggggacgggacacagggaagcccgaaggggcgccttggccaggtctgccatctcctccagcgaggctctggccagcactgggtgagagtggggagggggcattggcctttgcagcacagtaaaacatggtccagacaacctgtggccccggcctcatgagcaccccctgcacaggcccggcccaagccaggcgctagaagggctggttgtggagtgcttatccttgacaggtatggggccaggtgagggcaggggacaaggtgcagctgaggccgagcccaactaggtcctgggcacccctgcaggtgggagtggtccttgtcctcctggtatccagcagacacccccctctccccaccagccccattctcaggtcctttcctctttgtcaccaacaccaagaatctgtccagggttcttggcttatcttttatctcttttcactcctagagaggaattgcaattgactcagaatgacacattttggcaccacgtgtgtagaaagcccccactgttagatgatagcctcgtgaaattcatgtttctgtattctcctatttcttttcaaaaactaattttttttttagtgtaataaatcctaagagggaactgatttaagaaacaaggccgccaaacaaaggcagcagttccgactccagcagctgggaaaggaaggaaagtgaccccactttcactcctgcacagcccactggttaccaaaaccaccgtgcaagtcgggatgacagcagggacttctggccaggtgggaaaggtgcctggaagcgggatgcgcctgtgcgtctcttggccatgatgttcttgtgggcatgttattcttggtgctgcctggggtgttgctgagcggacaggctctccagctggagtccatggagaggccagaggctggcggccctgcctgggccttcggagcctcctgcctgcaccctccacctcttctaaaccatgatgtggcacattttggtgttaataaaacacaacacacaaagta

SEQ ID NO: 132957 - DNA, 3611 bp, Homo sapiens
  Payload ID: 5983
  Gene Symbol: FAM83H
  Gene Name: family with sequence similarity 83, member H
  ENST ID: ENST00000395103
  CDS Start-End: 1-2720
tccgcatcctcttcgcgcagtccgagccgcttgtgccctcggccgcggccctggcccgcatggacgcctatgccctggctccgtatgccggggccgggcctctcgtgggcgtccctggggtcggggcgccaacccccttctccttccctaaacgagcgcacctcctgttcccgccaccccgggaagagggcctgggcttcccctccttcctcgacccggaccgccacttcctgtcggccttccgccgggaggagccgccgcggatgccggggggcgcgctggaaccgcacgcggggctgcggccgctctcgcggcgcctggaggccgaggccgggccggctggggagctcgcgggcgcgcggggcttcttccaggcgcggcacctggagatggacgccttcaagcggcacagcttcgcgaccgagggcgcgggcgccgtggagaacttcgcggccgcgcggcaggtgtcgcggcagacgttcctcagccacggcgacgacttccgcttccagaccagccacttccaccgtgaccagctctaccagcagcagtaccagtgggacccgcagctcacgccggcgcgcccgcaaggcctgttcgagaagcttcgcgggggccgcgcgggtttcgcggacccggatgacttcaccctgggcgccgggccccgcttcccggagctcggacccgacgggcaccagcggctggactacgtgccgtccagcgcgtcccgcgaggtgcgccacggctcggaccccgccttcgcgcccggaccccgcggcctggagcccagcggagccccgcgccccaacctgacccagcgcttcccatgccaggccgcggcgaggccgggcccagaccccgctcccgaggcggagccggagcgcaggggcgggcccgaggggcgggcagggctgcggcgctggcgtttggcctcctacttgagcggctgccacggcgaggatgggggcgacgacggcctaccggcgcccatggaagcggaggcttacgaagacgacgtgctggctcccgggggccgggcacctgccggcgacctgctcccctcggccttccgcgtcccagcagccttccccaccaaggtcccggtgccaggcccgggcagcggcggcaacggcccagagcgcgagggcccggaggagcctggcctggccaagcaggactcattccgctcgcgcctgaaccccctggtccagcgcagctccaggctgcgctcctcgctcatcttcagcacgtcacaggccgagggcgcggccggggctgcggcggccactgagaaggtgcagctgctgcacaaggagcagacggtcagcgagacgctggggcccggcggagaggccgtgcgctccgcggcttccaccaaggtggcggagctgctggagaagtacaagggcccagcccgtgatcccggcggcggcgcgggcgccatcaccgttgccagccacagcaaggccgtcgtgtcccaggcgtggcgggaagaggtggcggccccaggtgccgtggggggcgagcgccgcagcctcgagagctgcctgctggacctgcgcgactcctttgcacagcagctgcaccaggaggcggagcggcagccgggagccgcgtcgctcaccgcggcgcagctgctcgacacactgggccggagcggctccgaccgcctgccttcccgcttcctctctgcccagagccactcaacgtccccgcaagggctggacagccctctgccgctggaagggtccggagcgcaccaggtgctccataatgagtcaaaagggagccccacctcggcttaccctgagcggaaggggagccccacgcctgggttttccactcgaagaggaagtccaactacaggatttatcgagcagaaggggagccccacctcagcctaccccgagcgcaggggtagtccggtgccccccgtgccggagcgcaggagcagtccggtgccccccgtgccggagcgcaggggcagcctcacccttaccatctccggggagtccccgaaggccgggcccgcggaggaggggccgagcggccccatggaagtcctgcgcaaaggctccttgcgtcttaggcagctgctgagccccaagggcgagcggcgcatggaggatgagggtggcttcccagtgccgcaggagaacggccaacccgagagcccgcggcgtctgtcactgggccagggtgacagcacggaggctgccacagaagagcggggtccgcgggcgcgcctgtcctcagccacggccaacgccttgtacagcagcaaccttcgggatgacacgaaggccattctggagcagatcagtgcccacggccagaagcaccgtgcggtccctgccccgagccccggcccgacccacaacagccccgagctaggccgtccaccggctgctggcgtcctggccccagatatgtccgacaaggacaagtgttcagccatcttccgctcggacagcttggggacccagggccggctgagccgcacgctgccagccagcgcggaggagcgcgatcggctgctgcgccgcatggagagcatgcgcaaggagaagcgcgtgtacagccgcttcgaggtcttctgcaagaaagaggaggccagcagccctggggcaggggaaggccccgcggaggagggcaccagggacagcaaggtgggcaagttcgtgcccaagatcctgggcacgttcaaaagcaagaagtgagtcttctggcctggcaacccaggccagggtgcccgcatcgctgccccggtcatccagaagccccgcggaacagagagccctgctcatctgcttgagcagcggctgtcaggccacggccgcttggggcttggctgagtgcgccagacctcggctccactggaggctcacctggcagctgccgtctctgccccctggcctccccaacgctggggctgcacccctcgccaccagtgcctttctcccctcagcaccttcatctctgcaccgtcagccttgcgtggcgcagcgtctggctccgccatctctttgtgcctcagtcccccccgccccctttatttttttgagacctagggctggagtgcagttgagcggtctgggctcactgcaacctctgcctcccgggttccagcgattctcctgcctcagcctcctgagtagctgggattacagatgtatgctaccacgcccagtgtaataaatcctaagagggaactgatttaagaaacaaggccgccaaacaaaggcagcagttccgactccagcagctgggaaaggaaggaaagtgaccccactttcactcctgcacagcccactggttaccaaaaccaccgtgcaagtcgggatgacagcagggacttctggccaggtgggaaaggtgcctggaagcgggatgcgcctgtgcgtctcttggccatgatgttcttgtgggcatgttattcttggtgctgcctggggtgttgctgagcggacaggctctccagctggagtccatggagaggccagaggctggcggccctgcctgggccttcggagcctcctgcctgcaccctccacctcttctaaaccatgatgtggcacattttggtgttaataaaacacaacacacaaagt

SEQ ID NO: 132958 - DNA, 5654 bp, Homo sapiens; identical to SEQ ID NO: 132956
  Payload ID: 5983
  Gene Symbol: FAM83H
  Gene Name: family with sequence similarity 83, member H
  Uniprot ID: Q6ZRV2
  ENST ID: ENST00000612192
  CDS Start-End: 127-3666

SEQ ID NO: 132959 - DNA, 3611 bp, Homo sapiens; identical to SEQ ID NO: 132957
  Payload ID: 5983
  Gene Symbol: FAM83H
  Gene Name: family with sequence similarity 83, member H
  ENST ID: ENST00000632048
  CDS Start-End: 1-2720

SEQ ID NO: 132960 - DNA, 6355 bp, Homo sapiens
  Payload ID: 5984
  Gene Symbol: FAM84A
  Gene Name: family with sequence similarity 84, member A
  Uniprot ID: Q96KN4
  ENST ID: ENST00000295092
  CDS Start-End: 289-1167
ggctacttagagtcgtcggcgcggcggtgggaaagcagagccgagccgggactgtccagtgggagcaggcgccccggccagcgcagacctggaggcgcacgggcgccgcaccgcacgattcggctcggggtagagcggagccgcagccccacgcgcagcccaggacccactcgccaccgccgcttcctcagcacccatggggaccaggagactttaaaggagtttggggtttcgggagcagggaaatcacggatccccgctcctggccctcgcctcgccacctcattgatgggcaaccaactggaccgcatcacccacctcaactacagcgagttgcccacaggggacccgtcggggattgaaaaggacgaactgcgggtcggggttgcctacttcttctcggatgatgaggaagacctggacgaacgcgggcagcccgacaagtttggcgtgaaggcccccccgggttgcaccccctgcccggagagccccagccgccaccaccaccacctgctgcaccagctggtcctcaacgagactcagttttccgcctttcggggccaggaatgcatcttttccaaagtgagcggtggccctcagggcgccgacctaagcgtctacgcggtcaccgcgctgccagcgctctgcgaacccggcgacctgctggagctgctgtggctgcagcccgcgccggagccgcccgcgcccgccccgcactgggccgtctacgtgggcggcgggcagatcatccacctgcaccaaggcgagatccgccaggacagcctgtatgaggcgggcgcggccaacgtgggccgggtggtgaatagctggtaccgctaccgcccgctggtggccgagctggtggtgcagaacgcctgcggccacctgggcctcaagagcgaggagatctgctggacgaactcggagagcttcgccgcctggtgccgctttggcaagcgggagttcaaggcgggaggggaggtgccggcaggcacgcagcccccgcagcagcagtactatctcaaggtgcacctgggagagaacaaggtccacaccgccaggtttcacagcctggaagacctcatccgcgagaagcgccgtatcgacgccagcggccgcctgcgagtgctccaggagctcgccgacctcgtggacgacaaggagtagccgcctaggggctgccggcccctctgcctcccccgcacctcgctcccttcccttccccgcacccggacttcgcagtcagcggttctcaacctctgccccgccccgccacgcgcgtccgccgccggtggcccgggcccgggctgcacccccgcatccccaagccagcggcaggaagtctcaggaactgccccagggccgaaagggcgccgctgcgagcgcctggctgacagccacagcggtggtgacggtgctgggagaccccgcgtgcgctttccccttgagatgtaaaccgggaacggggaaggggctgaggggagaaaggacatggccttccccgcgagtccatggccagtgactgtggcccgactcgaaaacaaccctcttctcaaaagggaccatcaccgccccgagcgtgcgcacacagaccggtcggaggcgagaactggtctctacagggcacagttcagctcctctgtggatgcgtccccagatcgcaggatttccaagaaatcgagcctgtcccttgtgcacttgggaataattccccaagacagcacttcgggattccgggttatcctgaggctgcccgggacttttccagctctccagccccaggtctcctgacattgtgttccaggctgcgggctaagccagacagtgtttgcctccggttctttccaccgtgggaagcgaacgccacccccacccgcctttgcctgcgagtctccctcgctggcagaagggaagccggcccggtcccgggaggaagatggcgctgcgaattcggtgaggacagccggccccgcccccgacaaggagctcgctcgttcacctggtgtctgggaacttgaatgtgtgaagggcgcttattgttctgaacccttgattgctccctcctcgggctgcatttcaaaaatagtcatatttttaaaggagttggaggagagggagggggaggacatggcaccattccagaaaccagcattgttacaacaccatagccagtatatttagtttggcttttcctaacatagaaatcttcaaagctggggaagtggaaataaagttttaaaaatgagagagcagttttccaactatgtcaacaaagcctatcgtgttgatgtttttattgaccattttagcaacaggctaataaaatttcaaattgaaatttttattttcatggctttaatccatgatagtttaaatactgggggccattaagagtggatgtagctaagagcttagctaacattgccttttcactctatttttctcagatattgtaagcattctgtttttcaatattgtagttaattttttggctttcaacagcagccctagtaatggtggagttgttaattaatgtgtatattgtactgaatttctgtcagttaaggggttcactgctttggtggaaattggtggaaattgctagcaggttccacgatgtttatttttttctccatgttgtatatcattaccatttcacatacgcgtttctatttttcttcctctcctcctgatctccttaaaaatgaatctagagttggtggctttttccccctcctctttggccagttccacagttcagttcttcctgaaaacagggatgatgaacttgtaggatcaggacaaatgtgtgtttttcaaaaacttaaggctgggtgtgaaacaccttctgtggacaaggatttgtaaacttctctcctccctccagctgcggccccagcctaactgatagttacttgattcagtgtgctagacacttaaatagcatctatgtctctttcaagggaatttgtcaaataatgctgtttagctaattgttgcaagcaattgcatattaacagctgtgattttgttggacagcaagtattatggccaaagccagtttcttggcatttcaaaaataatgcaataaaaactagttgaggttagctgaggctggaaatgcctttttcatggtaaatgattcacttctatatttttctttctttttctttttttttctttggttttcatcctggattcatcccctgatcttaaatcaaaacgtcagatcaatgaactatgaactaaagtatttttcttaagcctattgagtgatttattttttaaaaaatgtttaaatgcatatgcttttctttcagcacaaacaacagcaaaaacttttgtaataactaacttacctttgcatgtatgaagaactgagtcatttatttccctaacttactcctctttcaagtaacaggtggcagatcataaaatgaattctttattgtatctacacactccacattctttactgtgtcctactactgtatcttggctccctgctgtattaaacaccatcttaagcacttgttcctgcaggactccttcttgacattttgtctcccccttcaaagtcactcaaagagtgggacttcatcaaaagaaatgaattagtctctatcacaccgaatactaagatttatttcctctgatggtacatagatttctctctcactaagagggtcactctcatagaggaatgtcttgtcagttttatacttgctgaggctagactgacaataaaaatgagctgggcagttaaattagcatttgttactatattggcctataaaggatcaggttgatgataatacctctaaaaatatgcaataataaaacaatagttatgaaagaaacttgaaaggtttgcaaggtttctcctatccctgttaaaattatcatttattatctctttgtcagtgttagtaaggtaacccatgacagaataatttgagtgatagttcatcatgcagaggatatgatcaagatattacctaatggttttatcctgaaaaaggtgtatacttttagggcactgttaacaatgcgagtgaaaccaagatggtgcaagttccctttgcagatggcgtgggcacacttgatttttattatgagtgaatgtaatctttctgtattttaccagagttacagcaattacctgaaaagtttcctaacattttaataatgttagggatttcgttttggttttagttgtcctcaagagacaacaggttcacagtaatttccatgatgttgggtgtggctaagctggggattggttctgttccccctgctcccgtgtagagaaaagctatatttatactgcattctttctcaactttcaggtaaaacaaactatgatttaaaaaaagaaaaaagaaaagacaggtacttttacttcaaagagtgctttgctacatttttatttaaaccaaaaatcaaataaaataaggaggggggctgggtatactttaaacaaaaccagtcctgaaatgctgttattctcaaagtacattccaaaaaaaaaaaaaaaaaaaaactatagaatttacgtatgttacatttttaagtatgagttaaattgatataaagtgttcctcaatatttaataatgtaagctgttgtcatgacagtattttttaaaaataataacgtatattatagttacgaaacacttgtgccagattagaacatcaagcacagaagcagctgtatgatttacctgtttttttgaaactttaatgtttaccttcccctatgtttaatttttctgtggtgaacacttttgttagaacatggcttttttatttttcttggaaaaatatgctattagtatttacaaaataattaattacctgaataagcagtatatactaaaagtcttcaaacattactttattgattacttatgttttgtggtgcgctttcaacatccctaagagttaaatgtcttagtcatctaatacatggaacagggtcaaacttcaatgaaattaatacttattgcacaatcataatatagcaacctaattttcttttatttataggcatatctttaaagctttcttctcttttttgaacaaatgaagagaatccagttagtttttgcctttcagaggtgatttgccacgtgcacaaagggtctgtaggtgaaaagacaggcttttgggtttcttgaaacatcaaaaactgaatttagagaatggttatctaacactcaagtcaatgttttttttgaaattactagctattggtataatatacatatatgtacatgtatacatatacatacacacatatgtacatttacacatatgtaagtatacactcatatacatatatacacatgtatatatacttgtgtacacatacatttttgcctatagctagcaattatttcattcagatacacacacacacacacacacacacaggctacttaaaatagagagtgacttgagatatacaaaaacaggaagaaaagccctggaggtcatatagctaatgtataactgcacagcaagcagctatgtctaaagctaacaataaaaagaaaatgtgggagttgtgcaattagttttattctcattttttggaagaatatgttcctggtttctctaactaaaaggaaaaaattcaaaggaaagttgtaaatattaggaagtaactgaaaaataagaagcaagataaagtggggaggctatgagatcatataatgagctaataaacttttcaacaggggacacctgttctcccttctaactgaagacactaaagagaagctaagatcctatctttcaatcatttagtaattcataaaatcccattatttcataactcaaagtttacctttgaggttgtatgtttacctcatttgaactcgaaatagaagaggtttaagtatttgaataagttgggaaaaaaaggaaaaatagtcttccctgcccttgtcactgatggtgacactacttgtaattactgtattttttggcagaacactcagatgaacagattcctatgctgtggacttttatcattctttttgatggctgatagtagaaagcacacagtaggtactccataaatgtaagactatggcagctgtctagtacaagtgcttctcactgattcttggttaccaggaaaaccagaaagcccgtcacttgccttgcctgcaaaggcgagcctaaagaaatttctctaaccaaaattggcaggttctttccaccacaaaaggctcttggaaatataacttatggggcttaaggctaatttgagttgaagggtatttgtaatatttgatttgcttttagcagagaaaacaataaaagaatccaggaaaagtagaaaa

SEQ ID NO: 132961 - DNA, 3765 bp, Homo sapiens
  Payload ID: 5984
  Gene Symbol: FAM84A
  Gene Name: family with sequence similarity 84, member A
  Uniprot ID: Q96KN4
  ENST ID: ENST00000331243
  CDS Start-End: 518-1396
gtcggcgcggcggtgggaaagcagagccgagccgggactgtccagtgggagcaggcgccccggccagcgcagacctggaggcgcacgggcgccgcaccgcacgattcggctcggggtagagcggagccgcagccccacgcgcagcccaggacccactcgccaccgccgcttcctcagcacccatggggaccaggagactttaaaggagtttggggtttcgggagcagggaaatcacggcccacccctcggtccttcctgggtgtccgtctcccacactgccacagccagcactctcctccccaccgggaccccgcaagctctccagccagcctgggtgttttcttctgggagttggaccgagttcccggaaggggtcggaggctgtgtggtggcgtctgctctcgcctgacctgtggcggcttctccgcccctcgtacccctggggaggcacggaggactcggctggaaagggtgactccgatccccgctcctggccctcgcctcgccacctcattgatgggcaaccaactggaccgcatcacccacctcaactacagcgagttgcccacaggggacccgtcggggattgaaaaggacgaactgcgggtcggggttgcctacttcttctcggatgatgaggaagacctggacgaacgcgggcagcccgacaagtttggcgtgaaggcccccccgggttgcaccccctgcccggagagccccagccgccaccaccaccacctgctgcaccagctggtcctcaacgagactcagttttccgcctttcggggccaggaatgcatcttttccaaagtgagcggtggccctcagggcgccgacctaagcgtctacgcggtcaccgcgctgccagcgctctgcgaacccggcgacctgctggagctgctgtggctgcagcccgcgccggagccgcccgcgcccgccccgcactgggccgtctacgtgggcggcgggcagatcatccacctgcaccaaggcgagatccgccaggacagcctgtatgaggcgggcgcggccaacgtgggccgggtggtgaatagctggtaccgctaccgcccgctggtggccgagctggtggtgcagaacgcctgcggccacctgggcctcaagagcgaggagatctgctggacgaactcggagagcttcgccgcctggtgccgctttggcaagcgggagttcaaggcgggaggggaggtgccggcaggcacgcagcccccgcagcagcagtactatctcaaggtgcacctgggagagaacaaggtccacaccgccaggtttcacagcctggaagacctcatccgcgagaagcgccgtatcgacgccagcggccgcctgcgagtgctccaggagctcgccgacctcgtggacgacaaggagtagccgcctaggggctgccggcccctctgcctcccccgcacctcgctcccttcccttccccgcacccggacttcgcagtcagcggttctcaacctctgccccgccccgccacgcgcgtccgccgccggtggcccgggcccgggctgcacccccgcatccccaagccagcggcaggaagtctcaggaactgccccagggccgaaagggcgccgctgcgagcgcctggctgacagccacagcggtggtgacggtgctgggagaccccgcgtgcgctttccccttgagatgtaaaccgggaacggggaaggggctgaggggagaaaggacatggccttccccgcgagtccatggccagtgactgtggcccgactcgaaaacaaccctcttctcaaaagggaccatcaccgccccgagcgtgcgcacacagaccggtcggaggcgagaactggtctctacagggcacagttcagctcctctgtggatgcgtccccagatcgcaggatttccaagaaatcgagcctgtcccttgtgcacttgggaataattccccaagacagcacttcgggattccgggttatcctgaggctgcccgggacttttccagctctccagccccaggtctcctgacattgtgttccaggctgcgggctaagccagacagtgtttgcctccggttctttccaccgtgggaagcgaacgccacccccacccgcctttgcctgcgagtctccctcgctggcagaagggaagccggcccggtcccgggaggaagatggcgctgcgaattcggtgaggacagccggccccgcccccgacaaggagctcgctcgttcacctggtgtctgggaacttgaatgtgtgaagggcgcttattgttctgaacccttgattgctccctcctcgggctgcatttcaaaaatagtcatatttttaaaggagttggaggagagggagggggaggacatggcaccattccagaaaccagcattgttacaacaccatagccagtatatttagtttggcttttcctaacatagaaatcttcaaagctggggaagtggaaataaagttttaaaaatgagagagcagttttccaactatgtcaacaaagcctatcgtgttgatgtttttattgaccattttagcaacaggctaataaaatttcaaattgaaatttttattttcatggctttaatccatgatagtttaaatactgggggccattaagagtggatgtagctaagagcttagctaacattgccttttcactctatttttctcagatattgtaagcattctgtttttcaatattgtagttaattttttggctttcaacagcagccctagtaatggtggagttgttaattaatgtgtatattgtactgaatttctgtcagttaaggggttcactgctttggtggaaattggtggaaattgctagcaggttccacgatgtttatttttttctccatgttgtatatcattaccatttcacatacgcgtttctatttttcttcctctcctcctgatctccttaaaaatgaatctagagttggtggctttttccccctcctctttggccagttccacagttcagttcttcctgaaaacagggatgatgaacttgtaggatcaggacaaatgtgtgtttttcaaaaacttaaggctgggtgtgaaacaccttctgtggacaaggatttgtaaacttctctcctccctccagctgcggccccagcctaactgatagttacttgattcagtgtgctagacacttaaatagcatctatgtctctttcaagggaatttgtcaaataatgctgtttagctaattgttgcaagcaattgcatattaacagctgtgattttgttggacagcaagtattatggccaaagccagtttcttggcatttcaaaaataatgcaataaaaactagttgaggttagctgaggctggaaatgcctttttcatggtaaatgattcacttctatatttttctttctttttctttttttttctttggttttcatcctggattcatcccctgatcttaaatcaaaacgtcagatcaatgaactatgaactaaagtatttttcttaagcctattgagtgatttattttttaaaaaatgtttaaatgcatatgcttttctttcagcacaaacaacagcaaaaacttttgtaataactaacttacctttgcatgtatgaagaactgagtcatttatttccctaacttactcctctttcaagtaacaggtggcagatcataaaatgaattctttattgtatctacacactccacattctttactgtgtcctactactgtatcttggctccctgctgtattaaacaccatcttaagcacttgtt

SEQ ID NO: 132962 - DNA, 5404 bp, Homo sapiens
  Payload ID: 5985
  Gene Symbol: FAM84B
  Gene Name: family with sequence similarity 84, member B
  Uniprot ID: Q96KN1
  ENST ID: ENST00000304916
  CDS Start-End: 457-1389
ttgttgctcgcccggcccaagcgggagctgttgccgccaggctgcgaggctgccgtcctctcctcctcgcgccccacctcccccgagagctggctgaggaggggcagcagccccagctggcgggaggaagcgcggtgtgaacagggattgccccccgccttcaagtatcggggcgctacgcagccgcgggggaaagacatgcccctagtctgcccgctgcgctgccctctgcccagcctcgctgccgcccgcgccgggagaggagggactgccgagcctacaccttcaaactcgccctagaagtctcggggcgcggcagggagcccttccccaggccccacggccttcacctctccgcgggtagcctcagcccctgtccggggacctgtgcaaatgaccctggagttggtttcgctttctccccttgcggcggtgtgaacgtgtgtccgcagcgtgatgggcaaccaggtggagaaattgacccacctaagttacaaggaagttcccacggccgacccgactggcgtggaccgggacgacgggccccgcattggggtctcctacattttctccaatgacgatgaggacgtggagccgcagccgccgcctcaggggccagatggcggcggcttgcccgacggtggggacgggccgccgccgccccagccgcagccctacgatccgcggctgcacgaggtggaatgctccgtgttctaccgggacgaatgcatctaccagaagagcttcgcgccgggctcggcggcgctgagtacctacacgcccgagaacctgctcaacaagtgcaagccgggcgatctggtggagttcgtgtcgcaggctcagtacccgcactgggccgtatatgtgggtaacttccaggtggtgcacctgcaccggctggaggtgattaacagcttcctgactgacgccagccagggccgtcgcggccgcgtggtcaacgatctgtaccgctacaagccgctaagctccagcgccgtggtgcgcaacgcgctggcgcacgtgggtgccaaggagcgcgagctgagctggcgcaactcggagagtttcgccgcctggtgccgctacggcaagcgcgagttcaagatcggcggcgagctgcgcatcggcaagcagccctaccggctgcagattcagctgtcggcgcagcgcagccacacgctcgagttccagagtctagaggacctgatcatggagaagcgacgcaacgaccagatcgggcgcgcggccgtgctgcaggagctcgccacgcacctgcacccggcggagccggaggagggcgacagcaacgtggcgcggactacgccgcctcccgggcgcccccctgcgcccagctccgaggaggaggacggagaggcagtggcacactgatgggcgagctgagcgcagagctgcgaaggggaactgtttgcagtagcagccgctgctccctttctccctctcttcctccctcttttgccactgtctgggccccatctgggattcctgggccctttggaaaagagttggtgaaatgcgcagccggctgtggacgggggaggaggaaggggacagagggagcaggtaggaaacactttagttgggggtggggggcgtctccctctggccccctgtctgtcttcctctccgcggtggagcaaactgtggacttgcctggcacttaaaccttggtagatctgggtttataatcggccattcttaagcacgtggggttgggggaaagttcggagtacccattcctgccgttgcttcctatcctgggcttggaagaatcctggtagaaaggccagagtgggtttgtggagtcgccactgcgggaccagcacgaaagctgcttgtctgctttggcggagctgagctgtgtatgggatccaggaggctggggtgatttattttatgggattcctggagcgcagggctggtgaatccatgacaaggtccgggagcagcagaccaaaaccacagcagcctcctattaagtgtaacaaatagttaagcaaactcgggctacaaacaaagactttgctacctccctcctccacaacccccaagtaattagccttctggagctggctcttagctgaggctcctgctacctcctgctccacccgccccttcctaggttacaagtaaatcattgtcaagggccagccaggggaaggtttcaattaaggttctgttctgctgcctttgtttctcccctgctgttgtaggcacttacagctgcgttgttatgaaaggagggaatagccctttgtgtctttgatctaattaaacctgcttggctgtgtttatccgcagggcaggtcacagatagggttggctgtgccactccataaagtatctattgtggaagcagccaaaaagggctgctgtggcaggaattggttaatttctccttccacttcccttcctgaatagtgaagggagcccttttaaaacaaggctttggtggtaatcctgtgatttttttttctcccccatcccctcactggcccatccctctcaccctcacttttgttctgctggtgggtaaaatcttaggctgaacacatatttcaatggtaagatacttattttgctatccacacttgatgcaattgaattcaaggtgcaaagtcttgtactgaagcagtctccttgttgcttggagaacacctccttcagagccctttgttaaataagaggggcgacgttgatcatagatgccacctggttagcaccgaatctgactttggtgacagtcctaaagcacagttggtgattgtgagatctgttagcggcaggctgagcagatactacttggttttgcttggtatgagatactactgtttgcttagtatgagattttttccagcctgtctcttaaactcctgtgacatcttcaatgatatgtgccctcagttgcagcatagcttctctgctgcctattgccattgctgtctcaaaagttgagtgaattttgaggcgtctttttttttttttcctctcttgggagtcgttgtaaactactgtgtacaagtcattttgtgatatgattctgaacagttggaatagaatcatagttaagtggtacagccatggctatcgtcaggcctgttgcctggagatctctaagttaaggcaacaagacttaaagaattttctaatacacttgtttcacacatggacgttgaggccatagtctttaaaagcttggacctttgtagcacctcaacatgaaagggcattagctatgtttcctgtttttacagtgatcaccaaacagatcttgccactttgattgttaaaaatgaaccacattctagccctggtctgggactttggagggagatgaatttcttgttggaaatgtaaatctagtgtccatatttaatactctcacagctttgtgtttattctctttgctcatggaatagcagaacaagataaacatgggttaagacatttaggagaacctgctgtatctaacccagttggattttctttcatgcttaacacagtagtgaaaatagaaggtaggccgggcacagtggctcatgcctgtaatcccagcactttgggaggctgaggcaggtagatcacctgaagttaggagttcgagaccagcctggccaacatggcgaaaccctgtctctaccacaaatacagaaaattagctgggcgtggtggcaggcgcctgtaatgcctgctacttgggagcctgaggcagaagaattgcttgaagctgggaagcagaggttgcagtgagccgagatcgcaccactgcactccagcctgggcagcagagcaagtagtaataaccaccgtgtagacaagtgggagggaagaatagaatggcactgtccagctctgggctagccagatcaactcccccacccgtcttcttcctctgtcccagaatggaaaatgatgtatggtcagtcacgctgaagtatagcagcgactgtgttaagagagagcagtgactctctcttctagagaagaggttttcaataacagggcttggaaatgaactagaataggaaatagatcttttcagatgctgctttcccatgtaatacaagcgtttctacagggtaccagaggtgtgaaatatgtgacacttaagaacagtgatttttattgggaattttcttagggttattacacttaaagcaacaaccaactagtaacagctccaggaaaggggaatgaatcaactcttggttctttcctgaagacggcagtgttgtggataagtgagtttttaatgccctggcagtggctacatttgacactttagaaaaaataaacatatttaataatttttgtttctccttaggaataagactgtagaactgttttgtactgtgaattacggatgctctttgaaggaaagaaatatcgattctaatgttcttcagaagttctggcagggataagcaggacatcgactggaacgtatgctaaatgaaagcagacaaatttctattttcttacctgagcaaatattttattgaaactgcttatgtatgtcaaaggagcccacaacttcagctacacaactttttgtattgaaagaactcatactttttgtagcttttatttcacatttaatttaaagtgacttttagcactaaaatgcctagaagattttactccagacctataaggaaatgtttagtttttatgaaaaatgacaagtcgatggttaaacttctcatgtctttggtgctttggccctaatagcactggacaacaccacgaccacatggaaacatatttttggaagcaaaactttaattttatataacgtatgctatggagagctaagacaatttaaggactacttgttttctattttttttcttaataaaatggaatccactgtgttgaagactcttgatatcatgtgcttgtctaaccattttttgttttataaattagaataaaatatagttgtgataatggtcatcgaatggatttgtttggaaagctacatcttatttgtgaaatgttttttaaatcagagtaactatcaactgattcagctttttgttgttttgttcttggctataatacttgtgactcatgaagaattatgttgacaaacaggataaattccacatgcattttatttcccagtgagttgtataaactttatttttgttgaaggttgtatgttaaatcaatgttacattcttatatcacttcttgagaaggaagttccgatttgaaattgtatcatttccttcaaaatgaagggcagtgcttagttaaataaaagattgatgatatcttttaagccatttcctcttcactatgtcttattaaaataaaacctgtcaagttcttttcaaaagatgctatgagcgtttccaataaaccatctattagagttcac

SEQ ID NO: 132963 - DNA, 2145 bp, Homo sapiens
  Payload ID: 5986
  Gene Symbol: FAM86B1
  Gene Name: family with sequence similarity 86, member B1
  Uniprot ID: Q8N7N1
  ENST ID: ENST00000340537
  CDS Start-End: 13-474
ctcgcccacgttatggcgcccgaggagaacgcggggaccgaactcttgctgcagggttttgagcgccgcttcctggcggtgcgcacactgcgctccttcccctggcagagcttagaggcaaagttaagagactcatcagattctgagctgctgcgggatattttgcagaagactgtgaggcatcctgtgtgtgtgaagcacccgccgtcagtcaagtatgcctggtgctttctctcagaactcatcaaaaagtcctcaggaggctcagtcacactctccaagagcacagccatcatctcccacggtaccacaggcctggtcacatgggatgccgccctctaccttgcagaatgggccatcgagaacccggcagccttcattaacagacgtgctgtattgcccagaagccatcgtgtcgctggtcggggtcctgcagaggctggctgcctgccgggagcacaagcgggctcctgaggtctacgtggcctttaccgtccgcaacccagagacgtgccagctgttcaccaccgagctaggccgggatgggatcagatgggaagcggaagctcatcatgaccagaaactgtttccctatggagagcacttggagatggcaatgctgaacctcacactgtaggactcacacatgactccaaagggattgtgagaatcaagtcactctcgtgggaagaatttttatatgggaaagtggataaaactttcattggactggaatgtttggagattattaaactccaaatcaggaatcaaaactgccctctaataagacattagctgtctaggcgtgtgggtgccccctttctgccagcagttctggttctcaagaaaatcatcataaatcagacatgaaaattctagctccaaaaatagcattttctttctgcaaataaaaacgtgtgtatcaaggatgacgttcccccaacgtggacacactcggttcctcagaaagccaagcccgctgcagctgccacatccctggacacactcggttcctcacaaagccaagcccgctgcagctgccacatccctggacacactcggttcctcacaaagccaagcccgctgcagctgccacatccctggacacactcggttcctcacaaagccaagcccgctgcagctgccacatcccagggcttatggtgcagcaggcgcttttttcaagacaggaatgaaagtgttaggaacacggcagaaaggtgacacctggagaccaaatgcaggatgaggagtactgcagaggtcacagggaagtcacagaacagtaatacgctagcaggggcatggggcatgaagaacagaagacaggaagcatttcagagactccaaagaagaaatcagggccaaccacagcttcccgggtcattcaccaggtgacaccactgccgtcatttcagcttctggccactgggaggcgctgctcgaaaggctttgccctgagactccaagaagctgcgggaaggacagcaggggccctggggttttagcctctggcccaggagttatgtgtccataaccaaagggagcacagtctgcacccagctctcatcccatcagagctgctgagactcttgcaggttcttccagaactggcttagcttgcctgcaggatcagaaaagtttgagaaaagcatctgcaaaatgctaaagagcagagcttaactcattgcctgtccccaccccatcccaggtcaccacttggatgaccccaggtccccgacccaacaacaacccctcccaagtccctaactccctcacttggacttgagacccttcacaacccccctcacttggacttgagacccttcacaacccagcagcgctccacttccaacttgacatcatgctttctggaaacttccccgtatgtcccactttcccacacttggtgccctggagcaccttccggcctctacatgctgtacgttcccctgtgagcaccctcctctcggcctctggccaacacagtcccacccatctgtgggtaacaagggggtgtgggtgttcttttcagccttgctaaactgtctgaatcaaggatcacaaactacagcctgcaggccaaatccagcccacagcctgtgtttgtaaataaagctttgttggaacaaagccacacccctt

SEQ ID NO: 132964 - DNA, 2096 bp, Homo sapiens
  Payload ID: 5986
  Gene Symbol: FAM86B1
  Gene Name: family with sequence similarity 86, member B1
  Uniprot ID: Q8N7N1
  ENST ID: ENST00000448228
  CDS Start-End: 51-941
gcccggcttcctccaggtctcccggcaacggctgcggcctcgcccacgttatggcgcccgaggagaacgcggggaccgaactcttgctgcagggttttgagcgccgcttcctggcggtgcgcacactgcgctccttcccctggcagagcttagaggcaaagttaagagactcatcagattctgagctgctgcgggatattttgcagaagactgtgaggcatcctgtgtgtgtgaagcacccgccgtcagtcaagtatgcctggtgctttctctcagaactcatcaaaaagtcctcaggaggctcagtcacactctccaagagcacagccatcatctcccacggtaccacaggcctggtcacatgggatgccgccctctaccttgcagaatgggccatcgagaacccggcagccttcattaacaggactgtcctagagcttggcagtggtgccggcctcacaggccttgccatctgcaagatgtgccgcccccgggcatacatcttcagcgaccctcacagccgggtcctcgagcagctccgagggaatgtccttctcaatggcctctcattagaggcagacatcactggcaacttagacagccccagggtgacagtggcccagctggactgggacgtagcaatggtccatcagctctctgccttccagccagatgttgtcattgcagcagacgtgctgtattgcccagaagccatcgtgtcgctggtcggggtcctgcagaggctggctgcctgccgggagcacaagcgggctcctgaggtctacgtggcctttaccgtccgcaacccagagacgtgccagctgttcaccaccgagctaggccgggatgggatcagatgggaagcggaagctcatcatgaccagaaactgtttccctatggagagcacttggagatggcaatgctgaacctcacactgtaggactcacacatgactccaaagggattgtgagaatcaagtcactctcgtgggaagaatttttatatgggaaagtggataaaactttcattggactggaatgtttggagattattaaactccaaatcaggaatcaaaactgccctctaataagacattagctgtctaggcgtgtgggtgccccctttctgccagcagttctggttctcaagaaaatcatcataaatcagacatgaaaattctagctccaaaaatagcattttctttctgcaaataaaaacgtgtgtatcaaggatgacgttcccccaacgtggacacactcggttcctcagaaagccaagcccgctgcagctgccacatccctggacacactcggttcctcacaaagccaagcccgctgcagctgccacatccctggacacactcggttcctcacaaagccaagcccgctgcagctgccacatccctggacacactcggttcctcacaaagccaagcccgctgcagctgccacatcccagggcttatggtgcagcaggcgcttttttcaagacaggaatgaaagtgttaggaacacggcagaaaggtgacacctggagaccaaatgcaggatgaggagtactgcagaggtcacagggaagtcacagaacagtaatacgctagcaggggcatggggcatgaagaacagaagacaggaagcatttcagagactccaaagaagaaatcagggccaaccacagcttcccgggtcattcaccaggtgacaccactgccgtcatttcagcttctggccactgggaggcgctgctcgaaaggctttgccctgagactccaagaagctgcgggaaggacagcaggggccctggggttttagcctctggcccaggagttatgtgtccataaccaaagggagcacagtctgcacccagctctcatcccatcagagctgctgagactcttgcaggttcttccagaactggcttagcttgcctgcaggatcagaaaagtttgagaaaagcatctgcaaaatgctaaagagcagagcttaactcattgcctgtccccaccccatcccaggtcaccacttggatgaccccaggtccccgacccaacaacaacccctcccaagtccctaactccctcacttggacttgagac

SEQ ID NO: 132965 - DNA, 808 bp, Homo sapiens
  Payload ID: 5986
  Gene Symbol: FAM86B1
  Gene Name: family with sequence similarity 86, member B1
  Uniprot ID: Q8N7N1
  ENST ID: ENST00000534520
  CDS Start-End: 58-519
agtccaggcccggcttcctccaggtctcccggcaacggctgcggcctcgcccacgttatggcgcccgaggagaacgcggggaccgaactcttgctgcagggttttgagcgccgcttcctggcggtgcgcacactgcgctccttcccctggcagagcttagaggcaaagttaagagactcatcagattctgagctgctgcgggatattttgcagaagactgtgaggcatcctgtgtgtgtgaagcacccgccgtcagtcaagtatgcctggtgctttctctcagaactcatcaaaaagtcctcaggaggctcagtcacactctccaagagcacagccatcatctcccacggtaccacaggcctggtcacatgggatgccgccctctaccttgcagaatgggccatcgagaacccggcagccttcattaacagacgtgctgtattgcccagaagccatcgtgtcgctggtcggggtcctgcagaggctggctgcctgccgggagcacaagcgggctcctgaggtctacgtggcctttaccgtccgcaacccagagacgtgccagctgttcaccaccgagctaggtgaacccccacgcccacccgggcctacatggtgcccgagctgtccctgcaggactccagtggaagtgaaagaactgggcgctggggaaaagctaggatgctccacactcccacactatgcggggaactcgggcagaggccggtgagcagggtgggctcggggcgtggggggcttgaggcaggaggaggacacctcagcacagggagggagggtctgagcccagcag

SEQ ID NO: 132966 - DNA, 994 bp, Homo sapiens
  Payload ID: 5986
  Gene Symbol: FAM86B1
  Gene Name: family with sequence similarity 86, member B1
  ENST ID: ENST00000526708
  CDS Start-End: 29-205
cggcaacggctgcggcctcgcccacgttatggcgcccgaggagaacgcggggaccgaactcttgctgcagggttttgagcgccgcttcctggcggtgcgcacactgcgctccttcccctggcaggcagtaatcgttctggtcactgggacacagctgcactcgcccattctaaaaagtcagcgccctcaggcccgcggagcttagaggcaaagttaagagactcatcagattctgagctgctgcgggatattttgcagaagactgtgaggcatcctgtgtgtgtgaagcacccgccgtcagtcaagtatgcctggtgctttctctcagaactcatcaaaaagcacgaggctgtccacacggagcctttggacaaactgtacgaggtgctcacggagactctgatggccaaggagtccacccagggccaccggagctatttgctgtcctcaggaggctcagtcacactctccaagagcacagccatcatctcccacggtaccacaggcctggtcacatgggatgccgccctctaccttgcagaatgggccatcgagaacccggcagccttcattaacaggactgtcctagagcttggcagtggtgccggcctcacaggccttgccatctgcaagatgtgccgcccccgggcatacatcttcagcgaccctcacagccgggtcctcgagcagctccgagggaatgtccttctcaatggcctctcattagaggcagacatcactggcaacttagacagccccagggtgacagtggcccagctggactgggacgtagcaatggtccatcagctctctgccttccagccagatgttgtcattgcagcagacgtgctgtattgcccagaagccatcgtgtcgctggtcggggtcctgcagaggctggctgcctgccgggagcacaagcgggctcctgaggtctacgtggcctttaccgtccgcaacccagagacgtgccagctgttcaccaccgagctag

SEQ ID NO: 132967 - DNA, 928 bp, Homo sapiens
  Payload ID: 5986
  Gene Symbol: FAM86B1
  Gene Name: family with sequence similarity 86, member B1
  ENST ID: ENST00000524571
  CDS Start-End: 1-294
gcgcccgaggagaacgcggggaccgaactcttgctgcagggttttgagcgccgcttcctggcggtgcgcacactgcgctccttcccctggcagagcttagaggcaaagttaagagactcatcagattctgagctgctgcgggatattttgcagaagtcctcaggaggctcagtcacactctccaagagcacagccatcatctcccacggtaccacaggcctggtcacatgggatgccgccctctaccttgcagaatgggccatcgagaacccggcagccttcattaacaggtgaccttggggcacagggcagggcaccgaggcaggcttaccctggtgcagtcgaaaacacggtcccctttcctcccgccaggactgtcctagagcttggcagtggtgccggcctcacaggccttgccatctgcaagatgtgccgcccccgggcatacatcttcagcgaccctcacagccgggtcctcgagcagctccgagggaatgtccttctcaatggcctctcattagaggcagacatcactggcaacttagacagccccagggtgacagtggcccagctggactgggacgtagcaatggtccatcagctctctgccttccagccagatgttgtcattgcagcaggtaatgcccagccccgggcatcctgtgcaggcggtgtccttgcagctctacccagctcttggctctgggaaaagggaacaatggacactgtcgggcatggatgtgatggggcttccagaagagttactctgggcctccagggtgacatcaaaggacaggggtgcctcttaaggtgaccttcaagccacagccctgttgttggagacaggcatactacagttacagtcgtcaccacatggctctgtcccagagccatgccctgtgtccttcagagaccgcaggaggaaaac

SEQ ID NO: 132968 - DNA, 2043 bp, Homo sapiens
  Payload ID: 5986
  Gene Symbol: FAM86B1
  Gene Name: family with sequence similarity 86, member B1
  ENST ID: ENST00000533852
  CDS Start-End: 1-993
atggcgcccgaggagaacgcggggaccgaactcttgctgcagggttttgagcgccgcttcctggcggtgcgcacactgcgctccttcccctggcagagcttagaggcaaagttaagagactcatcagattctgagctgctgcgggatattttgcagaagactgtgaggcatcctgtgtgtgtgaagcacccgccgtcagtcaagtatgcctggtgctttctctcagaactcatcaaaaagcacgaggctgtccacacggagcctttggacaaactgtacgaggtgctcacggagactctgatggccaaggagtccacccagggccaccggagctatttgctgtcctcaggaggctcagtcacactctccaagagcacagccatcatctcccacggtaccacaggcctggtcacatgggatgccgccctctaccttgcagaatgggccatcgagaacccggcagccttcattaacaggactgtcctagagcttggcagtggtgccggcctcacaggccttgccatctgcaagatgtgccgcccccgggcatacatcttcagcgaccctcacagccgggtcctcgagcagctccgagggaatgtccttctcaatggcctctcattagaggcagacatcactggcaacttagacagccccagggtgacagtggcccagctggactgggacgtagcaatggtccatcagctctctgccttccagccagatgttgtcattgcagcagacgtgctgtattgcccagaagccatcgtgtcgctggtcggggtcctgcagaggctggctgcctgccgggagcacaagcgggctcctgaggtctacgtggcctttaccgtccgcaacccagagacgtgccagctgttcaccaccgagctaggccgggatgggatcagatgggaagcggaagctcatcatgaccagaaactgtttccctatggagagcacttggagatggcaatgctgaacctcacactgtaggactcacacatgactccaaagggattgtgagaatcaagtcactctcgtgggaagaatttttatatgggaaagtggataaaactttcattggactggaatgtttggagattattaaactccaaatcaggaatcaaaactgccctctaataagacattagctgtctaggcgtgtgggtgccccctttctgccagcagttctggttctcaagaaaatcatcataaatcagacatgaaaattctagctccaaaaatagcattttctttctgcaaataaaaacgtgtgtatcaaggatgacgttcccccaacgtggacacactcggttcctcagaaagccaagcccgctgcagctgccacatccctggacacactcggttcctcacaaagccaagcccgctgcagctgccacatccctggacacactcggttcctcacaaagccaagcccgctgcagctgccacatccctggacacactcggttcctcacaaagccaagcccgctgcagctgccacatcccagggcttatggtgcagcaggcgcttttttcaagacaggaatgaaagtgttaggaacacggcagaaaggtgacacctggagaccaaatgcaggatgaggagtactgcagaggtcacagggaagtcacagaacagtaatacgctagcaggggcatggggcatgaagaacagaagacaggaagcatttcagagactccaaagaagaaatcagggccaaccacagcttcccgggtcattcaccaggtgacaccactgccgtcatttcagcttctggccactgggaggcgctgctcgaaaggctttgccctgagactccaagaagctgcgggaaggacagcaggggccctggggttttagcctctggcccaggagttatgtgtccataaccaaagggagcacagtctgcacccagctctcatcccatcagagctgctgagactcttgcaggttcttccagaactggcttagcttgcctgcaggatcagaaaagtttgagaaaagcatctgcaaaatgctaaagagcagagcttaactca

SEQ ID NO: 132969 - DNA, 1171 bp, Homo sapiens
  Payload ID: 5986
  Gene Symbol: FAM86B1
  Gene Name: family with sequence similarity 86, member B1
  ENST ID: ENST00000530385
  CDS Start-End: 64-381
ctcttcagtccaggcccggcttcctccaggtctcccggcaacggctgcggcctcgcccacgttatggcgcccgaggagaacgcggggaccgaactcttgctgcagggttttgagcgccgcttcctggcggtgcgcacactgcgctccttcccctggcagtcctcaggaggctcagtcacactctccaagagcacagccatcatctcccacggtaccacaggcctggtcacatgggatgccgccctctaccttgcagaatgggccatcgagaacccggcagccttcattaacagacgtgctgtattgcccagaagccatcgtgtcgctggtcggggtcctgcagaggctggctgcctgccgggagcacaagcgggctcctgaggtctacgtggcctttaccgtccgcaacccagagacgtgccagctgttcaccaccgagctaggtgaacccccacgcccacccgggcctacatggtgcccgagctgtccctgcaggactccagtggaagtgaaagaactgggcgctggggaaaagctaggatgctccacactcccacactatgcggggaactcgggcagaggccggccgggatgggatcagatgggaagcggaagctcatcatgaccagaaactgtttccctatggagagcacttggagatggcaatgctgaacctcacactgtaggactcacacatgactccaaagggattgtgagaatcaagtcactctcgtgggaagaatttttatatgggaaagtggataaaactttcattggactggaatgtttggagattattaaactccaaatcaggaatcaaaactgccctctaataagacattagctgtctaggcgtgtgggtgccccctttctgccagcagttctggttctcaagaaaatcatcataaatcagacatgaaaattctagctccaaaaatagcattttctttctgcaaataaaaacgtgtgtatcaaggatgacgttcccccaacgtggacacactcggttcctcagaaagccaagcccgctgcagctgccacatccctggacacactcggttcctcacaaagccaagcccgctgcagctgccacatccctggacacactcggttcctcacaaagccaagcccgctgcagctgccacatccctggacacactcggttcctcac

SEQ ID NO: 132970 - DNA, 778 bp, Homo sapiens
  Payload ID: 5986
  Gene Symbol: FAM86B1
  Gene Name: family with sequence similarity 86, member B1
  ENST ID: ENST00000529060
  CDS Start-End: 1-307
gcccgaggagaacgcggggaccgaactcttgctgcagggttttgagcgccgcttcctggcggtgcgcacactgcgctccttcccctggcagagcttagaggcaaagttaagagactcatcagattctgagctgctgcgggatattttgcagaagactgtgaggcatcctgtgtgtgtgaagcacccgccgtcagtcaagtatgcctggtgctttctctcagaactcatcaaaaagagacaagatctctgttgcccaggctgtcctcgaactcctgggctcaagcagtcctcccacgtcagcctttagagtagctggaactattcgacacacaccaccacgcccaacgaaattagaacgaaagcaaacaagctctcactctgtctgcccccagcacgaggctgtccacacggagcctttggacaaactgtacgaggtgctcacggagactctgatggccaaggagtccacccagggccaccggagctatttgctgtcctcaggaggctcagtcacactctccaagagcacagccatcatctcccacggtaccacaggcctggtcacatgggatgccgccctctaccttgcagaatgggccatcgagaacccggcagccttcattaacagacgtgctgtattgcccagaagccatcgtgtcgctggtcggggtcctgcagaggctggctgcctgccgggagcacaagcgggctcctgaggtctacgtggcctttaccgtccgcaacccagagacgtgccagctgttcaccaccgagctag

SEQ ID NO: 132971 - DNA, 765 bp, Homo sapiens
  Payload ID: 5986
  Gene Symbol: FAM86B1
  Gene Name: family with sequence similarity 86, member B1
  ENST ID: ENST00000527300
  CDS Start-End: 1-309
atggcgcccgaggagaacgcggggaccgaactcttgctgcagggttttgagcgccgcttcctggcggtgcgcacactgcgctccttcccctggcagagcttagaggcaaagttaagagactcatcagattctgagctgctgcgggatattttgcagaagacgtgctgtattgcccagaagccatcgtgtcgctggtcggggtcctgcagaggctggctgcctgccgggagcacaagcgggctcctgaggtctacgtggcctttaccgtccgcaacccagagacgtgccagctgttcaccaccgagctaggtgaacccccacgcccacccgggcctacatggtgcccgagctgtccctgcaggactccagtggaagtgaaagaactgggcgctggggaaaagctaggatgctccacactcccacactatgcggggaactcgggcagaggccggccgggatgggatcagatgggaagcggaagctcatcatgaccagaaactgtttccctatggagagcacttggagatggcaatgctgaacctcacactgtaggactcacacatgactccaaagggattgtgagaatcaagtcactctcgtgggaagaatttttatatgggaaagtggataaaactttcattggactggaatgtttggagattattaaactccaaatcaggaatcaaaactgccctctaataagacattagctgtctaggcgtgtgggtgccccctttctgccagcagttctggttctcaagaaaa

SEQ ID NO: 132972 - DNA, 725 bp, Homo sapiens
  Payload ID: 5986
  Gene Symbol: FAM86B1
  Gene Name: family with sequence similarity 86, member B1
  ENST ID: ENST00000533513
  CDS Start-End: 4-483
gttatggcgcccgaggagaacgcggggaccgaactcttgctgcagggttttgagcgccgcttcctggcggtgcgcacactgcgctccttcccctggcagagcttagaggcaaagttaagagactcatcagattctgagctgctgcgggatattttgcagaagactgtgaggcatcctgtgtgtgtgaagcacccgccgtcagtcaagtatgcctggtgctttctctcagaactcatcaaaaagcacgaggctgtccacacggagcctttggacaaactgtacgaggtgctcacggagactctgatggccaaggagtccacccagggccaccggagctatttgctgtcctcaggaggctcagtcacactctccaagagcacagccatcatctcccacggtaccacaggcctggtcacatgggatgccgccctctaccttgcagaatgggccatcgagaacccggcagccttcattaacaggtgaccttggggcacagggcagggcaccgaggcaggcttaccctggtgcagtcgaaaacacggtcccctttcctcccgccaggactgtcctagagcttggcagtggtgccggcctcacaggccttgccatctgcaagatgtgccgcccccgggcatacatcttcagcgaccctcacagccgggtcctcgagcagctccgagggaatgtccttctcaatggcctctcattagaggcagacatcactg

SEQ ID NO: 132973 - DNA, 922 bp, Homo sapiens
  Payload ID: 5986
  Gene Symbol: FAM86B1
  Gene Name: family with sequence similarity 86, member B1
  ENST ID: ENST00000524893
  CDS Start-End: 13-213
ctcgcccacgttatggcgcccgaggagaacgcggggaccgaactcttgctgcagggttttgagcgccgcttcctggcggtgcgcacactgcgctccttcccctggcaggtgggcggcggggcgagcggagaggcccgcgggggtcgcgggagtccaggggcagacgggatgggtctccgtgctgaaacccccggcgctccggccacagcttagaggcaaagttaagagactcatcagattctgagctgctgcgggatattttgcagaagtcctcaggaggctcagtcacactctccaagagcacagccatcatctcccacggtaccacaggcctggtcacatgggatgccgccctctaccttgcagaatgggccatcgagaacccggcagccttcattaacagacgtgctgtattgcccagaagccatcgtgtcgctggtcggggtcctgcagaggctggctgcctgccgggagcacaagcgggctcctgaggtctacgtggcctttaccgtccgcaacccagagacgtgccagctgttcaccaccgagctaggtgaacccccacgcccacccgggcctacatggtgcccgagctgtccctgcaggactccagtggaagtgaaagaactgggcgctggggaaaagctaggatgctccacactcccacactatgcggggaactcgggcagaggccggccgggatgggatcagatgggaagcggaagctcatcatgaccagaaactgtttccctatggagagcacttggagatggcaatgctgaacctcacactgtaggactcacacatgactccaaagggattgtgagaatcaagtcactctcgtgggaagaatttttatatgggaaagtggataaaactttcattggactggaatgtttggagattattaaactccaaatca

SEQ ID NO: 132974 - DNA, 2394 bp, Homo sapiens
  Payload ID: 5986
  Gene Symbol: FAM86B1
  Gene Name: family with sequence similarity 86, member B1
  ENST ID: ENST00000431227
  CDS Start-End: 213-392
agtaatcgttctggtcactgggacacagctgcactcgcccattctaaaaagtcagcgccctcaggcccgcgggtaaccacctcctcctgagcgcggtgaccagagcttagaggcaaagttaagagactcatcagattctgagctgctgcgggatattttgcagaagactgtgaggcatcctgtgtgtgtgaagcacccgccgtcagtcaagtatgcctggtgctttctctcagaactcatcaaaaagtcctcaggaggctcagtcacactctccaagagcacagccatcatctcccacggtaccacaggcctggtcacatgggatgccgccctctaccttgcagaatgggccatcgagaacccggcagccttcattaacaggactgtcctagagcttggcagtggtgccggcctcacaggccttgccatctgcaagatgtgccgcccccgggcatacatcttcagcgaccctcacagccgggtcctcgagcagctccgagggaatgtccttctcaatggcctctcattagaggcagacatcactggcaacttagacagccccagggtgacagtggcccagctggactgggacgtagcaatggtccatcagctctctgccttccagccagatgttgtcattgcagcagacgtgctgtattgcccagaagccatcgtgtcgctggtcggggtcctgcagaggctggctgcctgccgggagcacaagcgggctcctgaggtctacgtggcctttaccgtccgcaacccagagacgtgccagctgttcaccaccgagctaggccgggatgggatcagatgggaagcggaagctcatcatgaccagaaactgtttccctatggagagcacttggagatggcaatgctgaacctcacactgtaggactcacacatgactccaaagggattgtgagaatcaagtcactctcgtgggaagaatttttatatgggaaagtggataaaactttcattggactggaatgtttggagattattaaactccaaatcaggaatcaaaactgccctctaataagacattagctgtctaggcgtgtgggtgccccctttctgccagcagttctggttctcaagaaaatcatcataaatcagacatgaaaattctagctccaaaaatagcattttctttctgcaaataaaaacgtgtgtatcaaggatgacgttcccccaacgtggacacactcggttcctcagaaagccaagcccgctgcagctgccacatccctggacacactcggttcctcacaaagccaagcccgctgcagctgccacatccctggacacactcggttcctcacaaagccaagcccgctgcagctgccacatccctggacacactcggttcctcacaaagccaagcccgctgcagctgccacatcccagggcttatggtgcagcaggcgcttttttcaagacaggaatgaaagtgttaggaacacggcagaaaggtgacacctggagaccaaatgcaggatgaggagtactgcagaggtcacagggaagtcacagaacagtaatacgctagcaggggcatggggcatgaagaacagaagacaggaagcatttcagagactccaaagaagaaatcagggccaaccacagcttcccgggtcattcaccaggtgacaccactgccgtcatttcagcttctggccactgggaggcgctgctcgaaaggctttgccctgagactccaagaagctgcgggaaggacagcaggggccctggggttttagcctctggcccaggagttatgtgtccataaccaaagggagcacagtctgcacccagctctcatcccatcagagctgctgagactcttgcaggttcttccagaactggcttagcttgcctgcaggatcagaaaagtttgagaaaagcatctgcaaaatgctaaagagcagagcttaactcattgcctgtccccaccccatcccaggtcaccacttggatgaccccaggtccccgacccaacaacaacccctcccaagtccctaactccctcacttggacttgagacccttcacaacccccctcacttggacttgagacccttcacaacccagcagcgctccacttccaacttgacatcatgctttctggaaacttccccgtatgtcccactttcccacacttggtgccctggagcaccttccggcctctacatgctgtacgttcccctgtgagcaccctcctctcggcctctggccaacacagtcccacccatctgtgggtaacaagggggtgtgggtgttcttttcagccttgctaaactgtctgaatcaaggatcacaaactacagcctgcaggccaaatccagcccacagcctgtgtttgtaaataaagctttgttggaacaaa

SEQ ID NO: 132975 - DNA, 2254 bp, Homo sapiens
  Payload ID: 5986
  Gene Symbol: FAM86B1
  Gene Name: family with sequence similarity 86, member B1
  ENST ID: ENST00000534187
  CDS Start-End: 36-236
ggtctcccggcaacggctgcggcctcgcccacgttatggcgcccgaggagaacgcggggaccgaactcttgctgcagggttttgagcgccgcttcctggcggtgcgcacactgcgctccttcccctggcaggtgggcggcggggcgagcggagaggcccgcgggggtcgcgggagtccaggggcagacgggatgggtctccgtgctgaaacccccggcgctccggccacagcttagaggcaaagttaagagactcatcagattctgagctgctgcgggatattttgcagaagactgtgaggcatcctgtgtgtgtgaagcacccgccgtcagtcaagtatgcctggtgctttctctcagaactcatcaaaaagtcctcaggaggctcagtcacactctccaagagcacagccatcatctcccacggtaccacaggcctggtcacatgggatgccgccctctaccttgcagaatgggccatcgagaacccggcagccttcattaacagacgtgctgtattgcccagaagccatcgtgtcgctggtcggggtcctgcagaggctggctgcctgccgggagcacaagcgggctcctgaggtctacgtggcctttaccgtccgcaacccagagacgtgccagctgttcaccaccgagctaggccgggatgggatcagatgggaagcggaagctcatcatgaccagaaactgtttccctatggagagcacttggagatggcaatgctgaacctcacactgtaggactcacacatgactccaaagggattgtgagaatcaagtcactctcgtgggaagaatttttatatgggaaagtggataaaactttcattggactggaatgtttggagattattaaactccaaatcaggaatcaaaactgccctctaataagacattagctgtctaggcgtgtgggtgccccctttctgccagcagttctggttctcaagaaaatcatcataaatcagacatgaaaattctagctccaaaaatagcattttctttctgcaaataaaaacgtgtgtatcaaggatgacgttcccccaacgtggacacactcggttcctcagaaagccaagcccgctgcagctgccacatccctggacacactcggttcctcacaaagccaagcccgctgcagctgccacatccctggacacactcggttcctcacaaagccaagcccgctgcagctgccacatccctggacacactcggttcctcacaaagccaagcccgctgcagctgccacatcccagggcttatggtgcagcaggcgcttttttcaagacaggaatgaaagtgttaggaacacggcagaaaggtgacacctggagaccaaatgcaggatgaggagtactgcagaggtcacagggaagtcacagaacagtaatacgctagcaggggcatggggcatgaagaacagaagacaggaagcatttcagagactccaaagaagaaatcagggccaaccacagcttcccgggtcattcaccaggtgacaccactgccgtcatttcagcttctggccactgggaggcgctgctcgaaaggctttgccctgagactccaagaagctgcgggaaggacagcaggggccctggggttttagcctctggcccaggagttatgtgtccataaccaaagggagcacagtctgcacccagctctcatcccatcagagctgctgagactcttgcaggttcttccagaactggcttagcttgcctgcaggatcagaaaagtttgagaaaagcatctgcaaaatgctaaagagcagagcttaactcattgcctgtccccaccccatcccaggtcaccacttggatgaccccaggtccccgacccaacaacaacccctcccaagtccctaactccctcacttggacttgagacccttcacaacccccctcacttggacttgagacccttcacaacccagcagcgctccacttccaacttgacatcatgctttctggaaacttccccgtatgtcccactttcccacacttggtgccctggagcaccttccggcctctacatgctgtacgttcccctgtgagcaccctcctctcggcctctggccaacacagtcccacccatctgtgggtaacaagggggtgtgggtgttcttttcagccttgctaaactgtctgaatcaaggatcacaaactacagcctgcaggccaaatccagcccacagcctgtgtttgtaaataaagctttgttggaacaaa

SEQ ID NO: 132976 - DNA, 558 bp, Homo sapiens
  Payload ID: 5986
  Gene Symbol: FAM86B1
  Gene Name: family with sequence similarity 86, member B1
  ENST ID: ENST00000531833
  CDS Start-End: 20-346
ctgcggcctcgcccacgttatggcgcccgaggagaacgcggggaccgaactcttgctgcagggttttgagcgccgcttcctggcggtgcgcacactgcgctccttcccctggcaggtgggcggcggggcgagcggagaggcccgcgggggtcgcgggagtccaggggcagacgggatgggtctccgtgctgaaacccccggcgctccggccacgtgcaccctgcgacatctgaaggtcaggctttcagccgctgtggcttccacttccaactggctccacgtccccagggagggatcacatagagctttgccaacacattctattgcgtgtttaatgttcctgtgaatgggcccttgagatttctctctctcccatccacacagagcttagaggcaaagttaagagactcatcagattctgagctgctgcgggatattttgcagaagactgtgaggcatcctgtgtgtgtgaagcacccgccgtcagtcaagtatgcctggtgctttctctcagaactcatcaaaaagacgtgctgtattgcccagaagccatcgtgt

SEQ ID NO: 132977 - DNA, 2258 bp, Homo sapiens
  Payload ID: 5986
  Gene Symbol: FAM86B1
  Gene Name: family with sequence similarity 86, member B1
  ENST ID: ENST00000529146
  CDS Start-End: 113-322
cagagcttagaggcaaagttaagagactcatcagattctgagctgctgcgggatattttgcagaagactgtgaggcatcctgtgtgtgtgaagcacccgccgtcagtcaagtatgcctggtgctttctctcagaactcatcaaaaagagacaagatctctgttgcccaggctgtcctcgaactcctgggctcaagcagtcctcccacgtcagcctttagagtagctggaactattcgacacacaccaccacgcccaacgaacacgaggctgtccacacggagcctttggacaaactgtacgaggtgctcacggagactctgatggccaaggagtccacccagggccaccggagctatttgctgtcctcaggaggctcagtcacactctccaagagcacagccatcatctcccacggtaccacaggcctggtcacatgggatgccgccctctaccttgcagaatgggccatcgagaacccggcagccttcattaacagacgtgctgtattgcccagaagccatcgtgtcgctggtcggggtcctgcagaggctggctgcctgccgggagcacaagcgggctcctgaggtctacgtggcctttaccgtccgcaacccagagacgtgccagctgttcaccaccgagctaggccgggatgggatcagatgggaagcggaagctcatcatgaccagaaactgtttccctatggagagcacttggagatggcaatgctgaacctcacactgtaggactcacacatgactccaaagggattgtgagaatcaagtcactctcgtgggaagaatttttatatgggaaagtggataaaactttcattggactggaatgtttggagattattaaactccaaatcaggaatcaaaactgccctctaataagacattagctgtctaggcgtgtgggtgccccctttctgccagcagttctggttctcaagaaaatcatcataaatcagacatgaaaattctagctccaaaaatagcattttctttctgcaaataaaaacgtgtgtatcaaggatgacgttcccccaacgtggacacactcggttcctcagaaagccaagcccgctgcagctgccacatccctggacacactcggttcctcacaaagccaagcccgctgcagctgccacatccctggacacactcggttcctcacaaagccaagcccgctgcagctgccacatccctggacacactcggttcctcacaaagccaagcccgctgcagctgccacatcccagggcttatggtgcagcaggcgcttttttcaagacaggaatgaaagtgttaggaacacggcagaaaggtgacacctggagaccaaatgcaggatgaggagtactgcagaggtcacagggaagtcacagaacagtaatacgctagcaggggcatggggcatgaagaacagaagacaggaagcatttcagagactccaaagaagaaatcagggccaaccacagcttcccgggtcattcaccaggtgacaccactgccgtcatttcagcttctggccactgggaggcgctgctcgaaaggctttgccctgagactccaagaagctgcgggaaggacagcaggggccctggggttttagcctctggcccaggagttatgtgtccataaccaaagggagcacagtctgcacccagctctcatcccatcagagctgctgagactcttgcaggttcttccagaactggcttagcttgcctgcaggatcagaaaagtttgagaaaagcatctgcaaaatgctaaagagcagagcttaactcattgcctgtccccaccccatcccaggtcaccacttggatgaccccaggtccccgacccaacaacaacccctcccaagtccctaactccctcacttggacttgagacccttcacaacccccctcacttggacttgagacccttcacaacccagcagcgctccacttccaacttgacatcatgctttctggaaacttccccgtatgtcccactttcccacacttggtgccctggagcaccttccggcctctacatgctgtacgttcccctgtgagcaccctcctctcggcctctggccaacacagtcccacccatctgtgggtaacaagggggtgtgggtgttcttttcagccttgctaaactgtctgaatcaaggatcacaaactacagcctgcaggccaaatccagcccacagcctgtgtttgtaaataaagctttgttggaacaaagccacaccccttaa

SEQ ID NO: 132978 - DNA, 1268 bp, Homo sapiens
  Payload ID: 5987
  Gene Symbol: FAM86B2
  Gene Name: family with sequence similarity 86, member B2
  Uniprot ID: P0C5J1
  ENST ID: ENST00000262365
  CDS Start-End: 1-993
atggcgcccgaggagaacgcggggaccgaactcttgctgcagggttttgagcgccgcttcctggcggtgcgcacactgcgctccttcccctggcagagcttagaggcaaagttaagagactcatcagattctgagctgctgcgggatattttgcagaagactgtgaggcatcctgtgtgtgtgaagcacccgccgtcagtcaagtatgcctggtgctttctctcagaactcatcaaaaagcacgaggctgtccacacggagcctttggacaaactgtacgaggtgctcgcggagactctgatggccaaggagtccacccagggccaccggagctatttgctgtcctcaggaggctcagtcacactctccaagagcacagccatcatctcccacggtaccacaggcctggtcacatgggatgccgccctctaccttgcagaatgggccatcgagaacccggcagccttcattaacaggactgtcctagagcttggcagtggtgccggcctcacaggccttgccatctgcaagatgtgccgcccccgggcatacatcttcagcgaccctcacagccggatcctcgagcagctccgagggaatgtccttctcaatggcctctcattagaggcagacatcactggcaacttagacagccccagggtgacagtggcccagctggactgggacgtagcaatggtccatcagctctctgccttccagccagatgttgtcattgcagcagacgtgctgtattgcccagaagccatcgtgtcgctggtcggggtcctgcagaggctggctgcctgccgggagcacaagcgggctcctgaggtctacgtggcctttaccgtccgcaacccagagacatgccagctgttcaccaccgagctaggccgggatgggatcagatgggaagcggaagctcatcatgaccagaaactgtttccctatggagagcacttggagatggcaatgctgaacctcacactgtaggactcacacatgactccaaagggattgtgagaatcaagtcactctcgtgggaagaatttttatatgggaaagtggataaaactttcattggactggaatgtttggagattattaaactccaaatcaggaatcaaaactgccctctaataagacattagctgtctaggcgtgtgggtgccccctttctgccagcagttctggttctcaagaaaatcatcataaatcagacatgaaaattctagctccaaaaatagcattttctttctgcaaataaa

SEQ ID NO: 132979 - DNA, 806 bp, Homo sapiens
  Payload ID: 5987
  Gene Symbol: FAM86B2
  Gene Name: family with sequence similarity 86, member B2
  ENST ID: ENST00000309608
  CDS Start-End: 259-678
tttgagcgccgcttcctggcggtgcgcacactgcgctccttcccctggcaggtgggcggcggggcgagcggagaggcccgcgggggtcgcgggagtccaggggcagacgggatgggtctccgtgctgaaacccccggcgctccggccacagcttagaggcaaagttaagagactcatcagattctgagctgctgcgggatattttgcagaagactgtgaggcatcctgtgtgtgtgaagcacccgccgtcagtcaagtatgcctggtgctttctctcagaactcatcaaaaagtcctcaggaggctcagtcacactctccaagagcacagccatcatctcccacggtaccacaggcctggtcacatgggatgccgccctctaccttgcagaatgggccatcgagaacccggcagccttcattaacagacgtgctgtattgcccagaagccatcgtgtcgctggtcggggtcctgcagaggctggctgcctgccgggagcacaagcgggctcctgaggtctacgtggcctttaccgtccgcaacccagagacatgccagctgttcaccaccgagctaggccgggatgggatcagatgggaagcggaagctcatcatgaccagaaactgtttccctatggagagcacttggagatggcaatgctgaacctcacactgtaggactcacacatgactccaaagggattgtgagaatcaagtcactctcgtgggaagaatttttatatgggaaagtggataaaactttcattggactggaatgtttggagattattaaactccaaatcagg

SEQ ID NO: 132980 - DNA, 885 bp, Homo sapiens
  Payload ID: 5987
  Gene Symbol: FAM86B2
  Gene Name: family with sequence similarity 86, member B2
  ENST ID: ENST00000527331
  CDS Start-End: 1-885
atggcgcccgaggagaacgcggggaccgaactcttgctgcagggttttgagcgccgcttcctggcggtgcgcacactgcgctccttcccctggcagagcttagaggcaaagttaagagactcatcagattctgagctgctgcgggatattttgcagaagactgtgaggcatcctgtgtgtgtgaagcacccgccgtcagtcaagtatgcctggtgctttctctcagaactcatcaaaaagtcctcaggaggctcagtcacactctccaagagcacagccatcatctcccacggtaccacaggcctggtcacatgggatgccgccctctaccttgcagaatgggccatcgagaacccggcagccttcattaacaggactgtcctagagcttggcagtggtgccggcctcacaggccttgccatctgcaagatgtgccgcccccgggcatacatcttcagcgaccctcacagccggatcctcgagcagctccgagggaatgtccttctcaatggcctctcattagaggcagacatcactggcaacttagacagccccagggtgacagtggcccagctggactgggacgtagcaatggtccatcagctctctgccttccagccagatgttgtcattgcagcagacgtgctgtattgcccagaagccatcgtgtcgctggtcggggtcctgcagaggctggctgcctgccgggagcacaagcgggctcctgaggtctacgtggcctttaccgtccgcaacccagagacatgccagctgttcaccaccgagctaggccgggatgggatcagatgggaagcggaagctcatcatgaccagaaactgtttccctatggagagcacttggagatggcaatgctgaacctcaca

SEQ ID NO: 132981 - DNA, 447 bp, Homo sapiens
  Payload ID: 5987
  Gene Symbol: FAM86B2
  Gene Name: family with sequence similarity 86, member B2
  ENST ID: ENST00000532480
  CDS Start-End: 1-447
atggcgcccgaggagaacgcggggaccgaactcttgctgcagggttttgagcgccgcttcctggcggtgcgcacactgcgctccttcccctggcagagcttagaggcaaagttaagagactcatcagattctgagctgctgcgggatattttgcagaagactgtgaggcatcctgtgtgtgtgaagcacccgccgtcagtcaagtatgcctggtgctttctctcagaactcatcaaaaagtcctcaggaggctcagtcacactctccaagagcacagccatcatctcccacggtaccacaggcctggtcacatgggatgccgccctctaccttgcagaatgggccatcgagaacccggcagccttcattaacagacgtgctgtattgcccagaagccatcgtgtcgctggtcggggtcctgcagaggctggctgcctgccgggagca

SEQ ID NO: 132982 - DNA, 2010 bp, Homo sapiens
  Payload ID: 5988
  Gene Symbol: FAM86C1
  Gene Name: family with sequence similarity 86, member C1
  Uniprot ID: Q9NVL1
  ENST ID: ENST00000346333
  CDS Start-End: 28-423
cggcaaggctgaggccccgcccccgtcatggcgcccgaggagaacgcggggagcgaactcttgctgcagagtttcaagcgccgcttcctggcagcgcgcgccctgcgctccttccgctggcagagcttagaagcaaagttaagagactcatcagattctgagctgctgcgggatattttgcagaagacgtgctgtattgcccagaagccatcgtgtcgctggtcggggtcctgcggaggctggctgcctgccgggagcaccagcgggctcctcaattctacatggcccttaccgtctgcaacccagagatgtgccagctgttcaccaccgagctatgctggactgggatcagatgggaagcggaagctcatcatgaccagaaactgtttccctacagagagcacttggagatggcaaagctgaacctcacactgtaggactcacacatgactccaacgggattgtgagaattaagtcactctcgtgggaagaatttttatatgggaaagcggataaaactttcattggactggaatgtttggagaatgttaaattccaaatcaggaaccacaaactgcgctctaataagacatcggctatctaagcatgtgggttccccctttctgccagcagttctggttcttaagaaaatcaccataaatcagacatgaaaattctggctccaaaaatagcattttcattgtgcaaataaaaacgtgtgtatcaagtatgacattcccccaacgtggacacacttggttcctcacaaagccaagcccgctgcagctgccacatccctggacacactcgtttcctcacaaagccaagcccgctgcagctgccacatccctggacacactcggttcctcacaaagccaagcccgctgcagctgccacatccctggacacactcgtttcctcacaaagccaagcccgctgcagctgccacatccctggacacactcgtttcctcacaaagccaagcccgctgcagctgccacatccctggacacactcggttcctcaaaaagccaagccggctgcagctgccacatccctgggtttatgatgcagcaggtgcttttttcaagacaggaatcaaagtgttaggaacatggcagaaaggtgacacctggagaccaaatgcagggtaaggagtactgcagaggtcacagggaagtcacagaacagtaatacgctagcaggggcatggggcgtgaagaacagaagacaggaagcgtttcagagactccaaagaagaaatcagggccaaccacagcttcccgagtcattcaccaggtggcaccactgccttcatttcagcttccggccactgggaggcgctgctcgaaagggtttgccctgagacaccaagaagaagctgcgggaaggacagcaggggccctggggttttagcctctggcccaggagttatgtgtccataaccaaagggagcacagtctgcacccagctctcatcccatcagagctgctgcgactcccgcaggttcttccagaactggtttagcttgcctgcaggatcaggaaagtttgagaaaagcatctgcaaaatactaaagagcagagcttacttcattgcctgtccccaccccatcccaggtcaccacctggctgaacccaggtccccgacccaacaacaacccctcccaagtccctaactccctcacttggacttgagacccttcacaacccagcagcgctccgcctccaacttgacatcatgctttctggaaacttccccgtgtgtcccactttcccacacttggtgcgctggagcaccttccggcctctacatgctgtacgttcccctgtgagcaccctcctctcagcctctggccaacacagtcccacccatctgtgggtaacaagggggtgtgggtgttcttttcagccttgctaaactgtctgaatcaaggatcacaaactacagcctgcaggccaaatccagcccacagcctgtgtttgtaaataaagctttattggaacaaag

SEQ ID NO: 132983 - DNA, 2110 bp, Homo sapiens
  Payload ID: 5988
  Gene Symbol: FAM86C1
  Gene Name: family with sequence similarity 86, member C1
  Uniprot ID: Q9NVL1
  ENST ID: ENST00000359244
  CDS Start-End: 24-521
aaggctgaggccccgcccccgtcatggcgcccgaggagaacgcggggagcgaactcttgctgcagagtttcaagcgccgcttcctggcagcgcgcgccctgcgctccttccgctggcagagcttagaagcaaagttaagagactcatcagattctgagctgctgcgggatattttgcagaagcacgaggctgtccacacagagcctttggatgagctgtacgaggtgctggtggagaccctgatggccaaggagtccacccagggccaccggagctatttgctgacgtgctgtattgcccagaagccatcgtgtcgctggtcggggtcctgcggaggctggctgcctgccgggagcaccagcgggctcctcaattctacatggcccttaccgtctgcaacccagagatgtgccagctgttcaccaccgagctatgctggactgggatcagatgggaagcggaagctcatcatgaccagaaactgtttccctacagagagcacttggagatggcaaagctgaacctcacactgtaggactcacacatgactccaacgggattgtgagaattaagtcactctcgtgggaagaatttttatatgggaaagcggataaaactttcattggactggaatgtttggagaatgttaaattccaaatcaggaaccacaaactgcgctctaataagacatcggctatctaagcatgtgggttccccctttctgccagcagttctggttcttaagaaaatcaccataaatcagacatgaaaattctggctccaaaaatagcattttcattgtgcaaataaaaacgtgtgtatcaagtatgacattcccccaacgtggacacacttggttcctcacaaagccaagcccgctgcagctgccacatccctggacacactcgtttcctcacaaagccaagcccgctgcagctgccacatccctggacacactcggttcctcacaaagccaagcccgctgcagctgccacatccctggacacactcgtttcctcacaaagccaagcccgctgcagctgccacatccctggacacactcgtttcctcacaaagccaagcccgctgcagctgccacatccctggacacactcggttcctcaaaaagccaagccggctgcagctgccacatccctgggtttatgatgcagcaggtgcttttttcaagacaggaatcaaagtgttaggaacatggcagaaaggtgacacctggagaccaaatgcagggtaaggagtactgcagaggtcacagggaagtcacagaacagtaatacgctagcaggggcatggggcgtgaagaacagaagacaggaagcgtttcagagactccaaagaagaaatcagggccaaccacagcttcccgagtcattcaccaggtggcaccactgccttcatttcagcttccggccactgggaggcgctgctcgaaagggtttgccctgagacaccaagaagaagctgcgggaaggacagcaggggccctggggttttagcctctggcccaggagttatgtgtccataaccaaagggagcacagtctgcacccagctctcatcccatcagagctgctgcgactcccgcaggttcttccagaactggtttagcttgcctgcaggatcaggaaagtttgagaaaagcatctgcaaaatactaaagagcagagcttacttcattgcctgtccccaccccatcccaggtcaccacctggctgaacccaggtccccgacccaacaacaacccctcccaagtccctaactccctcacttggacttgagacccttcacaacccagcagcgctccgcctccaacttgacatcatgctttctggaaacttccccgtgtgtcccactttcccacacttggtgcgctggagcaccttccggcctctacatgctgtacgttcccctgtgagcaccctcctctcagcctctggccaacacagtcccacccatctgtgggtaacaagggggtgtgggtgttcttttcagccttgctaaactgtctgaatcaaggatcacaaactacagcctgcaggccaaatccagcccacagcctgtgtttgtaaataaagctttattggaacaaagcc

SEQ ID NO: 132984 - DNA, 952 bp, Homo sapiens
  Payload ID: 5988
  Gene Symbol: FAM86C1
  Gene Name: family with sequence similarity 86, member C1
  Uniprot ID: Q9NVL1
  ENST ID: ENST00000426628
  CDS Start-End: 20-496
ctgaggccccgcccccgtcatggcgcccgaggagaacgcggggagcgaactcttgctgcagagtttcaagcgccgcttcctggcagcgcgcgccctgcgctccttccgctggcagagcttagaagcaaagttaagagactcatcagattctgagctgctgcgggatattttgcagaagactgtgaagcatcctgtgtgtgtgaagcacccgccgtcagtcaagtatgcccggtgctttctctcagaactcatcaaaaagacgtgctgtattgcccagaagccatcgtgtcgctggtcggggtcctgcggaggctggctgcctgccgggagcaccagcgggctcctcaattctacatggcccttaccgtctgcaacccagagatgtgccagctgttcaccaccgagctatgctggactgggatcagatgggaagcggaagctcatcatgaccagaaactgtttccctacagagagcacttggagatggcaaagctgaacctcacactgtaggactcacacatgactccaacgggattgtgagaattaagtcactctcgtgggaagaatttttatatgggaaagcggataaaactttcattggactggaatgtttggagaatgttaaattccaaatcaggaaccacaaactgcgctctaataagacatcggctatctaagcatgtgggttccccctttctgccagcagttctggttcttaagaaaatcaccataaatcagacatgaaaattctggctccaaaaatagcattttcattgtgcaaataaaaacgtgtgtatcaagtatgacattcccccaacgtggacacacttggttcctcacaaagccaagcccgctgcagctgccacatccctggacacactcgtttcctcacaaagccaagcccgctgcagctgccacatccctggacacactcggttcctcacaaagccaa

SEQ ID NO: 132985 - DNA, 1580 bp, Homo sapiens
  Payload ID: 5988
  Gene Symbol: FAM86C1
  Gene Name: family with sequence similarity 86, member C1
  ENST ID: ENST00000510443
  CDS Start-End: 24-185
aaggctgaggccccgcccccgtcatggcgcccgaggagaacgcggggagcgaactcttgctgcagagtttcaagcgccgcttcctggcagcgcgcgccctgcgctccttccgctggcagagcttagaagcaaagttaagagactcatcagattctgagctgctgcgggatattttgcagaagtagactgtgaagcatcctgtgtgtgtgaagcacccgccgtcagtcaagtatgcccggtgctttctctcagaactcatcaaaaagacgtgctgtattgcccagaagccatcgtgtcgctggtcggggtcctgcggaggctggctgcctgccgggagcaccagcgggctcctcaattctacatggcccttaccgtctgcaacccagagatgtgccagctgttcaccaccgagctatgctggactgggatcagatgggaagcggaagctcatcatgaccagaaactgtttccctacagagagcacttggagatggcaaagctgaacctcacactgtaggactcacacatgactccaacgggattgtgagaattaagtcactctcgtgggaagaatttttatatgggaaagcggataaaactttcattggactggaatgtttggagaatgttaaattccaaatcaggaaccacaaactgcgctctaataagacatcggctatctaagcatgtgggttccccctttctgccagcagttctggttcttaagaaaatcaccataaatcagacatgaaaattctggctccaaaaatagcattttcattgtgcaaataaaaacgtgtgtatcaagtatgacattcccccaacgtggacacacttggttcctcacaaagccaagcccgctgcagctgccacatccctggacacactcgtttcctcacaaagccaagcccgctgcagctgccacatccctggacacactcggttcctcacaaagccaagcccgctgcagctgccacatccctggacacactcgtttcctcacaaagccaagcccgctgcagctgccacatccctggacacactcgtttcctcacaaagccaagcccgctgcagctgccacatccctggacacactcggttcctcaaaaagccaagccggctgcagctgccacatccctgggtttatgatgcagcaggtgcttttttcaagacaggaatcaaagtgttaggaacatggcagaaaggtgacacctggagaccaaatgcagggtaaggagtactgcagaggtcacagggaagtcacagaacagtaatacgctagcaggggcatggggcgtgaagaacagaagacaggaagcgtttcagagactccaaagaagaaatcagggccaaccacagcttcccgagtcattcaccaggtggcaccactgccttcatttcagcttccggccactgggaggcgctgctcgaaagggtttgccctgagacaccaagaagaagctgcgggaaggacagcaggggccctggggttttagcctctggcccaggagttatgtgtccataaccaaagggagcacagtctgcacccagctctcatcccatcagagctgctgcgactc

SEQ ID NO: 132986 - DNA, 1295 bp, Homo sapiens
  Payload ID: 5988
  Gene Symbol: FAM86C1
  Gene Name: family with sequence similarity 86, member C1
  ENST ID: ENST00000526393
  CDS Start-End: 27-188
ggcaaggctgaggccccgcccccgtcatggcgcccgaggagaacgcggggagcgaactcttgctgcagagtttcaagcgccgcttcctggcagcgcgcgccctgcgctccttccgctggcagagcttagaagcaaagttaagagactcatcagattctgagctgctgcgggatattttgcagaagtagactgtgaagcatcctgtgtgtgtgaagcacccgccgtcagtcaagtatgcccggtgctttctctcagaactcatcaaaaagcacgaggctgtccacacagagcctttggatgagctgtacgaggtgctggtggagaccctgatggccaaggagtccacccagggccaccggagctatttgctgacgtgctgtattgcccagaagccatcgtgtcgctggtcggggtcctgcggaggctggctgcctgccgggagcaccagcgggctcctcaattctacatggcccttaccgtctgcaacccagagatgtgccagctgttcaccaccgagctatgtgagcccccacgcccacccgggcctgcatggtccccaagctgtccctacaggactccagtggaagtgaaagaactgggggccggggaaaagctaggatgccccacactcccacaccatgcggggaactagggcagaggccggtgagaagggtgggctcgggtcgtggggggattgtggcaggaggagggcagctcagcacagggagggaggatctgagcccagcagccctactgtgtgcttcagagcagggttccctaagcccttgggcctcggtttcctcatctataaaatagaggtggcaggaggggcagtcggggtcaggtttggacacagctgtggcctgcaggacgctggagcacaggctgtacaggcggatccaccacgccactgtcctgagcacccagtcaatggaagatgagcagggtgactatagagaaggggaactggccccgtagtgggccagccactgtcctcagacctgacatttgtcagcccccgcacctgtgagagtgtgatatcattgtcccatctcaccgacaaagacactaggacacacagaggacaagcaacccccgagctcccacagactgctgcccggccacctggctcttgtgcctccactctacacccaagccccccattgccaccagcctttgccccagctccccctgagcacagcccctcctggcagccatgtgcacagatgtacccgcagcagcctctgcctgcacacagagacacggacaagccagtgcctgtccacgtggggcag

SEQ ID NO: 132987 - DNA, 990 bp, Homo sapiens
  Payload ID: 5988
  Gene Symbol: FAM86C1
  Gene Name: family with sequence similarity 86, member C1
  ENST ID: ENST00000528685
  CDS Start-End: 1-378
atggcgcccgaggagaacgcggggagcgaactcttgctgcagagtttcaagcgccgcttcctggcagcgcgcgccctgcgctccttccgctggcagagcttagaagcaaagttaagagactcatcagattctgagctgctgcgggatattttgcagaagacgtgctgtattgcccagaagccatcgtgtcgctggtcggggtcctgcggaggctggctgcctgccgggagcaccagcgggctcctcaattctacatggcccttaccgtctgcaacccagagatgtgccagctgttcaccaccgagctatgtgagcccccacgcccacccgggcctgcatggtccccaagctgtccctacaggactccagtggaagtgaaagaactgggggccggggaaaagctaggatgccccacactcccacaccatgcggggaactagggcagaggccggctggactgggatcagatgggaagcggaagctcatcatgaccagaaactgtttccctacagagagcacttggagatggcaaagctgaacctcacactgtaggactcacacatgactccaacgggattgtgagaattaagtcactctcgtgggaagaatttttatatgggaaagcggataaaactttcattggactggaatgtttggagaatgttaaattccaaatcaggaaccacaaactgcgctctaataagacatcggctatctaagcatgtgggttccccctttctgccagcagttctggttcttaagaaaatcaccataaatcagacatgaaaattctggctccaaaaatagcattttcattgtgcaaataaaaacgtgtgtatcaagtatgacattcccccaacgtggacacacttggttcctcacaaagccaagcccgctgcagctgccacatccctggacacactcgtttcctcacaaagccaagcccgctgcagctgccacatccctggacacactcggttcctcacaaag

SEQ ID NO: 132988 - DNA, 1495 bp, Homo sapiens
  Payload ID: 5989
  Gene Symbol: FAM89A
  Gene Name: family with sequence similarity 89, member A
  Uniprot ID: Q96GI7
  ENST ID: ENST00000366654
  CDS Start-End: 36-590
gcagcggggcaggcgcgtggccgggccgcggcgcgatgagtggggcccgggcggcgcccggggccgcgggcaacggcgcggtccgggggctgcgggtggacgggctgcccccgctgccaaagagcttgagcgggctgctgcactcggcgtcgggcggcggcgcgtctgggggctggcggcacctggagcggctgtacgcgcagaagtcgcgcatccaggacgagctgagccgcgggggcccgggcggcggcggggcccgggcggcagcgctgcccgccaagcctcccaacctggacgccgctctggcgctgctccgcaaagagatggttggtctccgccagctggacatgtccttgctctgccaactgtacagcctctacgagtcgattcaggagtacaagggggcatgccaggcagcctccagcccagactgcacttacgctctggagaacggcttcttcgatgaagaggaggaatatttccaggagcagaactccctgcacgacaggagggaccgaggccctcctcgggacttgtcactgcctgtctcctccctctccagcagcgactggattctggagtccatctagagggtcttgggagggatgtgactgttgggaagcccttcctactggacacgctgtcatcatttgctgcttctcttgcaagaaagcacctccgttgtggacggtcctcgggcacaggggatgagcgctaccagtttcatttgtaggcagggagttctccgcggatgcatggtggcagtctgctttgatggcagcagtttctgcttaggtgacctagaggtcctcagcagtatcctccacacctatttattgaggtgcacctgctggggattcataatgagaatataacaagaggatctcggtgaaaggccttagtgggtgttttgtgtgaggtggcttgtagctagctacttccttacagatggtagagtattccaatcctctttgtgttagggttcttgcttccagtttgggatgtattaaaaccaccatttcactgcttcccttcctcaatatgctctgcagcttttcttgctgtttaaacctctcgcctcagctttatttatttgtaagctgcattactaactgcccagtgattcggtgaaagctttttactgaaaaagttaacatttctagtcatcccaatcaactggcttttttcaaccaaaattttatatcattctttgtctatcagatacgagaggaaggaagataatacgaagacatgttgaatagtgaaaaaaaaaaaaagaacacaaaaactggggcaagccaatgtgatgtatcactcactgtaagatggcaaatgttttcatttttaagattccgaatgtaaactagtgtgctagaaagcaaaccacccgccactcaaaccagtaattaccttaagccttaatatatttattaaaatactttatgagaacattacactttgtaggttaaaaatgaggataaaatgctaaactatc

SEQ ID NO: 132989 - DNA, 1409 bp, Homo sapiens
  Payload ID: 5990
  Gene Symbol: FAM89B
  Gene Name: family with sequence similarity 89, member B
  Uniprot ID: Q8N5H3
  ENST ID: ENST00000316409
  CDS Start-End: 322-852
agaaaccacgcctgcccccttcagccttttcccccctccgccgcatttttccatctccccttgagtgagtggatgtcccgttgccttttctcagctttgcgcgacgtggtcccacaaccgttgcctttttaagagaggcccggcccatccagagggggtggggcagaggcggagtctgaggagctggggaaggaacaaagcgaggcctgcgggcggcggctgggctccggcggggccgcggggtgcggggcctgcgggcggcggcccgggcggagcgttggagggaaggaggtggcatcgccgtccgcgccggccccggccatgaacgggctgccctcggcagaggcgccgggcggggcgggctgcgctttggccgggctcccaccgctgccgcgcggcctcagcggcctccttaatgcgagcgggggctcgtggcgggagctggagcgcgtctacagccagcgcagccgcatccacgacgagctgagccgcgccgcccgcgccccggacgggccccgccacgccgccggcgccgccaacgcgggacccgcagccggcccgcgtcgtcctgtcaacctcgactcagcgctggccgcgctgcgcaaggagatgctgtggggcctgtacgagtcaatccaggactacaaacacctgtgccaagacctgagcttctgccaggacctgtcatcctccctccattcggacagctcctacccaccggatgcgggcctgtctgacgacgaggagcctcccgatgccagcctgcctcctgacccgccaccccttactgtgccccagacgcacaatgcccgtgaccagtggctgcaggatgccttccacatcagcctctgaagggctggggggcagggggcatgcacccatgcaaaaggctcagaaactccccctccggcaagccctcagacttcggagcctgcgccttcccccctaccgcctcacctcacaggagggccaggcatgtattcctcagaggcgaaactgccaaactctttctcctgtcttgggttggctggcactggggcgggcatctagggtacagcctctgctcatggcactgggcctccagttcttccacatgtgtgcacccccagcttggccaaccctcagccttgcggtggggcccgaagcatcttcccttccgcttggcgtctctgggattgggatgagtgcctggctcccatctcctcctcaccttttgttgctatcggcagctgctggctcaggggcatcccacctccgggctctgggttcctctgccctggaagggctccaggacccgtcccaataaccacccacggccaggagggccaaggccccgtgctggatatttaaatttaggggccggtctccagggcgcgtagataaataaatacactcagcgtcgttgtgct

SEQ ID NO: 132990 - DNA, 1337 bp, Homo sapiens
  Payload ID: 5990
  Gene Symbol: FAM89B
  Gene Name: family with sequence similarity 89, member B
  Uniprot ID: Q8N5H3
  ENST ID: ENST00000449319
  CDS Start-End: 209-673
acaaccgttgcctttttaagagaggcccggcccatccagagggggtggggcagaggcggagtctgaggagctggggaaggaacaaagcgaggcctgcgggcggcggctgggctccggcggggccgcggggtgcggggcctgcgggcggcggcccgggcggagcgttggagggaaggaggtggcatcgccgtccgcgccggccccggccatgaacgggctgccctcggcagaggcgccgggcggggcgggctgcgctttggccgggctcccaccgctgccgcgcggcctcagcggcctccttaatgcgagcgggggctcgtggcgggagctggagcgcgtctacagccagcgcagccgcatccacgacgagctgagccgcgccgcccgcgccccggacgggccccgccacgccgccggcgccgccaacgcgggacccgcagccggcccgcgtcgtcctgtcaacctcgactcagcgctggccgcgctgcgcaaggagatgttgtctgcaggtggggctgcggcagttggacatgtccttgttgtgccagctgtggggcctgtacgagtcaatccaggactacaaacacctgtgccaagacctgagcttctgccaggacctgtcatcctccctccattcggacagctcctacccaccggatgcgggcctgtctgacgacgaggagcctcccgatgccagcctgcctcctgacccgccaccccttactgtgccccagacgcacaatgcccgtgaccagtggctgcaggatgccttccacatcagcctctgaagggctggggggcagggggcatgcacccatgcaaaaggctcagaaactccccctccggcaagccctcagacttcggagcctgcgccttcccccctaccgcctcacctcacaggagggccaggcatgtattcctcagaggcgaaactgccaaactctttctcctgtcttgggttggctggcactggggcgggcatctagggtacagcctctgctcatggcactgggcctccagttcttccacatgtgtgcacccccagcttggccaaccctcagccttgcggtggggcccgaagcatcttcccttccgcttggcgtctctgggattgggatgagtgcctggctcccatctcctcctcaccttttgttgctatcggcagctgctggctcaggggcatcccacctccgggctctgggttcctctgccctggaagggctccaggacccgtcccaataaccacccacggccaggagggccaaggccccgtgctggatatttaaatttaggggccggtctccagggcgcgtagataaataaatacactcagcgtc

SEQ ID NO: 132991 - DNA, 1263 bp, Homo sapiens
  Payload ID: 5990
  Gene Symbol: FAM89B
  Gene Name: family with sequence similarity 89, member B
  Uniprot ID: Q8N5H3
  ENST ID: ENST00000530349
  CDS Start-End: 143-712
ggagctggggaaggaacaaagcgaggcctgcgggcggcggctgggctccggcggggccgcggggtgcggggcctgcgggcggcggcccgggcggagcgttggagggaaggaggtggcatcgccgtccgcgccggccccggccatgaacgggctgccctcggcagaggcgccgggcggggcgggctgcgctttggccgggctcccaccgctgccgcgcggcctcagcggcctccttaatgcgagcgggggctcgtggcgggagctggagcgcgtctacagccagcgcagccgcatccacgacgagctgagccgcgccgcccgcgccccggacgggccccgccacgccgccggcgccgccaacgcgggacccgcagccggcccgcgtcgtcctgtcaacctcgactcagcgctggccgcgctgcgcaaggagatggtggggctgcggcagttggacatgtccttgttgtgccagctgtggggcctgtacgagtcaatccaggactacaaacacctgtgccaagacctgagcttctgccaggacctgtcatcctccctccattcggacagctcctacccaccggatgcgggcctgtctgacgacgaggagcctcccgatgccagcctgcctcctgacccgccaccccttactgtgccccagacgcacaatgcccgtgaccagtggctgcaggatgccttccacatcagcctctgaagggctggggggcagggggcatgcacccatgcaaaaggctcagaaactccccctccggcaagccctcagacttcggagcctgcgccttcccccctaccgcctcacctcacaggagggccaggcatgtattcctcagaggcgaaactgccaaactctttctcctgtcttgggttggctggcactggggcgggcatctagggtacagcctctgctcatggcactgggcctccagttcttccacatgtgtgcacccccagcttggccaaccctcagccttgcggtggggcccgaagcatcttcccttccgcttggcgtctctgggattgggatgagtgcctggctcccatctcctcctcaccttttgttgctatcggcagctgctggctcaggggcatcccacctccgggctctgggttcctctgccctggaagggctccaggacccgtcccaataaccacccacggccaggagggccaaggccccgtgctggatatttaaatttaggggccggtctccagggcgcgtagataaataaatacactcagcgtcgt

SEQ ID NO: 132992 - DNA, 1519 bp, Homo sapiens
  Payload ID: 5991
  Gene Symbol: FAM9A
  Gene Name: family with sequence similarity 9, member A
  Uniprot ID: Q8IZU1
  ENST ID: ENST00000381003
  CDS Start-End: 112-1110
catttttctaagagagcgtcgtggtgccagtgcctgcaggttctgtgaggaagcggcatcaggggtccctcaggttcagggatcgcctctaacttcccaggacagccaaccatggagcccgtgggcaggaagcgcagcaggaaggctgccaaagctcagttggaagctcaagttacggccgcccagggggccacgaaagaaggttcagggatcgcctctaacttcccaggacagccaaccatggagcccgtgggcaggaagcgcagcaggaaggctgccaaagctcagttggaagctcaagttagggccgccccggcgaagaagcacacaggaaaggatccagtccgtgatgaatgtgaggaaagaaacccttttacagaaacaagggaggaagatgtaactgatgagcatggggaaagagaaccttttgctgaaaaagatgaacacacggggattcataccatgaagctagaacatattgcagctgacattaaaaagggccttgctgcaaaaagagaaatgataaaaatagataaagcagcttacaggaaaaccaagaacacaattgaacgtgctttgaaaaaaaaacaactaaaaaggcagaaacgtgattatagacatactcggaagttgctgaatgtccttaaagaatacatcgcagagaagcagaaagatgatgaagcagaagaagcagaagccgcagcagcagcagcagaagccgcagcagcagcagaagccgcagcagcagcagcagaagtaatagtagtagaagacgaagaggaggaagagaaggaggaggaggaggagaaagaagaggaggaagaagaaggagaagaagaaggaggaggagaagaaggagaagaaggaggaggaggaggagaaggagaagaaacagaagaagaggaagaggaagaagaagaagaggaagaggaagaacaaattaaagcatttcaagaaaaacagaagaggtggcaacaacctacaggtgttaggagctggaggctgagagagatgaagccgctacttgagcaattactaaaggctgccaaggacactaaagacaattattgcatcatttcttccagtgaagaaagtgaacttgataactagccgtgtttttaaaaagaatcgtgtcagaactcttttggaagagttggcacttcattgtctcttcaacctctgttattctgatgactgaagaaagaacttgaacctatgttatatgatacgagcacaacttgagctacagtaaactacatgacagtgttttgataattgttgtataaatcggtatagctcctctgtcacttgtctgttaaatgccagacctcgtttctatgatctgttgaatgaatcctagacacttctgtgagaaggcagggattgcacagttatgtacatggtcaattaaattttaacattaaagataatttagatttcagttcacctctgtggatctgtatcagtttcaaaaacgtagaaagcacgggcatagaaaagtacatttttctctaataaa

SEQ ID NO: 132993 - DNA, 1544 bp, Homo sapiens
  Payload ID: 5991
  Gene Symbol: FAM9A
  Gene Name: family with sequence similarity 9, member A
  Uniprot ID: Q8IZU1
  ENST ID: ENST00000543214
  CDS Start-End: 137-1135
gaggaagcggcatcaggggtccctcaggtgaagcgctcgcggtggggaggcaggaagtcgagcatgcggccctctcgcaaccagggtgtgaagcgcaggttcagggatcgcctctaacttcccaggacagccaaccatggagcccgtgggcaggaagcgcagcaggaaggctgccaaagctcagttggaagctcaagttacggccgcccagggggccacgaaagaaggttcagggatcgcctctaacttcccaggacagccaaccatggagcccgtgggcaggaagcgcagcaggaaggctgccaaagctcagttggaagctcaagttagggccgccccggcgaagaagcacacaggaaaggatccagtccgtgatgaatgtgaggaaagaaacccttttacagaaacaagggaggaagatgtaactgatgagcatggggaaagagaaccttttgctgaaaaagatgaacacacggggattcataccatgaagctagaacatattgcagctgacattaaaaagggccttgctgcaaaaagagaaatgataaaaatagataaagcagcttacaggaaaaccaagaacacaattgaacgtgctttgaaaaaaaaacaactaaaaaggcagaaacgtgattatagacatactcggaagttgctgaatgtccttaaagaatacatcgcagagaagcagaaagatgatgaagcagaagaagcagaagccgcagcagcagcagcagaagccgcagcagcagcagaagccgcagcagcagcagcagaagtaatagtagtagaagacgaagaggaggaagagaaggaggaggaggaggagaaagaagaggaggaagaagaaggagaagaagaaggaggaggagaagaaggagaagaaggaggaggaggaggagaaggagaagaaacagaagaagaggaagaggaagaagaagaagaggaagaggaagaacaaattaaagcatttcaagaaaaacagaagaggtggcaacaacctacaggtgttaggagctggaggctgagagagatgaagccgctacttgagcaattactaaaggctgccaaggacactaaagacaattattgcatcatttcttccagtgaagaaagtgaacttgataactagccgtgtttttaaaaagaatcgtgtcagaactcttttggaagagttggcacttcattgtctcttcaacctctgttattctgatgactgaagaaagaacttgaacctatgttatatgatacgagcacaacttgagctacagtaaactacatgacagtgttttgataattgttgtataaatcggtatagctcctctgtcacttgtctgttaaatgccagacctcgtttctatgatctgttgaatgaatcctagacacttctgtgagaaggcagggattgcacagttatgtacatggtcaattaaattttaacattaaagataatttagatttcagttcacctctgtggatctgtatcagtttcaaaaacgtagaaagcacgggcatagaaaagtacatttttctctaataaa

SEQ ID NO: 132994 - DNA, 1340 bp, Homo sapiens
  Payload ID: 5992
  Gene Symbol: FAM9B
  Gene Name: family with sequence similarity 9, member B
  Uniprot ID: Q8IZU0
  ENST ID: ENST00000327220
  CDS Start-End: 366-926
aggaagtcctgcctgcagctctcacgagaactgaggacccgttttctttacttttctttttttttgtttttttgttttgttttttttgggacggagtctggctcttgctgcctaggctgcagtgcagtggtgtgatctgggctcactgcaacctccgcctcctgggttcaagcaattctcctgcctcagcttcctgagaggacccgttttctaagaggtcctagtggtgccgctgcctgcaggttctttgagggcgccacatcaggggtccctcaggttcggggatcgcctctagcttcccaggacaaccagccacggatcctgtgggcaggagggctgccaaggcccagttggaggctcaatttatggcggcctgggggaagaagcatgcaggaaaggatccagtccgtgatgaatgtgaggaaagaaaccgttttacagaaacaagggaggaagatgtaactgatgagcatggggaaagagaaccttttgctgaaacagatgaacacacgggggctaataccaagaagccagaagatactgcagaggatcttactgcaaaaagaaaaaggatgaaaatggataaaacttgcagcaaaacaaagaacaaaagtaaacatgctttgagaaaaaagcaacttaaaaggcagaaacgtgattatatacattctctgaagttgctaaatgtccttgaagaatacatcacagacgagcagaaagaggaagaagaagaagagggagaagaggaagaactaattagaatatttcaagaacaacagaagaagtggcaacaatatagaagtgttaggagagagaggctgaaagagatgaagctgctacgtgaccaattcgtaaaggctcttgaggactttgaagacctttgtgacagagttttttccgatgaagacagtgaacttgataactagacatgtttttaaataaaatcatgtcagaactcttttggaaaagttggcacttacccagttgtctcttcaacctctgttattctgatgactgaagaaagaacttgaacctatgttatatgatacaagcacaacttgagctacagtaaactacatgacagtgttttgataattgttgtataaatcggtatagctcctctgtcactcgtctgttaaatgccagacctcgtttctatgatctgttgaatgaatcctagacacttctgtgagaaagcagggattgcatagttatgtacacggtcaattaaattttaacattaaagataatttagatttcgatttggcctctgtggatttgtatcagttccaaaaatgtagaaagcacaggcatagaaaagtacatttttctctaataaa

SEQ ID NO: 132995 - DNA, 2047 bp, Homo sapiens
  Payload ID: 5992
  Gene Symbol: FAM9B
  Gene Name: family with sequence similarity 9, member B
  Uniprot ID: Q8IZU0
  ENST ID: ENST00000362066
  CDS Start-End: 190-870
gcagaggccgtggagttcaggtgtgaggggcagctgtgagctttgcagccagccccggggacgggctggacgggccaggacaggaggggacactggcatcttttccgtcccttcctgctcccacatgagacccagggcgggccagccccacccttcttgaacctgtgatcccaatggctttcctttccgatgccaggtttccttagcttccttagtgtgtctttgcgctcaccaggttcggggatcgcctctagcttcccaggacaaccagccacggatcctgtgggcaggagggctgccaaggcccagttggaggctcaatttatggcggcctgggggaagaagcatgcaggaaaggatccagtccgtgatgaatgtgaggaaagaaaccgttttacagaaacaagggaggaagatgtaactgatgagcatggggaaagagaaccttttgctgaaacagatgaacacacgggggctaataccaagaagccagaagatactgcagttggtgcaaataatttcaaaaactatcctgtacatattggcgtctctagtgaacaacatattttacttgattgttctctaagtaggcagaaacgtgattatatacattctctgaagttgctaaatgtccttgaagaatacatcacagacgagcagaaagaggaagaagaagaagagggagaagaggaagaactaattagaatatttcaagaacaacagaagaagtggcaacaatatagaagtgttaggagagagaggctgaaagagatgaagctgctacgtgaccaattcgtaaaggctcttgaggactttgaagacctttgtgacagagttttttccgatgaagacagtgaacttgataactagacatgtttttaaataaaatcatgtcagaactcttttggaaaagttggcacttacccagttgtctcttcaacctctgttattctgatgactgaagaaagaacttgaacctatgttatatgatacaagcacaacttgagctacagtaaactacatgacagtgttttgataattgttgtataaatcggtatagctcctctgtcactcgtctgttaaatgccagacctcgtttctatgatctgttgaatgaatcctagacacttctgtgagaaagcagggattgcatagttatgtacacggtcaattaaattttaacattaaagataatttagatttcgatttggcctctgtggatttgtatcagttccaaaaatgtagaaagcacaggcatagaaaagtacatttttctctaataaaagaagacaatatctgctgggtgtggtggctcacgcctgtaatcccagcactttgggaggccgaggggagtggatcacttgaggtcaggagtttgagaccagcctggccaacatggtgaaaccccatctctgctaaaaataccaaaattacccgggcgtggtggcacgcacgtgtagttccagctactcaggaagctgaggcaggaggatctcttgaacccgggagttggaggttgcagtaagccaagattgtgccactgcactccagcctgggcgacagagcaagactctttctcagaaaacaagaagaagaagacaaaagctatcttatctgtgcgttcttttgtatttactcattaggataaagaggcaattccaatgaaagtaggacttcaaaaaatagatatactctatggccatatcaaaattattaaaagcaccttactgtctgtgttcttaaaaaaaattatactgctgtaaatgattaaggcaactgagcaagatatattaatatcagtgctgagccactggtttgtgggtatgtcatttccacagacatcaaaatgctatttagtttgttttggtccatcattcaatgatacctccccttagaattgaatgaaagcattttgttaacatttatgtatgcttacaattatttcacatctgtggcaaggtaaattttgtagagtgctttgtttatccagtttaatattcgtggattatgtggaagtttatatggacatctaaaaacttgaatgatg

SEQ ID NO: 132996 - DNA, 1064 bp, Homo sapiens
  Payload ID: 5992
  Gene Symbol: FAM9B
  Gene Name: family with sequence similarity 9, member B
  Uniprot ID: Q8IZU0
  ENST ID: ENST00000428477
  CDS Start-End: 90-650
gttcggggatcgcctctagcttcccaggacaaccagccacggatcctgtgggcaggagggctgccaaggcccagttggaggctcaatttatggcggcctgggggaagaagcatgcaggaaaggatccagtccgtgatgaatgtgaggaaagaaaccgttttacagaaacaagggaggaagatgtaactgatgagcatggggaaagagaaccttttgctgaaacagatgaacacacgggggctaataccaagaagccagaagatactgcagaggatcttactgcaaaaagaaaaaggatgaaaatggataaaacttgcagcaaaacaaagaacaaaagtaaacatgctttgagaaaaaagcaacttaaaaggcagaaacgtgattatatacattctctgaagttgctaaatgtccttgaagaatacatcacagacgagcagaaagaggaagaagaagaagagggagaagaggaagaactaattagaatatttcaagaacaacagaagaagtggcaacaatatagaagtgttaggagagagaggctgaaagagatgaagctgctacgtgaccaattcgtaaaggctcttgaggactttgaagacctttgtgacagagttttttccgatgaagacagtgaacttgataactagacatgtttttaaataaaatcatgtcagaactcttttggaaaagttggcacttacccagttgtctcttcaacctctgttattctgatgactgaagaaagaacttgaacctatgttatatgatacaagcacaacttgagctacagtaaactacatgacagtgttttgataattgttgtataaatcggtatagctcctctgtcactcgtctgttaaatgccagacctcgtttctatgatctgttgaatgaatcctagacacttctgtgagaaagcagggattgcatagttatgtacacggtcaattaaattttaacattaaagataatttagatttcgatttggcctctgtggatttgtatcagttccaaaaatgtagaaagcacaggcatagaaaagtacatttttctctaataaa

SEQ ID NO: 132997 - DNA, 1533 bp, Homo sapiens
  Payload ID: 5992
  Gene Symbol: FAM9B
  Gene Name: family with sequence similarity 9, member B
  ENST ID: ENST00000472522
  CDS Start-End: 493-765
cgtgagtcaaagccccctgaggcttccccagaagcagatgctggagctatgtttcctgtacagcctgcagaactgtgagccagctgaacctcttttcttataaattaccagttgcaggtgttttttcgtaacaatgcaagaacactctaatacaatgggtcatggggtaggtttttagcttttgaagaaactcggacttttttccaaactgattgtaccattttacactcctaccaacatgcatgcctgagattcgagttgccccaattcctcaacgtcatttggtattgtcggtcttcaatttttgtcatctggcagatggagttattgccatggtgttaggacaagctgattgtgttaaagcatgtgacacacctaatttcagaaaccagaggggaaatcgccgctcattaaagttcaaggaacatatcctggaggcttagtgaaaccagctctctcttcccatcaaatgagaagtctctgtgtcttcaaatgaaagccaagaaagcacaccccagagtcgaatacaacaaaacatcaggcaatgcctttgaagagcagttttctttgccaaccaaggttcggggatcgcctctagcttcccaggacaaccagccacggatcctgtgggcaggagggctgccaaggcccagttggaggctcaatttatggcggcctgggggaagaagcatgcaggaaaggatccagtccgtgatgaatgtgaggaaagaaaccgttttacagaaacaagggaggaagatgtaactgatgagcatggggaaagagaaccttttgctgaaacagatgaacacacgggggctaataccaagaagccagaagatactgcagaggatcttactgcaaaaagaaaaaggatgaaaatggataaaacttgcagcaaaacaaagaacaaaagtaaacatgctttgagaaaaaagcaacttaaaaggcagaaacgtgattatatacattctctgaagttgctaaatgtccttgaagaatacatcacagacgagcagaaagaggaagaagaagaagagggagaagaggaagaactaattagaatatttcaagaacaacagaagaagtggcaacaatatagaagtgttaggagagagaggctgaaagagatgaagctgctacgtgaccaattcgtaaaggctcttgaggactttgaagacctttgtgacagagttttttccgatgaagacagtgaacttgataactagacatgtttttaaataaaatcatgtcagaactcttttggaaaagttggcacttacccagttgtctcttcaacctctgttattctgatgactgaagaaagaacttgaacctatgttatatgatacaagcacaacttgagctacagtaaactacatgacagtgttttgataattgttgtataaatcggtatagctcctctgtcactcgtctgttaaatgccagacctcgtttctatgatctgttgaatgaatcctagacacttctgtgagaaagcagggattgcatagttatgtacacggtcaatta

SEQ ID NO: 132998 - DNA, 3361 bp, Homo sapiens
  Payload ID: 5993
  Gene Symbol: FAM9C
  Gene Name: family with sequence similarity 9, member C
  Uniprot ID: Q8IZT9
  ENST ID: ENST00000333995
  CDS Start-End: 132-632
gaggagcttcgcggtgccagcctctgcaggtcctctgagggagcaacatcagggctccctcaggttcagaggtcgcctctagcttcccaggccagtcagccacggagcccgtgggcaggaagggcagcaggatggctgccaaggaccagttggaggttcaagttatggccgcccaggaaatggagcttgcaggaaaggatccagtaagtcatgagcatgaggaaagaaaacctgttacagagacaaaggagggagatgtaactgatgagcatggggaaagaggatcttttgctgaaacagatgaacacacgggggttgataccaaggagctagaagatattgcagctgacattaaagagcatcttgctgcaaagagaaaaaggattgaaaagattgcaaaagcttgcagcgaaataaagaacagaattaaaaatgttttgagaacaacacaactaaaaaggcagaaacgtgattatagaatttctctgaagttgccgaatgtccttgaagagttcatcacagatgagcagaaagatgaggaaggagatggagaaaaggaagaacaaattaaaatatttcaagagcaacaaaagaggtggcaacaagatgggaaaggaactgaaagagattgagccaccacacgagcaattcacaaaggtctgttctatttggtaacacaatacgttcttataaaatacaacacatgcataaaaatagaagacaatctgcttgtttctgaatgtatggaaagacattttggttatacattttaaattacttaccattttcactttgaatgtgttgttccagatttaacataagtagtaaataacataaaataacataaaacagtatttttaggattcatgaatagttttgtaggagttatttagaacaggaaaaggtaaattggaaattttacctagaaatatacatcttgtgtataaaaattgataccttatgaacacattaatgaagactttattttcagtttttaggagatcagcgacaaatctttagtggaaggcagaaagtccataagtcctttctggatgtcttttttacttgtgttgtttcaagagttttagttaaataggaagtaggcaaatgtaactactgagtatctcttttgttttctgctgtaatgtaggagtgttttatggcatattcactttcaaaattattagtgactagtaatggttttacatgacaatttgtaatcataagagatggttcagatgtataacagaatgggaaagccagcagattattaacatgttgtgaattgtgaattatctgctgtcgtacagcacattagcaaattgtcatcggacaatgaccgcttcttcatgtagatgtatattatttaggaagcaatggaattcccttctgggaggtaagatattctttttaataaccttgtggaaagacatgttcatatgtcactcctctacactaactgagatgtgttaaataaactgggaaaagagtttgaaaatagaattttcaagcaactcaaagattatctatacacaaaacggttatttatatagaagtcacaagtagagaacatgttgctataatgttccccagaaaccatttattaattggtatgaacatgagactagaaaagttttcctgtcaatgttaatgctacatgttaccacttagggtaggaacttcggtatcatcttggactcttctgagtccattatctttcacatacagttttcatgaggcaagttttactctgcaatggtccttaaatttcttttttttaaattgccactgaggcaaccctagttcaagaactcattcttccttgcttgtactattaaactcttttctgagttctctcttctcttctgagccacccttcattgatcagaaatactatcttcctaaaactcttcccttcctaaaatgcttctagcccttcactcttcccagcctatcagtggtatccacatgtcagttcttagatattcagagactctcccctttacatgaccccctcttaggcttgttttactgccttctgtctttcttcccgcctctccaggttgacagccttctctgaacgacctctccattactctcatgctttgctcatgctcttccctcacaatgcttttaaagtccttttttttttttgatcgattgaaatcttttgccaactaagtggacatcagtctccatttttggctacatgtccgagtgagttgctcttccacagcagttacataagttttgtattattttttttattcgtgcatatttgctcatgtcacaggaatatggaagagattgtgtattcattttttacatcttcctcagcattaacataccactttttagggagtaggaactgttgaactatttgttgagagaatagtatatatttcaaacatagttatgttttctctaacttgatgaggtcatgtcacagaccattttatcccttcagtggaaaccatgttatgtcgactattagtgataacaaatgggtcactatctggtgaaaaaatatggtatttcatgatctaagactaccagtctttttctgtttttgctccatcttgaccataacatattcatcaaaccattttcttcaagcaaagtacatgactgttggacctgctataataatatttcactaaaatctggcattaaaaattttaagtatttggagctccatgtactgattacagtttttaaatttgaaataaatgaccagcatcctttgaatattaaaagctgtttccttttgacatttaatttactctctttaaaatgtgagttgtaaagtgatggtttgtcagtgaactagactttttgttttagagtgtgaggacttggaagagtataatgaaagccctctttttggtgaagagagtcaacttaaaaaataaattgccatgttccaaaataatattgtggtaattgtaagtagtgcatattttatcttaaaaactcaggattgatgtaagcactggaatattttatttgtagaaatgtgtatcgcaattacttaaatttatttttttgaaacagctgcagcaagagttggcacttattcagatgtatcttcaacctctgttattctggtgactgacaaaagaacttgaacctatgttatatgatacatgcataacttgagctacactaaaccacatgacagtgtttagttaattcttgtataaattagtatatctcttctattattagtctgtttgttaaatgccagaccacgtttctatgatctgttgaatgaaccctagacagttctgtgagaaagcagcaattgcacagttacatacacagtcaattaaattttaacattaaagataatttagtttta

SEQ ID NO: 132999 - DNA, 1122 bp, Homo sapiens
  Payload ID: 5993
  Gene Symbol: FAM9C
  Gene Name: family with sequence similarity 9, member C
  Uniprot ID: Q8IZT9
  ENST ID: ENST00000380625
  CDS Start-End: 211-711
ctgggccgaccaatcagcgaggagcgcgggcagccggggcggctgctgctctcgtgagaacagaggacccaggccctcggaggagcttcgcggtgccagcctctgcaggtcctctgagggagcaacatcagggctccctcaggttcagaggtcgcctctagcttcccaggccagtcagccacggagcccgtgggcaggaagggcagcaggatggctgccaaggaccagttggaggttcaagttatggccgcccaggaaatggagcttgcaggaaaggatccagtaagtcatgagcatgaggaaagaaaacctgttacagagacaaaggagggagatgtaactgatgagcatggggaaagaggatcttttgctgaaacagatgaacacacgggggttgataccaaggagctagaagatattgcagctgacattaaagagcatcttgctgcaaagagaaaaaggattgaaaagattgcaaaagcttgcagcgaaataaagaacagaattaaaaatgttttgagaacaacacaactaaaaaggcagaaacgtgattatagaatttctctgaagttgccgaatgtccttgaagagttcatcacagatgagcagaaagatgaggaaggagatggagaaaaggaagaacaaattaaaatatttcaagagcaacaaaagaggtggcaacaagatgggaaaggaactgaaagagattgagccaccacacgagcaattcacaaagctgcagcaagagttggcacttattcagatgtatcttcaacctctgttattctggtgactgacaaaagaacttgaacctatgttatatgatacatgcataacttgagctacactaaaccacatgacagtgtttagttaattcttgtataaattagtatatctcttctattattagtctgtttgttaaatgccagaccacgtttctatgatctgttgaatgaaccctagacagttctgtgagaaagcagcaattgcacagttacatacacagtcaattaaattttaacattaaagataatttagttttaggtttggcctctgtggatctgtatcagttccaaaatgtggaaagcacgggcatggaaaagtacatttttctctaataaa

SEQ ID NO: 133000 - DNA, 472 bp, Homo sapiens
  Payload ID: 5993
  Gene Symbol: FAM9C
  Gene Name: family with sequence similarity 9, member C
  ENST ID: ENST00000438997
  CDS Start-End: 1-380
gagatgtaactgatgagcatggggaaagaggatcttttgctgaaacagatgaacacacgggggttgataccaaggagctagaagatattgcagctgacattaaagagcatcttgctgcaaagagaaaaaggattgaaaagattgcaaaagcttgcagcgaaataaagaacagaattaaaaatgttttgagaacaacacaactaaaaaggcagaaacgtgattatagaatttctctgaagttgccgaatgtccttgaagagttcatcacagatgagcagaaagatgaggaaggagatggagaaaaggaagaacaaattaaaatatttcaagagcaacaaaagaggtggcaacaagatgggaaaggaactgaaagagattgagccaccacacgagcaattcacaaaggtctgttctatttggtaacacaatacgttcttataaaatacaacacatgcataaaaatagaagacaa

SEQ ID NO: 133001 - DNA, 5858 bp, Homo sapiens
  Payload ID: 5993
  Gene Symbol: FAM9C
  Gene Name: family with sequence similarity 9, member C
  ENST ID: ENST00000542843
  CDS Start-End: 212-598
actgggccgaccaatcagcgaggagcgcgggcagccggggcggctgctgctctcgtgagaacagaggacccaggccctcggaggagcttcgcggtgccagcctctgcaggtcctctgagggagcaacatcagggctccctcaggttcagaggtcgcctctagcttcccaggccagtcagccacggagcccgtgggcaggaagggcagcaggatggctgccaaggaccagttggaggttcaagttatggccgcccaggaaatggagcttgcaggaaaggatccagtaagtcatgagcatgaggaaagaaaacctgttacagagacaaaggagggagatgtaactgatgagcatggggaaagaggatcttttgctgaaacagatgaacacacgggggttgataccaaggagctagaagatattgcaggtatgttttacgagctatttgtggtttatgaaaattgttttcaaccatacaacccttacagtaggttatatgaattagtggatgacaagactgtcttaaatgccttcttctcatatatagcatttaatgtaatctgtttaataatttttcttacttacttttttaattgttgatgtggaatgtgagaatgcttctaataatggtgaagcaagaggggtggcttttctttcatacacgtggaaatttaattgtttgggggatattagaggacattggaggagaaacagctctattcgttcctttcagtgtacacacattaagtcatatatcaggtttttttttagcttttactttatgtttgggggtacatgtgcaggttcgttatatagataaattgcgtgtcacaggggtttggtatacagattattttgtcacccagattataagcatcgtacctgatgggtggttttccatcctcaccttcctcctaccctccaacctcaagtaggcccaggtgtgtgttgttcacctcttcctgtccgtatgtactcagtttttaatatgagtttttcatcttcctaatttagctattgtcacaactttctaattttgttttctttaaagtaccagagaaaattgaattctctaaaatgatgattttctattattattccagtaacaagctgtgtagtagaaaaggaaagacaacttttctacccagtgagaagcatacaattggatccaaaaactcataaactttatattgccatgtgaaatattagttgcactgttatgggaccatattttcaaaaaagtttgagaaaatttctgtagagattatgaagacaatactcttatttttaaaaagcttactttagttttcagctcttctatagcgataattcatataagcagtatatttggaaagctttgctctgcttggtggtgacaaagtgccggttttgtctaatacaatgagcattatagatggatactgtatgtaaaaaaatttgtattatggtgcagctcttttatgattgctcaaaactattctcagcaattgatggtagatctctcatgtgaaaccatgtttaggaaagcattccttgcagtattacagttttctgaaacactgcactgtggataaaaatgtcatataaaaagctctcagaaaatatttcaaatgtgttttgaatgtatttatctatttaaacctaaatgtttacacccatggacattgcttcttttattaaaatatagttaatagcatcaactattgattaaaaatactttctttattgtgtattaagttatttctacccttttgatggtcttattaaatcagatacttttttgtgctttacataatgagttgtgacagtatttcacggaaacatgtcctttgaattgtaggacattttataaatgtagaaattaaagtctgtggctgggcacggttgctcacacctgtaatcccagcactttgggaggccgaggtgggtggatcacgaggtcaggagatcaagaccatcctggctaacacggtgaaaccccgtctccactaaaaatataaaaattagccgggcgtggtggcgggcgcctgtagtcccagctactcgggaggctaaggcaggagaatggcgtgaacccgggaggcggaggctgcagtgagccaagatcgtgccacagcactccagcctgggtgacagagcgagactctgtctcaaaaaaaaaaaaaaagaaattaaagtctgtgtttgtaaccctttctgcacacttaaaaaatagaaacttttaattatttgctttttttcattatctgtcaattaagtgatttgctgttataccaactgaaattggaatactaatacctgaaaggttttacataaagtaagtaaatcttgctttttgaaatgatctttgcattttacattttaaatgtccttctgatattgctgaaccatcaagtcccatattgattttaatatatgcaaagaaactacttttcaacatgaacatttaatgcatattcatttactatctagctgacattaaagagcatcttgctgcaaagagaaaaaggattgaaaagattgcaaaagcttgcagcgaaataaagaacagaattaaaaatgttttgagaacaacacaactaaaaaggtatgattgttggcttttttgaataatgatatttatatcatttctttgtattcattggtgcaaataatttccagaactatcctgtacatattggtgtctctagggaacaacatattttacttgattgttccctaaacaggtaagtttctttagttttataacctcaatttaacagaattgagagatattacctagaagccaatgaagatgacctctttttgccttccagataaaaagtcttcctgtaaaattaatgtttatccatttctagaaatacggcagaaacgtgattatagaatttctctgaagttgccgaatgtccttgaagagttcatcacagatgagcagaaagatgaggaaggagatggagaaaaggaagaacaaattaaaatatttcaagagcaacaaaagaggtggcaacaagatgggaaaggaactgaaagagattgagccaccacacgagcaattcacaaaggtctgttctatttggtaacacaatacgttcttataaaatacaacacatgcataaaaatagaagacaatctgcttgtttctgaatgtatggaaagacattttggttatacattttaaattacttaccattttcactttgaatgtgttgttccagatttaacataagtagtaaataacataaaataacataaaacagtatttttaggattcatgaatagttttgtaggagttatttagaacaggaaaaggtaaattggaaattttacctagaaatatacatcttgtgtataaaaattgataccttatgaacacattaatgaagactttattttcagtttttaggagatcagcgacaaatctttagtggaaggcagaaagtccataagtcctttctggatgtcttttttacttgtgttgtttcaagagttttagttaaataggaagtaggcaaatgtaactactgagtatctcttttgttttctgctgtaatgtaggagtgttttatggcatattcactttcaaaattattagtgactagtaatggttttacatgacaatttgtaatcataagagatggttcagatgtataacagaatgggaaagccagcagattattaacatgttgtgaattgtgaattatctgctgtcgtacagcacattagcaaattgtcatcggacaatgaccgcttcttcatgtagatgtatattatttaggaagcaatggaattcccttctgggaggtaagatattctttttaataaccttgtggaaagacatgttcatatgtcactcctctacactaactgagatgtgttaaataaactgggaaaagagtttgaaaatagaattttcaagcaactcaaagattatctatacacaaaacggttatttatatagaagtcacaagtagagaacatgttgctataatgttccccagaaaccatttattaattggtatgaacatgagactagaaaagttttcctgtcaatgttaatgctacatgttaccacttagggtaggaacttcggtatcatcttggactcttctgagtccattatctttcacatacagttttcatgaggcaagttttactctgcaatggtccttaaatttcttttttttaaattgccactgaggcaaccctagttcaagaactcattcttccttgcttgtactattaaactcttttctgagttctctcttctcttctgagccacccttcattgatcagaaatactatcttcctaaaactcttcccttcctaaaatgcttctagcccttcactcttcccagcctatcagtggtatccacatgtcagttcttagatattcagagactctcccctttacatgaccccctcttaggcttgttttactgccttctgtctttcttcccgcctctccaggttgacagccttctctgaacgacctctccattactctcatgctttgctcatgctcttccctcacaatgcttttaaagtccttttttttttttgatcgattgaaatcttttgccaactaagtggacatcagtctccatttttggctacatgtccgagtgagttgctcttccacagcagttacataagttttgtattattttttttattcgtgcatatttgctcatgtcacaggaatatggaagagattgtgtattcattttttacatcttcctcagcattaacataccactttttagggagtaggaactgttgaactatttgttgagagaatagtatatatttcaaacatagttatgttttctctaacttgatgaggtcatgtcacagaccattttatcccttcagtggaaaccatgttatgtcgactattagtgataacaaatgggtcactatctggtgaaaaaatatggtatttcatgatctaagactaccagtctttttctgtttttgctccatcttgaccataacatattcatcaaaccattttcttcaagcaaagtacatgactgttggacctgctataataatatttcactaaaatctggcattaaaaattttaagtatttggagctccatgtactgattacagtttttaaatttgaaataaatgaccagcatcctttgaatattaaaagctgtttccttttgacatttaatttactctctttaaaatgtgagttgtaaagtgatggtttgtcagtgaactagactttttgttttagagtgtgaggacttggaagagtataatgaaagccctctttttggtgaagagagtcaacttaaaaaataaattgccatgttccaaaataatattgtggtaattgtaagtagtgcatattttatcttaaaaactcaggattgatgtaagcactggaatattttatttgtagaaatgtgtatcgcaattacttaaatttatttttttgaaacagctgcagcaagagttggcacttattcagatgtatcttcaacctctgttattctggtgactgacaaaagaacttgaacctatgttatatgatacatgcataacttgagctacactaaaccacatgacagtgtttagttaattcttgtataaattagtatatctcttctattattagtctgtttgttaaatgccagaccacgtttctatgatctgttgaatgaaccctagacagttctgtgagaaagcagcaattgcacagttacatacacagtcaattaaattttaacattaaagataatttagttttaggtttggcctctgtggatctgtatcagttccaaaatgtggaaagcacgggcatggaaaagtacatttttctctaataaaagaagacaaaccctt

SEQ ID NO: 133002 - DNA, 2342 bp, Homo sapiens
  Payload ID: 5994
  Gene Symbol: FAM90A1
  Gene Name: family with sequence similarity 90, member A1
  Uniprot ID: Q86YD7
  ENST ID: ENST00000307435
  CDS Start-End: 386-1780
atccgggcccttccagaagcaacccaggagccccgagacctgcagggatgtgtgcaccctgacccctgacgcatagccctgcacctgcagccagctggcctcgggcttgaaaacatggcgggtgcgctccaattcacggtggtttccaagcgcattctggaggagaaaacacatgagtgtgtggtcagggttctctgctgacagacctaccgtggggaagaaagagaagctctgaagatggatcatggccgtgactgcatgtcaaggagaatctccatgatgacacggaggcctacgtcgagatagagtaaatatggtccaattaaaaggtgacccgacaatcaacccctgaaaaaggcggtcataaaacccccaggagacgaagatgatggcacgtcgtgaccccaaacctggggcaaagagactggtgagagcccagaccctccagaagcagcggagggccccagttgggccaagggctcccccgcccgatgaagaagatcccaggctcaagtgcaaaaactgtgaggcctttggccacacggccagaagtaccaggtgccccatgaagtgctggaaggcagccctggttccaccgaactttggggaaaaggaagggaaggaaaacctgaaaccatggaagccccaggttgaagcgaaccctgggcccttgaacaaggataagggagagaaggaagagagaccaaggccacaagacccgcagaggaaggctctcctccacatattttccaggaaacctccagagaagccgctgccaaatcaaaaaggatccacggaatcttctgattatctgagggttgcaagcgggccaatgccggtccacacaaccagtaagaggccgcgtgtggaccctgtcctctctgatcgctcagctaccgaaatgtctgacaggggctccgtcttagcttcactgtctcccctcagaaaagccagtctgagctcctcctcaagtcttggaccaaaggaaagacagacaggggctgcggccgacatccctcagactgcagtcaggcaccagggccccgagcctctcctcgtggtgaagccgacacacagcagccctgcgggtggctgtcgagaagttccccaggctgcctccaaaacccacggcctgctccaggccgtcagcccccaggcacaagacaaacgtcctgcggtgacctcacagccctgcccaccagccgccacacacagcttgggcctaggctccaatctcagcttcgggccaggagccaagagatctgccccggctccgattcaggcttgcctgaacttccccaagaaaccgagactgggtcccttccagatccccgaaagcgccatccagggaggtgagctgggggccccggagaatctccaacctccgccagccgcaaccgaacttggaccacgtacgtcaccccagacaggcacgaggacacccgcccaggtgcttagcggcgaccggcagcctccgcacagcagaccttgcctgcctactgcccaggcctgcaccatgtcccatcacccagcggccagccatgatggggcccagcctctcagagtgctctttcggagactggaaaacggacgctggagctccagcctgctgacggccccctcatttcactctcctgagaagccgggagccttcctcgctcagagccctcatgtctcagagaagtctgagggtccctgtgttcgtgtcccaccaagcgtcctctatgaggaccttcaggttccctcctcctcagaggacagcgattctgacctggagtgagactgcaggtggcaggggctccttggcctccagctcccgtgacttggaggggactgtgggactgaggagcacagagcagagagcagactctgtgcggtgactccgaagctccccggctgtggcccttctgtggatgtgggagcccaggccaggcagggagcagatgcagggactctgccacgttgaattctggtgagggacattgtagttcgcatggttctctggaaacgcgccaggaaaagcttccgtgccagtgattcgttgcctcagaaactgcatgacgcgcaggagtcagacttccgctgggacgtcaataggaaacgggggaattactgtgtatttgctctctagacgactgaataagggaaaagttagggaaccctgagaggtgcagcccttccgctgtgccccgccctgagagcagtgtttcggacgctgggaagcgcgctgtgcaaagcgctctcggggtctttcctcagcctcgaaaagtgggctctggaatccctttgtaaataggtgtgttgaatttgttttgaagtgaataaaattctcaaaaagatga

SEQ ID NO: 133003 - DNA, 592 bp, Homo sapiens
  Payload ID: 5994
  Gene Symbol: FAM90A1
  Gene Name: family with sequence similarity 90, member A1
  ENST ID: ENST00000442295
  CDS Start-End: 551-592
agaagcaacccaggagccccgagacctgcagggatgtgtgcaccctgacccctgacgcatagccctgcacctgcagccagctggcctcgggcttgaaaacatggcgggtgcgctccaattcacggtggtttccaagcgcattctggaggagaaaacacatgagtgtgtggtcagggttctctgctgacagacctaccgtggggaagaaagagaagctctgaagatggatcatggccgtgactgcatgtcaaggagaatctccatgatgacacggaggcctacgtcgagatagagtaaatatggtccaattaaaaggttagggtacgttccacgtcaggtgaccagaggcagtataaaaggcagcctggaaagcagaggtccctctctgccccttcctccgtcttcctggatgctgcatcgcttccagcggggctgctccagcacctgcccatctcagcgccagccggggaaagaaagtagacgtgtaatttcaggtgacccgacaatcaacccctgaaaaaggcggtcataaaacccccaggagacgaagatgatggcacgtcgtgaccccaaacctggggcaaagagactg

SEQ ID NO: 133004 - DNA, 2513 bp, Homo sapiens
  Payload ID: 5994
  Gene Symbol: FAM90A1
  Gene Name: family with sequence similarity 90, member A1
  Uniprot ID: Q86YD7
  ENST ID: ENST00000538603
  CDS Start-End: 560-1954
agctccagtcaggccccatccgggcccttccagaagcaacccaggagccccgagacctgcagggatgtgtgcaccctgacccctgacgcatagccctgcacctgcagccagctggcctcgggcttgaaaacatggcgggtgcgctccaattcacggtggtttccaagcgcattctggaggagaaaacacatgagtgtgtggtcagggttctctgctgacagacctaccgtggggaagaaagagaagctctgaagatggatcatggccgtgactgcatgtcaaggagaatctccatgatgacacggaggcctacgtcgagatagagtaaatatggtccaattaaaaggtgaccagaggcagtataaaaggcagcctggaaagcagaggtccctctctgccccttcctccgtcttcctggatgctgcatcgcttccagcggggctgctccagcacctgcccatctcagcgccagccggggaaagaaagtagacgtgtaatttcaggtgacccgacaatcaacccctgaaaaaggcggtcataaaacccccaggagacgaagatgatggcacgtcgtgaccccaaacctggggcaaagagactggtgagagcccagaccctccagaagcagcggagggccccagttgggccaagggctcccccgcccgatgaagaagatcccaggctcaagtgcaaaaactgtgaggcctttggccacacggccagaagtaccaggtgccccatgaagtgctggaaggcagccctggttccaccgaactttggggaaaaggaagggaaggaaaacctgaaaccatggaagccccaggttgaagcgaaccctgggcccttgaacaaggataagggagagaaggaagagagaccaaggccacaagacccgcagaggaaggctctcctccacatattttccaggaaacctccagagaagccgctgccaaatcaaaaaggatccacggaatcttctgattatctgagggttgcaagcgggccaatgccggtccacacaaccagtaagaggccgcgtgtggaccctgtcctctctgatcgctcagctaccgaaatgtctgacaggggctccgtcttagcttcactgtctcccctcagaaaagccagtctgagctcctcctcaagtcttggaccaaaggaaagacagacaggggctgcggccgacatccctcagactgcagtcaggcaccagggccccgagcctctcctcgtggtgaagccgacacacagcagccctgcgggtggctgtcgagaagttccccaggctgcctccaaaacccacggcctgctccaggccgtcagcccccaggcacaagacaaacgtcctgcggtgacctcacagccctgcccaccagccgccacacacagcttgggcctaggctccaatctcagcttcgggccaggagccaagagatctgccccggctccgattcaggcttgcctgaacttccccaagaaaccgagactgggtcccttccagatccccgaaagcgccatccagggaggtgagctgggggccccggagaatctccaacctccgccagccgcaaccgaacttggaccacgtacgtcaccccagacaggcacgaggacacccgcccaggtgcttagcggcgaccggcagcctccgcacagcagaccttgcctgcctactgcccaggcctgcaccatgtcccatcacccagcggccagccatgatggggcccagcctctcagagtgctctttcggagactggaaaacggacgctggagctccagcctgctgacggccccctcatttcactctcctgagaagccgggagccttcctcgctcagagccctcatgtctcagagaagtctgagggtccctgtgttcgtgtcccaccaagcgtcctctatgaggaccttcaggttccctcctcctcagaggacagcgattctgacctggagtgagactgcaggtggcaggggctccttggcctccagctcccgtgacttggaggggactgtgggactgaggagcacagagcagagagcagactctgtgcggtgactccgaagctccccggctgtggcccttctgtggatgtgggagcccaggccaggcagggagcagatgcagggactctgccacgttgaattctggtgagggacattgtagttcgcatggttctctggaaacgcgccaggaaaagcttccgtgccagtgattcgttgcctcagaaactgcatgacgcgcaggagtcagacttccgctgggacgtcaataggaaacgggggaattactgtgtatttgctctctagacgactgaataagggaaaagttagggaaccctgagaggtgcagcccttccgctgtgccccgccctgagagcagtgtttcggacgctgggaagcgcgctgtgcaaagcgctctcggggtctttcctcagcctcgaaaagtgggctctggaatccctttgtaaataggtgtgttgaatttgttttgaagtgaataaaattctcaaaaaga

SEQ ID NO: 133005 - DNA, 2492 bp, Homo sapiens
  Payload ID: 5995
  Gene Symbol: FAM90A26
  Gene Name: family with sequence similarity 90, member A26
  ENST ID: ENST00000512047
  CDS Start-End: 535-1929
gggcccttccagaagcaacccaggagccctgagacctgcaggggtgtgtgcaccctgaccctgaggcatagccctgcacctgcagccagctggcctagggctgcaaacatggcgtgcggtccaattcacggtggtttccaagcgcctcctggagaagaaaacacatgagggtgtggtcagggatctctgctgacagacttaccttggggaagaaagagaagctcagaagatggatcatggccgtgactgcatgtcaaggagaatctccttgatgacactgaggcccacgtcgagatagagtaaatatggtccaattaaaaggtgaccagaggcagtataaaaggccgcctggaaagtagaggtccctctctgccccttcctccgtcttcctggatgctgcatcgcttccagcggggctgctccagcacctgcccatctcagcgccagccggggaaagaaagtagacgtgtaatttcaggtgacccaaaaatcaacccctgaaaaaggcggtcataaaacccccaggagacgaagatgatggcatgtcgtgaccccaaacctggggcaaagagactggtgagagcccagaccctccagaagcagcggagagccccagttgggccaagggctcccccgcccgatgaagaagatcccaggctcaagtgcaaaaactgtggggcctttggtcacatggccagaagtaccaggtgccccatgaagtgctggaaggcagccctggttccaccgaccttggggaaaaaggaagggaaggaaaacctgaaaccatggaagccccaggttgaagcaaacccggggcccttgaacaaggataagggagagaaggaagagagaccaaggcaacaagacccgcagaggaaggctctcctccacatattttccgggaaacctccagagaagccgctgccaaatcgaaaaggatccacggaatcttctgtttatctgagggttgcaagcgggccaatgccggtccacacaaccagtaagaggccgcgtgtggaccctgtcctcgctgatcgctcagctaccgaaatgtctgacaggggctccgccttggcttcactgtctcccctcagaaaagccagtctgagctcctcctcaagtcttggaccaaaggaaagacagacaggggctgcggccgacatccctcagcctgcagtcagacaccagggccccgagcctctcctcgtggtgaagccgacacacagcagccctgagggtggctgccgagaagttccccaggctgcctccaaaacccacggcctgctccaggccatcagcccccaggcacaagacaaacgtcctgcggtgacctcacagccctgcccaccagccgccacacatagcttgggtctaggctccaatctcagcttcgggccaggagccaagagacctgcccaggctccgattcaggcttgcctgaacttccccaagaaaccgaggctgggtcccttccagatccccgaaagcgccatccagggaggtgagctgggggccccggagtatctccaacctccgccggcaacaaccgaacttggaccaagtacgtcgccccagatgggcaggaggacacccgcccaggtgtccagcgtcgaccggcagcctccgcacagcagaccttgcctgcctactgcccaggcctgcaccatgtcccatcacccagcgaccagccatgatggggcccagcctctcagagtgctcttccggagactggaaaacggacgctggagctccagcctcctggcggccccctcatttcactctcctgagaagccgggagccttcctcgctcagagccctcatgtctcagagaagtctgaggttccccgtgttcgtgtcccaccgaacgtcctctatgaggaccttcaggtttcctcctcctcagaggacagcgactctgacctggagtgagactgcaggtggcaggggctccttggcctccagctcctgtgacttggaggggactgtgggactgaggagctcagagcagagagcagactctgtgcggtgactccgaagctccccggctgtggcgcttctgtggatgtgggagcccaggccaggcagggagcagatgcagggatctgcctcattgaattctggtgagggacattgtagttcgcatggttctccggaaacgcgccaggaaaagcttccgtgccagagagattcgttgcctcagaaactgcgtgacgcgcaggagtcagacttccgctgggacgtcaataggaaactggggaattactgtgtatttgctctctagatgactgaataagggaaaagttagggaaccctgagaggtgcagcccttccgctgtgccccgccctgagagcagtgtttcggacgctgggaagcgtgctgtgcaaagcgctctcggggtctttcctcagcctcgaaaactgggctctggaatgcctttgtaaataggtgtgttgaatttgtttggaagtgaataaaattctcaaaaagatga

SEQ ID NO: 133006 - DNA, 5511 bp, Homo sapiens
  Payload ID: 5996
  Gene Symbol: FAM91A1
  Gene Name: family with sequence similarity 91, member A1
  Uniprot ID: Q658Y4
  ENST ID: ENST00000334705
  CDS Start-End: 247-2763
ccgaaactaggaagaaacttggagctgttcaggcgatccagcctccaatcgctgctgctcttgtactcggttggcccgggcggcgctgaactgtcgggagcctaggccatggggcagcctgggccttctgcagtgtgaggcgcggggcctcccgcgtcgctccgctgacaggctgcgggcgggcaggcgggaggcgtagtgtgggtcgcggtggcggccccggccgccggccctggccgcggcatcatgaacatagacgtggagttccacatccggcacaactacccctggaacaagttgccggccaacgtgagacagagtcttggaaattcacagagagaatatgaaaagcaggttgtcctgtacagtatccgcaatcagttacgatatagaaataacttagttaaacatgtcaagaaagatgaacgcagatactatgaggaactgctaaagtacagccgagatcatctcatgctgtacccttaccatctatcggatattatggtgaaaggcttgaggataacaccattttcatattatactgggattatggaggatattatgaacagtgagaaaagttatgattcattgcccaattttactgctgctgactgtctaaggcttcttggcataggaagaaaccagtatattgatcttatgaatcagtgtagatcatcaaaaaaattcttcagaaggaaaacagcccgtgatcttctaccaataaagccagtggaaattgccatagaggcgtggtgggtggtgcaggctggctatatcacagaagatgacatcaagatatgcactttgcctgagaaatgcgctgttgataagatcatcgattcaggccctcaactctctggatcactagattacaatgtagtacatagtttgtataacaaaggatttatttatctggatgtaccaatatctgatgacagttgtatagcagttccacctcttgaaggttttgtaatgaatcgagtgcaaggtgattattttgaaactctactctataagatatttgtttcaatagatgagcacacaaatgttgcagagcttgcaaatgtccttgagattgacttatccctggttaagaatgctgtttcaatgtattgccgattgggctttgcccataagaagggacaagtaattaatttggatcaacttcattcatcatggaagaatgttccatccgtaaacagattaaagagtaccttagatccacagaagatgctcttgtcatgggatggaggggaaagtaggagtcctgtacaagaagcttcatcggcaactgacactgatacaaatagtcaagaagatccagctgacacagccagtgtaagcagcctgagtctgtctacaggacacacgaagcgcatcgcattcctgtttgactccactcttactgccttcttaatgatgggaaatctttcaccaaacttgaaaagtcatgcagtcacaatgtttgaagtaggcaaactctcagatgagtctctggacagctttcttatagaactagaaaaggttcagagcactggtgaaggagaagcacagagatattttgatcatgcacttactctgagaaacacaatactgtttctgcgtcataacaaagatctagttgcgcaaactgcacagccagaccaacccaattatggttttcctctggatctcttacgctgtgaaagccttcttggtttggaccctgcaacttgcagcagagttctaaacaaaaattacacgctgcttgtttccatggctcccctcaccaatgaaatccggcctgtcagcagctgcacccctcagcatattggaccagctatcccagaagtcagctctgtctggtttaaactgtacatttatcatgtcactggacaaggaccaccatcccttttattgtccaaaggtacaagacttcgaaaactgccagatatatttcagagttatgatcgattgctaataacatcttggggtcatgatcctggagtagttcctacctcaaatgtgctcacgatgttgaatgatgctttaacacattctgcagttttaattcaggggcatggtctgcatgggataggagaaactgtccatgtcccatttccatttgatgaaacagaactacaaggagagttcactcgtgtcaatatgggtgttcataaagcattgcagatactaaggaacagagtggacttacagcatctctgtggatatgtcaccatgttgaatgcttccagccaacttgcagatagaaaactcagtgatgcttctgatgagagaggagaacctgatttggcttctggctcagatgtaaatgggagtacagagtcatttgaaatggtcattgaggaagcaactatagattcagcaacaaagcaaacctctggtgccacaacagaagcagattgggttcctctcgagctgtgctttggaattccactgttcagttccgaattaaaccggaaagtttgtaggaaaattgctgcacatggcctttgcagaaaagagagccttcaaaacctcttacattccagtagaaaactctctctgcaagtccttaactttgttcactcattccaggaaggtgcttcaatattggatattcacacagagcccagtttttcaagtttgctttcacagtcatcgtgtgctgacatgggtgttccacttcctgcaaaaaacttaatatttaaagatggtgtcttatcagaatggagtggacggtcaccttcctcacttcttattgctaatctccatttgcaataatttggttacaccatttgttgctcacactttctgccttttttctttcttaacgttagctttatagtgtcagccactaaaaagcatcctgctgctgcagtgcaattcttgcttaactaatattaaaagttggggaacatattcatgttttctgaagttttgctcattattgcacatcttattgcgacaaagtgctttttagcagccagcactgtattttttaccttgagacaatctgcatttcttttataaaactaagtatatactttataggctttatgatgactgttatgtttataagcagtcactatgaaaattgcaatggtaattttatatgttagtttatcaaacataaatcttgtttaattttatattttgttacctatactttgggggatcaagggaagagatggaactcttcctctgaaaaggcttcttggtacttaaagtagtaaaactataaaacaataaacatccagtattgagagatgatatgatagggcattatgaattcctatgggtgtctgtaaattatgtatgtcagttggacattgtagaaggtatgtaaatcagcatagttgtgtataacttaaccttgatttataaggtcttaagattatgactattcattgacatctcatgagaagctttagaagactttctatttttaaacaccatttatatgtggacttctgttgtcactgactttgggctttatattttcatagagtctttatggaaaaaatagaatttattttccactcttgtagctatagctgctgcacactttcaccctgatttatttttttgtttcttagctttgatgttttcaaaccaaggattgtgattttaggttagaattacatattagaagcattaagactatgtctttggatcagaatgctttagtgataaacctactttgaagacatactcttaagcaatctggatcttaaatttatgtgaatacttttttagaaaatgataaagaaaaatggaattacttcaaagtgtttcttgagtcattgattcttttagcatctcaaatgttaattagaataattggaatcactttttagacttttcaagttaccttccttgggaagtttgtgcagtgttatagtttagtttagctcctcttacagggtaatggtttgctagtttaaaactgtaaccaaacgaactggtcagacaacatatatctaaaacacttaaaatgttaggaagtttgggaatgttataacctaaacgtttttgctggtaactttttgttatttatagatatttgtgtatttaacatacatacttcaggaaatatatgcctttcctaaaacttaaccatgcattcaataccatggcctatctatagaattgaatattttggaccatgttatctgtggcacagtcagtgctgtgtttgaggtaaatgcagtaacggttagttttctactttgtcttatagaaggtagaaaccatgtgtatgttatgtttgtctataaaagaaaaaatactaatattaaataatttcttacgactctgagtcactcacttatttttccaataattgatattgtacattcctagtgccattaggtatgtatgtatgtaacttttacagtttttcagctgaaagttgtaagtattttttttttttgatcggggctctttaatctcattttaatttcctttgtttgaactgtagttattttatttattcctatattaaccatctaaaccaactgtaatgacatgtacactaatacagaattgaacatttgtagttgttggcagtgaacccagttgttggtgaatttaaagcttaaaatatgggaatgatttgctgctatatttcctttgagagagaaaggaggaagaaatagaacctaatagtgatcatgaattttagggaaagtaccgaagaaccatggggtcccctctggtttcttgtgttgaatgaggcaagggtaatcatctgattccgagctgaagacctctggtcctcttaaggagggagagtgcatttttagagcttttagcaaaatgtgaaaagctgatgtttgcgccttgctttgtgaatttggctttgttttacttatacattaactcatgtaatctcttaaatcttacaagcattgatccatttcaacaaaaaggtaaatttaaaatgcagactttgttatttgccaaagaagattcatgaaaaatttacgtccaattattttgcaaatagttaatttcatttggctttttaccatgttccttcctttctttttcccgcttccttaatgtaatttaaaccctggcaaacattctttagaaaccaagaggaaagaaagaacaaatatcaaaaaagacatagaatttaatattgatacaatttcacctctaaaatggatttgaagaaatgcaactttatatcaaaaaatgtcatctgatttcctttgtttcttttttaaattatgtaatcagatgattttatgtttttttttcaggggagcggaatattggtttcttttacttgttgttttcagttttctctgccattcatgtttcttttttgtgttcagtgtttcaaatacaatttgtatttaaggattttaaaataccaaactgtaactgagtacagtggatcgttttctgttaggatgttaatattatacaatgaaatctataaagtgttgtcaatttgattattgacacatataacatgtttacaaataaactgtggtattgatcaagttactatgaaaa

SEQ ID NO: 133007 - DNA, 2706 bp, Homo sapiens
  Payload ID: 5996
  Gene Symbol: FAM91A1
  Gene Name: family with sequence similarity 91, member A1
  ENST ID: ENST00000521166
  CDS Start-End: 248-2617
cccgaaactaggaagaaacttggagctgttcaggcgatccagcctccaatcgctgctgctcttgtactcggttggcccgggcggcgctgaactgtcgggagcctaggccatggggcagcctgggccttctgcagtgtgaggcgcggggcctcccgcgtcgctccgctgacaggctgcgggcgggcaggcgggaggcgtagtgtgggtcgcggtggcggccccggccgccggccctggccgcggcatcatgaacatagacgtggagttccacatccggcacaactacccctggaacaagttgccggccaacgtgagacagagtcttggaaattcacagagagaatatgaaaagcaggttgtcctgtacagtatccgcaatcagttacgatatagaaataacttagttaaacatgtcaagaaagatgaacgcagatactatgaggaactgctaaagtacagccgagatcatctcatgctgtacccttaccatctatcggatattatggtgaaaggcttgaggataacaccattttcatattatactgggattatggaggatattatgaacagtgagaaaagttatgattcattgcccaattttactgctgctgactgtctaaggcttcttggcataggaagaaaccagtatattgatcttatgaatcagtgtagatcatcaaaaaaattcttcagaaggaaaacagcccgtgatcttctaccaataaagccagtggaaattgccatagaggcgtggtgggtggtgcaggctggctatatcacagaagatgacatcaagatatgcactttgcctgagaaatgcgctgttgataagatcatcgattcaggccctcaactctctggatcactagattacaatgtagtacatagtttgtataacaaaggatttatttatctggatgtaccaatatctgatgacagttgtatagcagttccacctcttgaaggttttgtaatgaatcgagtgcaaggtgattattttgaaactctactctataagatatttgtttcaatagatgagcacacaaatgttgcagagcttgcaaatgtccttgagattgacttatccctggttaagaatgctgtttcaatgtattgccgattgggctttgcccataagaagggacaagtaattaatttggatcaacttcattcatcatggaagaatgttccatccgtaaacagattaaagagtaccttagatccacagaagatgctcttgtcatgggatggaggggaaagtaggagtcctgtacaagaagcttcatcggcaactgacactgatacaaatagtcaagaagatccagctgacacagccagtgtaagcagcctgagtctgtctacaggacacacgaagcgcatcgcattcctgtttgactccactcttactgccttcttaatgatgggaaatctttcaccaaacttgaaaagtcatgcagtcacaatgtttgaagtaggcaaactctcagatgagtctctggacagctttcttatagaactagaaaaggttcagagcactggtgaaggagaagcacagagatattttgatcatgcacttactctgagaaacacaatactgtttctgcgtcataacaaagatctagttgcgcaaactgcacagccagaccaacccaattatggttttcctctggatctcttacgctgtgaaagccttcttggtttggaccctgcaacttgcagcagagttctaaacaaaaattacacgctgcttgtttccatggctcccctcaccaatgaaatccggcctgtcagcagctgcacccctcagcatattggaccagctatcccagaagtcagctctgtctggtttaaactgtacatttatcatgtcactggacaaggaccaccatcccttttattgtccaaaggtacaagacttcgaaaactgccagatatatttcagagttatgatcgattgctaataacatcttggggtcatgatcctggagtagttcctacctcaaatgtgctcacgatgttgaatgatgctttaacacattctgcagttttaattcaggggcatggtctgcatgggataggagaaactgtccatgtcccatttccatttgatgaaacagaactacaaggagagttcactcgtgtcaatatgggtgttcataaagcattgcagatactaaggaacagagtggacttacagcatctctgtggatatgtcaccatgttgaatgcttccagccaacttgcagatagaaaactcagtgatgcttctgatgagagaggagaacctgatttggcttctggctcagatgtaaatgggagtacagagtcatttgaaatggtcattgaggaagcaactatagattcagcaacaaagcaaacctctggtgccacaacagaagcagattgggttcctctcgagctgtgctttggaattccactgttcagttccgaattaaaccggaaagtttgtaggaaaattgctgcacatggcctttgcagaaaagagagccttcaaaacctcttacattccagtagaaaactctctctgcaagtccttaactttgttcactcattccaggtaacaaaaaccaaaaagtccaaatggtacttgtactgagctttaagtatgcacaacacttctgtgtttgtttttgagtcaccacagcagcaagatatgaaataaacattaattttattgtacaaatg

SEQ ID NO: 133008 - DNA, 4650 bp, Homo sapiens
  Payload ID: 5996
  Gene Symbol: FAM91A1
  Gene Name: family with sequence similarity 91, member A1
  ENST ID: ENST00000519721
  CDS Start-End: 58-714
ggaggcgtagtgtgggtcgcggtggcggccccggccgccggccctggccgcggcatcatgaacatagacgtggagttccacatccggcacaactacccctggaacaagttgccggccaacgtgagacagagtcttggaaattcacagagagaatatgaaaagcaggttgtcctgtacagtatccgcaatcagttacgatatagaaataacttagttaaacatgtcaagaaagatgaacgcagatactatgaggaactgctaaagtacagccgagatcatctcatgctgtacccttaccatctatcggatattatggtgaaaggcttgaggataacaccattttcatattatactgggattatggaggatattatgaacagtgagaaaagttatgattcattgcccaattttactgctgctgactgtctaaggcttcttggcataggaagaaaccagtatattgatcttatgaatcagtgtagatcatcaaaaaaattcttcagaaggaaaacagcccgtgatcttctaccaataaagccagtggaaattgccatagaggcgtggtgggtggtgcaggctggctatatcacagaagatgacatcaagatatgcactttgcctgagaaatgcgctgttgataagatcatcgattcaggccctcaactctctggatcactagattacaatgtagtacatagtaagtggtttgtataacaaaggatttatttatctggatgtaccaatatctgatgacagttgtatagcagttccacctcttgaaggttttgtaatgaatcgagtgcaaggtgattattttgaaactctactctataagatatttgtttcaatagatgagcacacaaatgttgcagagcttgcaaatgtccttgagattgacttatccctggttaagaatgctgtttcaatgtattgccgattgggctttgcccataagaagggacaagtaattaatttggatcaacttcattcatcatggaagaatgttccatccgtaaacagattaaagagtaccttagatccacagaagatgctcttgtcatgggatggaggggaaagtaggagtcctgtacaagaagcttcatcggcaactgacactgatacaaatagtcaagaagatccagctgacacagccagtgtaagcagcctgagtctgtctacaggacacacgaagcgcatcgcattcctgtttgactccactcttactgccttcttaatgatgggaaatctttcaccaaacttgaaaagtcatgcagtcacaatgtttgaagtaggcaaactctcagatgagtctctggacagctttcttatagaactagaaaaggttcagagcactggtgaaggagaagcacagagatattttgatcatgcacttactctgagaaacacaatactgtttctgcgtcataacaaagatctagttgcgcaaactgcacagccagaccaacccaattatggttttcctctggatctcttacgctgtgaaagccttcttggtttggaccctgcaacttgcagcagagttctaaacaaaaattacacgctgcttgtttccatggctcccctcaccaatgaaatccggcctgtcagcagctgcacccctcagcatattggaccagctatcccagaagtcagctctgtctggtttaaactgtacatttatcatgtcactggacaaggaccaccatcccttttattgtccaaaggtacaagacttcgaaaactgccagatatatttcagagttatgatcgattgctaataacatcttggggtcatgatcctggagtagttcctacctcaaatgtgctcacgatgttgaatgatgctttaacacattctgcagttttaattcaggggcatggtctgcatgggataggagaaactgtccatgtcccatttccatttgatgaaacagaactacaaggagagttcactcgtgtcaatatgggtgttcataaagcattgcagatactaaggaacagagtggacttacagcatctctgtggatatgtcaccatgttgaatgcttccagccaacttgcagatagaaaactcagtgatgcttctgatgagagaggagaacctgatttggcttctggctcagatgtaaatgggagtacagagtcatttgaaatggtcattgaggaagcaactatagattcagcaacaaagcaaacctctggtgccacaacagaagcagattgggttcctctcgagctgtgctttggaattccactgttcagttccgaattaaaccggaaagtttgtaggaaaattgctgcacatggcctttgcagaaaagagagccttcaaaacctcttacattccagtagaaaactctctctgcaagtccttaactttgttcactcattccaggaaggtgcttcaatattggatattcacacagagcccagtttttcaagtttgctttcacagtcatcgtgtgctgacatgggtgttccacttcctgcaaaaaacttaatatttaaagatggtgtcttatcagaatggagtggacggtcaccttcctcacttcttattgctaatctccatttgcaataatttggttacaccatttgttgctcacactttctgccttttttctttcttaacgttagctttatagtgtcagccactaaaaagcatcctgctgctgcagtgcaattcttgcttaactaatattaaaagttggggaacatattcatgttttctgaagttttgctcattattgcacatcttattgcgacaaagtgctttttagcagccagcactgtattttttaccttgagacaatctgcatttcttttataaaactaagtatatactttataggctttatgatgactgttatgtttataagcagtcactatgaaaattgcaatggtaattttatatgttagtttatcaaacataaatcttgtttaattttatattttgttacctatactttgggggatcaagggaagagatggaactcttcctctgaaaaggcttcttggtacttaaagtagtaaaactataaaacaataaacatccagtattgagagatgatatgatagggcattatgaattcctatgggtgtctgtaaattatgtatgtcagttggacattgtagaaggtatgtaaatcagcatagttgtgtataacttaaccttgatttataaggtcttaagattatgactattcattgacatctcatgagaagctttagaagactttctatttttaaacaccatttatatgtggacttctgttgtcactgactttgggctttatattttcatagagtctttatggaaaaaatagaatttattttccactcttgtagctatagctgctgcacactttcaccctgatttatttttttgtttcttagctttgatgttttcaaaccaaggattgtgattttaggttagaattacatattagaagcattaagactatgtctttggatcagaatgctttagtgataaacctactttgaagacatactcttaagcaatctggatcttaaatttatgtgaatacttttttagaaaatgataaagaaaaatggaattacttcaaagtgtttcttgagtcattgattcttttagcatctcaaatgttaattagaataattggaatcactttttagacttttcaagttaccttccttgggaagtttgtgcagtgttatagtttagtttagctcctcttacagggtaatggtttgctagtttaaaactgtaaccaaacgaactggtcagacaacatatatctaaaacacttaaaatgttaggaagtttgggaatgttataacctaaacgtttttgctggtaactttttgttatttatagatatttgtgtatttaacatacatacttcaggaaatatatgcctttcctaaaacttaaccatgcattcaataccatggcctatctatagaattgaatattttggaccatgttatctgtggcacagtcagtgctgtgtttgaggtaaatgcagtaacggttagttttctactttgtcttatagaaggtagaaaccatgtgtatgttatgtttgtctataaaagaaaaaatactaatattaaataatttcttacgactctgagtcactcacttatttttccaataattgatattgtacattcctagtgccattaggtatgtatgtatgtaacttttacagtttttcagctgaaagttgtaagtattttttttttttgatcggggctctttaatctcattttaatttcctttgtttgaactgtagttattttatttattcctatattaaccatctaaaccaactgtaatgacatgtacactaatacagaattgaacatttgtagttgttggcagtgaacccagttgttggtgaatttaaagcttaaaatatgggaatgatttgctgctatatttcctttgagagagaaaggaggaagaaatagaacctaatagtgatcatgaattttagggaaagtaccgaagaaccatggggtcccctctggtttcttgtgttgaatgaggcaagggtaatcatctgattccgagctgaagacctctggtcctcttaaggagggagagtgcatttttagagcttttagcaaaatgtgaaaagctgatgtttgcgccttgctttg

SEQ ID NO: 133009 - DNA, 681 bp, Homo sapiens
  Payload ID: 5996
  Gene Symbol: FAM91A1
  Gene Name: family with sequence similarity 91, member A1
  ENST ID: ENST00000517912
  CDS Start-End: 1-344
gtttgtataacaaaggatttatttatctggatgtaccaatatctgatgacagttgtatagcagttccacctcttgaaggttttgtaatgaatcgagtgcaaggtgattattttgaaactctactctataagatatttgtttcaatagatgagcacacaaatgttgcagagcttgcaaatgtccttgagattgacttatccctggttaagaatgctgtttcaatgtattgccgattgggctttgcccataagaagggacaagtaattaatttggatcaacttcattcatcatggaagaatgttccatccgtaaacagattaaaaggtggggtttcaccatgttagccaggctggtgtcgaactcctggccccaactgatccacccaccttggccttccaaagtgttgggattgcaggtgtgagccactgcacctggcccagaaattttatttattcaacctgtcagttgaggagtaccttagatccacagaagatgctcttgtcatgggatggaggggaaagtaggagtcctgtacaagaagcttcatcggcaactgacactgatacaaatagtcaagaagatccagctgacacagccagtgtaagcagcctgagtctgtctacaggacacacgaagcgcatcgcattcctgtttgactccactcttactgccttcttaatg

SEQ ID NO: 133010 - DNA, 626 bp, Homo sapiens
  Payload ID: 5996
  Gene Symbol: FAM91A1
  Gene Name: family with sequence similarity 91, member A1
  ENST ID: ENST00000518976
  CDS Start-End: 1-183
gcagattgggttcctctcgagctgtgctttggaattccactgttcagttccgaattaaaccggaaagtttgtaggaaaattgctgcacatggcctttgcagaaaagagagccttcaaaacctcttacattccagtagaaaactctctctgcaagtccttaactttgttcactcattccagtaggaagaggtttcaccatgttggccaggctcgttttgaactcctgatctcaagtgattcacccgcctcagcctcccagagtgctgggattacaggcgcacaagccactgcacctggcctttgaaggtgcttcaatattggatattcacacagagcccagtttttcaagtttgctttcacagtcatcgtgtgctgacatgggtgttccacttcctgcaaaaaacttaatatttaaagatggtgtcttatcagaatggagtggacggtcaccttcctcacttcttattgctaatctccatttgcaataatttggttacaccatttgttgctcacactttctgccttttttctttcttaacgttagctttatagtgtcagccactaaaaagcatcctgctgctgcagtgcaattcttgcttaactaatattaaaagttggggaacata

SEQ ID NO: 133011 - DNA, 1179 bp, Homo sapiens
  Payload ID: 5997
  Gene Symbol: FAM92A1
  Gene Name: family with sequence similarity 92, member A1
  ENST ID: ENST00000359421
  CDS Start-End: 87-578
gctgcttgcgccccagcgcgcgcccaggcgccttggaatccccgtccttgggcccccgcaaggtccccggccgtgcgcgaggcagcatgatgaggcgcaccctggaaaaccggaacgctcaaacgaaacaactgcaaacagctgtctcaaatgtggagaagcattttggagaactgtgccaaatcttcgctgcctatgtgcggaaaactgccaggctgagagacaaagcagacctcctggtgaatgaaattaacgcgtatgctgctacagagaccccgcatttaaagctgggcctgatgaactttgcagatgagtttgccaaacttcaggattatcgacaagcagaggttgaaagacttgaagccaaagtagttgaacccttgaaaacttatgggaccattgtgaaaatgaaacgggatgacctcaaagcaacactcacagcaaggaatcgagaagctaagcaattaactcagttagaaagaacacgtcagcgaaacccatctgatcgacatgttattaattttgaagaattttcagtgaaaagaagaaatattagaaatctatattctctttgctaaaaatggatgtgttactttaggcagaaacggaattacagagagctgcaatggatgctagccgaacaagtcgtcatctggaggaaactattaacaactttgaaaggcagaaaatgaaggatataaagactatattttctgaatttatcacaatcgaaatgttatttcacggcaaagctttagaggtctacactgctgcctaccagaatatacaaaacattgatgaagatgaagatttagaggttttccgaaattctctgtatgcaccagattattcatctcgtttagatattgtaagagcaaattcaaagtcacctcttcagagatcactgtcagctaagtgtgtatctggaacaggacaggtatccacttgtcgactaagaaaggatcaacaagcagaagatgatgaggatgacgagttagatgttacagaagaagaaaattttcttaagtaaactacacatttccattttcatcataaatgacttgaaatccacaatgactaaattgtagaactttatactcactttgctatgttaagcctcaaagtgaagtccaactggaaacagaaaaataattaaaggaaacttatgctgaccaaaaa

SEQ ID NO: 133012 - DNA, 1284 bp, Homo sapiens
  Payload ID: 5997
  Gene Symbol: FAM92A1
  Gene Name: family with sequence similarity 92, member A1
  Uniprot ID: A1XBS5
  ENST ID: ENST00000452913
  CDS Start-End: 142-957
agaaacgcccggcctgccgcggcggcgcgaggggcgggctttcaggctcccggcggctgcttgcgccccagcgcgcgcccaggcgccttggaatccccgtccttgggcccccgcaaggtccccggccgtgcgcgaggcagcatgatgaggcgcaccctggaaaaccggaacgctcaaacgaaacaactgcaaacagctgtctcaaatgtggagaagcattttggagaactgtgccaaatcttcgctgcctatgtgcggaaaactgccaggctgagagacaaagcagacctcctggtgaatgaaattaacgcgtatgctgctacagagaccccgcatttaaagctgggcctgatgaactttgcagatgagtttgccaaacttcaggattatcgacaagcagaggttgaaagacttgaagccaaagtagttgaacccttgaaaacttatgggaccattgtgaaaatgaaacgggatgacctcaaagcaacactcacagcaaggaatcgagaagctaagcaattaactcagttagaaagaacacgtcagcgaaacccatctgatcgacatgttatttcacaggcagaaacggaattacagagagctgcaatggatgctagccgaacaagtcgtcatctggaggaaactattaacaactttgaaaggcagaaaatgaaggatataaagactatattttctgaatttatcacaatcgaaatgttatttcacggcaaagctttagaggtctacactgctgcctaccagaatatacaaaacattgatgaagatgaagatttagaggttttccgaaattctctgtatgcaccagattattcatctcgtttagatattgtaagagcaaattcaaagtcacctcttcagagatcactgtcagctaagtgtgtatctggaacaggacaggaggctggctgggccgcaacttgccaaaccctgatctagagagctatgcccttttcatatctagccttcagaatataaaattcaacaaacttattttcaagatacaacttttaggtatccacttgtcgactaagaaaggatcaacaagcagaagatgatgaggatgacgagttagatgttacagaagaagaaaattttcttaagtaaactacacatttccattttcatcataaatgacttgaaatccacaatgactaaattgtagaactttatactcactttgctatgttaagcctcaaagtgaagtccaactggaaacagaaaaataattaaaggaaacttatgctgaccaaaaatgaaggcttt

SEQ ID NO: 133013 - DNA, 914 bp, Homo sapiens
  Payload ID: 5997
  Gene Symbol: FAM92A1
  Gene Name: family with sequence similarity 92, member A1
  Uniprot ID: A1XBS5
  ENST ID: ENST00000423990
  CDS Start-End: 67-822
cgcccaggcgccttggaatccccgtccttgggcccccgcaaggtccccggccgtgcgcgaggcagcatgatgaggcgcaccctggaaaaccggaacgctcaaacgaaacaactgcaaacagctgtctcaaatgtggagaagcattttggagaactgtgccaaatcttcgctgcctatgtgcggaaaactgccaggctgagagacaaagcagacctcctggtgaatgaaattaacgcgtatgctgctacagagaccccgcatttaaagctgggcctgatgaactttgcagatgagtttgccaaacttcaggattatcgacaagcagaggttgaaagacttgaagccaaagtagttgaacccttgaaaacttatgggaccattgtgaaaatgaaacgggatgacctcaaagcaacactcacagcaaggaatcgagaagctaagcaattaactcagttagaaagaacacgtcagcgaaacccatctgatcgacatgttatttcacaggcagaaacggaattacagagagctgcaatggatgctagccgaacaagtcgtcatctggaggaaactattaacaactttgaaaggcagaaaatgaaggatataaaggttttccgaaattctctgtatgcaccagattattcatctcgtttagatattgtaagagcaaattcaaagtcacctcttcagagatcactgtcagctaagtgtgtatctggaacaggacaggtatccacttgtcgactaagaaaggatcaacaagcagaagatgatgaggatgacgagttagatgttacagaagaagaaaattttcttaagtaaactacacatttccattttcatcataaatgacttgaaatccacaatgactaaattgtagaactttatactcactttgctatgttaagcctcaa

SEQ ID NO: 133014 - DNA, 769 bp, Homo sapiens
  Payload ID: 5997
  Gene Symbol: FAM92A1
  Gene Name: family with sequence similarity 92, member A1
  ENST ID: ENST00000520955
  CDS Start-End: 574-769
aaccggtaacagcccgagcccagctgcccagggccgcccacactggagggctggggtgagggaagtggaagcctctgtccatggggcctctgcgccgaattccgaccctgagtgggaggctgcacggtccccgctgtgacctggggcctaattccttgggctgcagccaccgccggcggcgaagaggagcccggggcccggccggctgccacccacccacgccaccgggtctcgggtccccacactgccgcgggcagtgcggaagcctaggaggcagccgggcgcccaggccgcgctgcgcggagcagccggagcagccacctccccagttaaggccaggcccacccggcctgggccttttcctgtgcctacacagtccggatagtgaggaacgctcaaacgaaacaactgcaaacagctgtctcaaatgtggagaagcattttggagaactgtgccaaatcttcgctgcctatgtgcggaaaactgccaggctgagagacaaagcagacctcctggtgaatgaaattaacgcgtatgctgctacagagaccccgcatttaaagctgggcctgatgaactttgcagatgagtttgccaaacttcaggattatcgacaagcagaggttgaaagacttgaagccaaagtagttgaacccttgaaaacttatgggaccattgtgaaaatgaaacgggatgacctcaaagcaacactcacagcaaggaatcgagaagctaagcaattaactcagttagaaagaacacgtcagc

SEQ ID NO: 133015 - DNA, 1943 bp, Homo sapiens
  Payload ID: 5997
  Gene Symbol: FAM92A1
  Gene Name: family with sequence similarity 92, member A1
  Uniprot ID: A1XBS5
  ENST ID: ENST00000518116
  CDS Start-End: 35-823
cccccgcaaggtccccggccgtgcgcgaggcagcatgatgaggcgcaccctggaaaaccggaacgctcaaacgaaacaactgcaaacagctgtctcaaatgtggagaagcattttggagaactgtgccaaatcttcgctgcctatgtgcggaaaactgccaggctgagagacaaagcagacctcctggtgaatgaaattaacgcgtatgctgctacagagaccccgcatttaaagctgggcctgatgaactttgcagatgagtttgccaaacttcaggattatcgacaagcagaggttgaaagacttgaagccaaagtagttgaacccttgaaaacttatgggaccattgtgaaaatgaaacgggatgacctcaaagcaacactcacagcaaggaatcgagaagctaagcaattaactcagttagaaagaacacgtcagcgaaacccatctgatcgacatgttatttcacaggcagaaacggaattacagagagctgcaatggatgctagccgaacaagtcgtcatctggaggaaactattaacaactttgaaaggcagaaaatgaaggatataaagactatattttctgaatttatcacaatcgaaatgttatttcacggcaaagctttagaggtctacactgctgcctaccagaatatacaaaacattgatgaagatgaagatttagagagatggagtttcgccatgttgcccaggctggtcttgaactcctggggctcaagcgatccgcctgcgttggcctcccaaagtgtcaggttttccgaaattctctgtatgcaccagattattcatctcgtttagatattgtaagagcaaattcaaagtcacctcttcagagatcactgtcagctaagtgtgtatctggaacaggacaggtatccacttgtcgactaagaaaggatcaacaagcagaagatgatgaggatgacgagttagatgttacagaagaagaaaattttcttaagtaaactacacatttccattttcatcataaatgacttgaaatccacaatgactaaattgtagaactttatactcactttgctatgttaagcctcaaagtgaagtccaactggaaacagaaaaataattaaaggaaacttatgctgaccaaaaatgaaggctttaaaaaatattgcataccagtcatttcaacatcctacctagtgttacatgatttttgtgtaagtgcctttttttttaaagatggtgtatttcaaagtatttcatattaatgtactatatctacttgaagttccaatagtacattatgacagaaaccaaaagatctaacaattctgcttagctttttggttaagactccatgctttcattaccagaaaagggtcttacgtagtcattatgattcatggaattctattccatgaagccttaagaaaaaaaactttttttaactttccctgaaactttatcatttgataagtaaatttacttttcaagaagagtataaccaaagagtaaagataatgtgacactaagttatcaatgttttatgaatacacataaggcataaatttcagctgtaaaaaagctacattcaatctgactctggttttaaaacaaaactgctgtcataattatacatgatactgcaacttttggaaggctaatttggtggaatgttgcctcatcatagaacaccatagatcattaaaaattctataaaaattttaccaagctaccatatagttaataaaagggtatacagtcacttttatttctgaaaatataaaacattgagcctttcagtgtatctgatgcttctcttttggtaaggaatacttttatttcatggatcccaggcaggcatataaaagttacggaatttataaaatcatttgggataattagaaaatgcaattattcataacagaaaaataaagactttctagaaagcttc

SEQ ID NO: 133016 - DNA, 552 bp, Homo sapiens
  Payload ID: 5997
  Gene Symbol: FAM92A1
  Gene Name: family with sequence similarity 92, member A1
  ENST ID: ENST00000518829
  CDS Start-End: 222-552
tcggagtagcctagcagcgctggaggctggctgtctggaacgctcaaacgaaacaactgcaaacagctgtctcaaatgtggagaagcattttggagaactgtgccaaatcttcgctgcctatgtgcggaaaactgccaggctgagagacaaagcagacctcctggtgaatgaaattaacgcgtatgctgctacagagaccccgcatttaaagctgggcctgatgaactttgcagatgagtttgccaaacttcaggattatcgacaagcagaggttgaaagacttgaagccaaagtagttgaacccttgaaaacttatgggaccattgtgaaaatgaaacgggatgacctcaaagcaacactcacagcaaggaatcgagaagctaagcaattaactcagttagaaagaacacgtcagcgaaacccatctgatcgacatgttatttcacaggcagaaacggaattacagagagctgcaatggatgctagccgaacaagtcgtcatctggaggaaactattaacaactttgaaaggcagaaaatgaaggatataa

SEQ ID NO: 133017 - DNA, 457 bp, Homo sapiens
  Payload ID: 5997
  Gene Symbol: FAM92A1
  Gene Name: family with sequence similarity 92, member A1
  ENST ID: ENST00000519135
  CDS Start-End: 347-457
acttgtaatctacctaactgcagaggtggatgcaaacttgataaaacgtacattttcataagactgtaacctaaaacgggaatttcaattttcaaaaaacagaatgagtataaaaaaaattgaactcatcattgctatccatacaaatttgaagagtaatcatatttggaggtacttttggaaaaatgtggagttcttgtcatgaaacttctgtaataaacaagtaactctcaattatatatgataactggggacttaatgtttcaaagataatttatattcacaggttgaaagacttgaagccaaagtagttgaacccttgaaaacttatgggaccattgtgaaaatgaaacgggatgacctcaaagcaacactcacagcaaggaatcgagaagctaagcaattaactcagttagaaagaacacgtcagcgaaacccatctgatcgacatgttatt

SEQ ID NO: 133018 - DNA, 582 bp, Homo sapiens
  Payload ID: 5997
  Gene Symbol: FAM92A1
  Gene Name: family with sequence similarity 92, member A1
  ENST ID: ENST00000522803
  CDS Start-End: 78-582
gccccagcgcgcgcccaggcgccttggaatccccgtccttgggcccccgcaaggtccccggccgtgcgcgaggcagcatgatgaggcgcaccctggaaaaccggaacgctcaaacgaaacaactgcaaacagctgtctcaaatgtggagaagcattttggagaactgtgccaaatcttcgctgcctatgtgcggaaaactgccaggctgagagacaaagcagacctcctggtgaatgaaattaacgcgtatgctgctacagagaccccgcatttaaagctgggcctgatgaactttgcagatgagtttgccaaacttcaggattatcgacaagcagaggtcctaatgaacaatgacaaaaaggttgaaagacttgaagccaaagtagttgaacccttgaaaacttatgggaccattgtgaaaatgaaacgggatgacctcaaagcaacactcacagcaaggaatcgagaagctaagcaattaactcagttagaaagaacacgtcagcgaaacccatctgatcgacatgttatttcacaggcagaaacggaattacagagagctgcaatggatgctagccgaa

SEQ ID NO: 133019 - DNA, 780 bp, Homo sapiens
  Payload ID: 5997
  Gene Symbol: FAM92A1
  Gene Name: family with sequence similarity 92, member A1
  ENST ID: ENST00000521641
  CDS Start-End: 156-560
ccagaaaccacatgaggagtggctctttgagagcatttgaggttccagaacacctccattcctgaggggagtctcttgagcagcgatttggggctgcgccagttgcttggtccttcttcctttggaccaaagaaacggaattacagagagctgcaatggatgctagccgaacaagtcgtcatctggaggaaactattaacaactttgaaaggcagaaaatgaaggatataaagactatattttctgaatttatcacaatcgaaatgttatttcacggcaaagctttagaggtctacactgctgcctaccagaatatacaaaacattgatgaagatgaagatttagaggttttccgaaattctctgtatgcaccagattattcatctcgtttagatattgtaagagcaaattcaaagtcacctcttcagagatcactgtcagctaagtgtgtatctggaacaggacaggtatccacttgtcgactaagaaaggatcaacaagcagaagatgatgaggatgacgagttagatgttacagaagaagaaaattttcttaagtaaactacacatttccattttcatcataaatgacttgaaatccacaatgactaaattgtagaactttatactcactttgctatgttaagcctcaaagtgaagtccaactggaaacagaaaaataattaaaggaaacttatgctgaccaaaaatgaaggctttaaaaaatattgcataccagtcatttcaacatcctacctagtgttacatgatttttgtgtaa

SEQ ID NO: 133020 - DNA, 827 bp, Homo sapiens
  Payload ID: 5997
  Gene Symbol: FAM92A1
  Gene Name: family with sequence similarity 92, member A1
  ENST ID: ENST00000517718
  CDS Start-End: 274-678
aaaaaaaaaagaaaaagagaaagaaagcactaacatccctactgcctctttttcccattccttcttctatatgtctccttcctgcttccttaaggttgttactgcccagctcagccagaaaccacatgaggagtggctctttgagagcatttgaggttccagaacacctccattcctgaggggagtctcttgagcagcgatttggggctgcgccagttgcttggtccttcttcctttggaccaaaggcagaaacggaattacagagagctgcaatggatgctagccgaacaagtcgtcatctggaggaaactattaacaactttgaaaggcagaaaatgaaggatataaagactatattttctgaatttatcacaatcgaaatgttatttcacggcaaagctttagaggtctacactgctgcctaccagaatatacaaaacattgatgaagatgaagatttagaggttttccgaaattctctgtatgcaccagattattcatctcgtttagatattgtaagagcaaattcaaagtcacctcttcagagatcactgtcagctaagtgtgtatctggaacaggacaggtatccacttgtcgactaagaaaggatcaacaagcagaagatgatgaggatgacgagttagatgttacagaagaagaaaattttcttaagtaaactacacatttccattttcatcataaatgacttgaaatccacaatgactaaattgtagaactttatactcactttgctatgttaagcctcaaagtgaagtccaactggaaacagaaaaataattaaaggaaacttatgctgaccaaaaa

SEQ ID NO: 133021 - DNA, 4241 bp, Homo sapiens
  Payload ID: 5997
  Gene Symbol: FAM92A1
  Gene Name: family with sequence similarity 92, member A1
  Uniprot ID: A1XBS5
  ENST ID: ENST00000518322
  CDS Start-End: 142-1011
agaaacgcccggcctgccgcggcggcgcgaggggcgggctttcaggctcccggcggctgcttgcgccccagcgcgcgcccaggcgccttggaatccccgtccttgggcccccgcaaggtccccggccgtgcgcgaggcagcatgatgaggcgcaccctggaaaaccggaacgctcaaacgaaacaactgcaaacagctgtctcaaatgtggagaagcattttggagaactgtgccaaatcttcgctgcctatgtgcggaaaactgccaggctgagagacaaagcagacctcctggtgaatgaaattaacgcgtatgctgctacagagaccccgcatttaaagctgggcctgatgaactttgcagatgagtttgccaaacttcaggattatcgacaagcagaggttgaaagacttgaagccaaagtagttgaacccttgaaaacttatgggaccattgtgaaaatgaaacgggatgacctcaaagcaacactcacagcaaggaatcgagaagctaagcaattaactcagttagaaagaacacgtcagcgaaacccatctgatcgacatgttatttcacaggcagaaacggaattacagagagctgcaatggatgctagccgaacaagtcgtcatctggaggaaactattaacaactttgaaaggcagaaaatgaaggatataaagactatattttctgaatttatcacaatcgaaatgttatttcacggcaaagctttagaggtctacactgctgcctaccagaatatacaaaacattgatgaagatgaagatttagaggttttccgaaattctctgtatgcaccagattattcatctcgtttagatattgtaagagcaaattcaaagtcacctcttcagagatcactgtcagctaagtgtgtatctggaacaggacaggtatccacttgtcgactaagaaaggatcaacaagcagaagatgatgaggatgacgagttagatgttacagaagaagaaaattttcttaagtaaactacacatttccattttcatcataaatgacttgaaatccacaatgactaaattgtagaactttatactcactttgctatgttaagcctcaaagtgaagtccaactggaaacagaaaaataattaaaggaaacttatgctgaccaaaaatgaaggctttaaaaaatattgcataccagtcatttcaacatcctacctagtgttacatgatttttgtgtaagtgcctttttttttaaagatggtgtatttcaaagtatttcatattaatgtactatatctacttgaagttccaatagtacattatgacagaaaccaaaagatctaacaattctgcttagctttttggttaagactccatgctttcattaccagaaaagggtcttacgtagtcattatgattcatggaattctattccatgaagccttaagaaaaaaaactttttttaactttccctgaaactttatcatttgataagtaaatttacttttcaagaagagtataaccaaagagtaaagataatgtgacactaagttatcaatgttttatgaatacacataaggcataaatttcagctgtaaaaaagctacattcaatctgactctggttttaaaacaaaactgctgtcataattatacatgatactgcaacttttggaaggctaatttggtggaatgttgcctcatcatagaacaccatagatcattaaaaattctataaaaattttaccaagctaccatatagttaataaaagggtatacagtcacttttatttctgaaaatataaaacattgagcctttcagtgtatctgatgcttctcttttggtaaggaatacttttatttcatggatcccaggcaggcatataaaagttacggaatttataaaatcatttgggataattagaaaatgcaattattcataacagaaaaataaagactttctagaaagcttctgactttgtcaatcatggctctgttcttaacaaagcactccttcctgagaatagtcctaagtgacaaagttgtttcagtacttttttgtaaaatatttaaaacattttaaaaccctaaattgatattcttaagaaactcaagatatcattggatatttactgcttcctcactcagtatttaaatttggttgtacttcgggggaaaacaacagagttattattttgctgcttactaaatagcaacttctcttgagcattatttgccttgtttgtaaagttaaaactgcgtaaaacagtaattctggaataaaacatacattctgcctacctcaaagaaatattctaagaacaaaaggaatactatccatgaaaatactttcattaatgtaaaattttcattatttagaccagcctaggttggcaaacttcttaaagggccagatagcaaatactgttattcttcgtgggtttaggcaaattcaagactattatacaggtaactatgtaaccatgtaagacttaagtacacttaaaaaatgtgaaaaaccattcctagcttccactacaacaacaacaaaaaacaggcaaccaatccaaccaacccagcctgtaagtctccatctcttatctccaaaataggaatacaaattgagtatcctttatctgaagtgcttgggaccagaagtatttaagactttggatttcttcagattttggagtatttgcattataccagttcaacattcctaacccaaaaatctgaaatcttaaatgctgcaatgagcattttctttgagcatcatgttggcactcaaaaagtttgtgattttcggagcatgtgaaatttcagattaccagattaggaatactcaacctgtagtacatttactaggattatcagaattaaatgatagttaattcatacataattatacatcatatagtatctaatacagctcaataaacaacagctaatatttactgcaaaaacagaggcagcaaggtcactacttaacaggtgatatatggatcaagaatcactgctcttaacagtgatctcagtaaattaatagaaatgcactcctaacatgatttttacctatctcttggttgtgggattgactttctagacatgatctacatttttttagataatttctagacaaaaatgtttggctttaagacaaatgccactgggtatcaggctagagaatacacctccagtgtacctggtataccttgaggataggagaggaaaaactggctatgagacgacaattactgaagctgagtgatgtgtacatgaaaatttactattctttttttatatttgaaattgatgaggtgctgggaagctggctttctgaggggacaacaggaggggaattccttgatttgctgcatttatcactttccatggtgtaaaatactcctgccatggccaatttgttattgacatatcactaaaggcagagttggagagagatgtgcaaagatggctcccaactagaagataccactttctgtaatcaactttttataatgaagtttaaaaatattaagccctgatacattatagggtaaaaggaaatattcatataaattaatttaaaaatcaaaatacaaggctgggcacagtggctcacacctgtaatcccaacacattctgggagaccaaggagtgaggattgcttgaggccagaaatttgagaacagcctgggcaacacagtgagactctgtctctacaaataataaaaaatttagccagacaaggtggcacacacctgtagtcccagctctcaggaggctgaggcaggaagacagcttgagcccaggagttagaagctgcagtgaaccattatcagaccactgcactccagcctggccagcagaacaagactctgactcttaaaataataaaactacaaagcttatgtttactctagctggcctcttatctaccaccaccatcccacctcagcccagtttgaaatgcaattccacagtaagtaatccctcacgttaagcttcatcttagctttattcctttgtatctgagaagcattttttaactttccatatattattcaaaatgggtgaccaaatgaaccatctatacaatctttgctcaattaaaaatatcatttctactttcttcattgtgcttggtttggatattccaaacaatcaatttaacattatcctagctacttacaagcttatactttaaagaatcatactgaggtgctttttcatatcaaatttacctgtttatt

SEQ ID NO: 133022 - DNA, 695 bp, Homo sapiens
  Payload ID: 5997
  Gene Symbol: FAM92A1
  Gene Name: family with sequence similarity 92, member A1
  ENST ID: ENST00000520937
  CDS Start-End: 55-453
ttggaatccccgtccttgggcccccgcaaggtccccggccgtgcgcgaggcagcatgatgaggcgcaccctggaaaaccggaacgctcaaacgaaacaactgcaaacagctgtctcaaatgtggagaagcattttggagaactgtgccaaatcttcgctgcctatgtgcggaaaactgccaggctgagagacaaagcagacctcctggtgaatgaaattaacgcgtatgctgctacagagaccccgcatttaaagctgggcctgatgaactttgcagatgagtttgccaaacttcaggattatcgacaagcagagaacctaaaacgggaatttcaattttcaaaaaacagaatgagtataaaaaaaattgaactcatcattgctatccatacaaatttgaagagtaatcatatttggaggtacttttggaaaaatgtggagttcttgtcatgaaacttctgtaataaacaagtaactctcaattatatatgataactggggacttaatgtttcaaagataatttatattcacaggttgaaagacttgaagccaaagtagttgaacccttgaaaacttatgggaccattgtgaaaatgaaacgggatgacctcaaagcaacactcacagcaaggaatcgagaagctaagcaattaactcagttagaaagaacacgtcagcgaaacccatctgatcg

SEQ ID NO: 133023 - DNA, 538 bp, Homo sapiens
  Payload ID: 5997
  Gene Symbol: FAM92A1
  Gene Name: family with sequence similarity 92, member A1
  ENST ID: ENST00000519679
  CDS Start-End: 36-380
ttttgtaggcagaaacggaattacagagagctgcaatggatgctagccgaacaagtcgtcatctggaggaaactattaacaactttgaaaggcagaaaatgaaggatataaagactatattttctgaatttatcacaatcgaaatgttatttcacggcaaagctttagaggtctacactgctgcctaccagaatatacaaaacattgatgaagatgaagatttagaggttttccgaaattctctgtatgcaccagattattcatctcgtttagatattgtaagagcaaattcaaagtcacctcttcagagatcactgtcagctaagtgtgtatctggaacaggacaggtgagcaagaaaccgtactctaaaggaatttgagctgctgcctttggaattgttgagttctaaaaatgtttcccctcagtcatatcacctcggtaacttatcctcccctggacctatttcttctcttctataaaatgacagaagattgcattaagtgcagctctattatttcttaattatcttttatactg

SEQ ID NO: 133024 - DNA, 1072 bp, Homo sapiens
  Payload ID: 5997
  Gene Symbol: FAM92A1
  Gene Name: family with sequence similarity 92, member A1
  ENST ID: ENST00000522324
  CDS Start-End: 99-587
aggctcccggcggctgcttgcgccccagcgcgcgcccaggcgccttggaatccccgtccttgggcccccgcaaggtccccggccgtgcgcgaggcagcatgatgaggcgcaccctggaaaaccggaacgctcaaacgaaacaactgcaaacagctgtctcaaatgtggagaagcattttggagaactgtgccaaatcttcgctgcctatgtgcggaaaactgccaggctgagagacaaagcagacctcctggtgaatgaaattaacgcgtatgctgctacagagaccccgcatttaaagctgggcctgatgaactttgcagatgagtttgccaaacttcaggattatcgacaagcagaggttgaaagacttgaagccaaagtagttgaacccttgaaaacttatgggaccattgtgaaaatgaaacgggatgacctcaaagcaacactcacagcaaggaatcgagaagctaagcaattaactcagttagaaagaacacgtcagcgaaacccatctgatcgacatgttattgtatcctttgaatttgggtctttaaaaaaatgtttaaggtatggagtacaaaagtaaatgtatatagaaattgtgcatttttacttttaaacgagtagagaatttgaatataaagattgaaaagaaatgcatttaggaattctcactatagaaattttaaagaggttacgccacctaattcaaatccccttatattgttttacacagtagactttgcaaacgaacaaacaaaaaattcagatgtttttataaacagtaaattcaaatttctgaattttattttcacatggtgatgactaaatattaattctacaattaaagatctattgttaatcctaatatatcagtgtcctctatgccctgctttgagaaaaggaaagaaaattttcccatttaatttccttcatcttttagaaataaaacaactatgtgacatcatgacttccagccagttaacctcaggagtcttaagagtataattaagatccaagttggacacaaacctagaaaggactgtctactataacaaggttcttctgtta

SEQ ID NO: 133025 - DNA, 608 bp, Homo sapiens
  Payload ID: 5997
  Gene Symbol: FAM92A1
  Gene Name: family with sequence similarity 92, member A1
  ENST ID: ENST00000523475
  CDS Start-End: 372-608
gagacttgaaaggcacttgtgcagttgacttgtcctgctccactgttttggaactctgaaaccatggaaagaagcctggctgaggtgctagacaataagaaacacgtggcccctgctgacgacctgccaatgccgtgacacagaagtgaggcctcttagatcatccagccgccagctgaccagaaaggaacgctcaaacgaaacaactgcaaacagctgtctcaaatgtggagaagcattttggagaactgtgccaaatcttcgctgcctatgtgcggaaaactgccaggctgagagacaaagcagacctcctggtgaatgaaattaacgcgtatgctgctacagagaccccgcatttaaagctgggcctgatgaactttgcagatgagtttgccaaacttcaggattatcgacaagcagaggttgaaagacttgaagccaaagtagttgaacccttgaaaacttatgggaccattgtgaaaatgaaacgggatgacctcaaagcaacactcacagcaaggaatcgagaagctaagcaattaactcagttagaaagaacacgtcagcgaaacccatctgatcgacatgttatttcacaggcagaaacg

SEQ ID NO: 133026 - DNA, 563 bp, Homo sapiens
  Payload ID: 5997
  Gene Symbol: FAM92A1
  Gene Name: family with sequence similarity 92, member A1
  ENST ID: ENST00000523453
  CDS Start-End: 1-563
aaaaccggtaacagcccgagcccagctgcccagggccgcccacactggagggctggggaacgctcaaacgaaacaactgcaaacagctgtctcaaatgtggagaagcattttggagaactgtgccaaatcttcgctgcctatgtgcggaaaactgccaggctgagagacaaagcagacctcctggtgaatgaaattaacgcgtatgctgctacagagaccccgcatttaaagctgggcctgatgaactttgcagatgagtttgccaaacttcaggattatcgacaagcagaggttgaaagacttgaagccaaagtagttgaacccttgaaaacttatgggaccattgtgaaaatgaaacgggatgacctcaaagcaacactcacagcaaggaatcgagaagctaagcaattaactcagttagaaagaacacgtcagcgaaacccatctgatcgacatgttatttcacaggcagaaacggaattacagagagctgcaatggatgctagccgaacaagtcgtcatctggaggaaactattaacaactttgaaaggcagaaaatga

SEQ ID NO: 133027 - DNA, 1014 bp, Homo sapiens
  Payload ID: 5997
  Gene Symbol: FAM92A1
  Gene Name: family with sequence similarity 92, member A1
  ENST ID: ENST00000620645
  CDS Start-End: 56-922
cttggaatccccgtccttgggcccccgcaaggtccccggccgtgcgcgaggcagcatgatgaggcgcaccctggaaaaccggaacgctcaaacgaaacaactgcaaacagctgtctcaaatgtggagaagcattttggagaactgtgccaaatcttcgctgcctatgtgcggaaaactgccaggctgagagacaaagcagacctcctggtgaatgaaattaacgcgtatgctgctacagagaccccgcatttaaagctgggcctgatgaactttgcagatgagtttgccaaacttcaggattatcgacaagcagaggttgaaagacttgaagccaaagtagttgaacccttgaaaacttatgggaccattgtgaaaatgaaacgggatgacctcaaagcaacactcacagcaaggaatcgagaagctaagcaattaactcagttagaaagaacacgtcagcgaaacccatctgatcgacatgtacttttggcagaaacggaattacagagagctgcaatggatgctagccgaacaagtcgtcatctggaggaaactattaacaactttgaaaggcagaaaatgaaggatataaagactatattttctgaatttatcacaatcgaaatgttatttcacggcaaagctttagaggtctacactgctgcctaccagaatatacaaaacattgatgaagatgaagatttagaggttttccgaaattctctgtatgcaccagattattcatctcgtttagatattgtaagagcaaattcaaagtcacctcttcagagatcactgtcagctaagtgtgtatctggaacaggacaggtatccacttgtcgactaagaaaggatcaacaagcagaagatgatgaggatgacgagttagatgttacagaagaagaaaattttcttaagtaaactacacatttccattttcatcataaatgacttgaaatccacaatgactaaattgtagaactttatactcactttgctatgttaagcctcaa

SEQ ID NO: 133028 - DNA, 1898 bp, Homo sapiens
  Payload ID: 5998
  Gene Symbol: FAM92B
  Gene Name: family with sequence similarity 92, member B
  Uniprot ID: Q6ZTR7
  ENST ID: ENST00000539556
  CDS Start-End: 157-1071
gtgggcggccccatcgcctagcaaccgggtggcagcgtcccttgagcccaggccacacagctgcacccagccctgcccggctcctcccaggcctgcaggacccctggggccctgtccttattccccagcaccgggacagccaaagctctggtcacaatgaacatcgtcttctccagggacagccaggtgagggtgatggagaataccgtggccaacaccgagaagtactttgggcagttctgctcgctgctggccgcctacacgcgcaagacggcccggctgcgggacaaggcggaccagctggtcaagcagctcatcgactttgccaactccgagaaccccgagctgcgggccaccatgaggggcttcgctgaggacctggccaaagtgcaggattaccggcaggcccaggtcgagaggctggagaccaaggtggtcaaccccctgaagctctacggggcacagatcaagcagacacgggctgagatcaagaaattcaaacatgtccaaaatcatgagatcaaacaactggaaaaactggagaaactgaggcagaagtcaccctcggatcagcaaatgatctcccaggcagagaccagagtgcagagggccgctgtggactccagccgcaccaccctccagctggaggagactgtggatggcttccagaggcagaagctcaaggacctgcagaaatttttttgtgactttgtaactattgagatggttttccatgccaaagcggtggaggtgtattctagcgccttccagaccctggagaagtatgacctggagagggatctactggattttagagccaagatgcaaggagtttatgggcattatgacactcggctgcttgccaacaccagcccccctccatctgttcttcagtctctcgccagccagggaactctgcaggtccagctgagtagggcaaatgaagaccctgaacatcctcatgccaatcatggcaggtttagtctctgtgagtgggtggttaaggggcagccagcccactgtgtgtgtgggcagggtgggcatctcatgcttccaggacattctctctaacgacgtagggtaagtgcaatcccaagccgtttaaaataatcccagactgcctggaggctttgttcttattttctgattcttttttctttgtctttgttggattgtgttaattcaaagaccttgtcttcaagctctgaatttccttcttctacttgttcaattctgttgctgagactttccagagcattttgcatttctgtgagtgtatccaatgtttcctgaagttttgattgtttttctttatgctatctatttcttggtccgagcccactgctcccggcggtgtgaccttgggaaagtctcctagcctctctgtgccttagagtcctcgcctgcagagtggcttagaacagtaacctccgtgtagggctgtgctgagtatcagatgaacagatctatacgaagcacagaaaacccggcctgttgcgcaacaaacacttgagacttgttgctgccattatcattactgatgttgctgtcgttttattattattattatttagagtgctcagagcaccatatggagcccaggaaaagaaggggaggagagtgaggacaactccatggaggaggcccccgtggaggacctcagggcactggggcagggaccccataagagagaactgcccacaacagtcagaagaacttagctggccttggatcctcaggtgggctctgctgtgtgccctcaggcaagccacgtgtcctctgagcctcagtttcctcatctgtacaacagggccaatatcactcacttcacaggttgctctgggggatcgctgtgcctggcatatagtaggtgttcaataaatgccctgtgactctca

SEQ ID NO: 133029 - DNA, 782 bp, Homo sapiens
  Payload ID: 5998
  Gene Symbol: FAM92B
  Gene Name: family with sequence similarity 92, member B
  ENST ID: ENST00000618669
  CDS Start-End: 1-617
accccctgaagctctacggggcacagatcaagcagacacgggctgagatcaagaaattcaaacatgtccaaaatcatgagatcaaacaactggaaaaactggagaaactgaggcagaagtcaccctcggatcagcaaatgatctcccaggcagagaccagagtgcagagggccgctgtggactccagccgcaccaccctccagctggaggagactgtggatggcttccagaggcagaagctcaaggacctgcagaaatttttttgtgactttgtaactattgagatggttttccatgccaaagcggtggaggtgtattctagcgccttccagaccctggagaagtatgacctggagagggatctactggattttagagccaagatgcaaggagtttatgggcattatgacactcggctgcttgccaacaccagcccccctccatctgttcttcagtctctcgccagccagagtgctcagagcaccatatggagcccaggaaaagaaggggaggagagtgaggacaactccatggaggaggcccccgtggaggacctcagggcactggggcagggaccccataagagagaactgcccacaacagtcagaagaacttagctggccttggatcctcaggtgggctctgctgtgtgccctcaggcaagccacgtgtcctctgagcctcagtttcctcatctgtacaacagggccaatatcactcacttcacaggttgctctgggggatcgctgtgcctggcatatagtaggtgttcaataaatgcc

SEQ ID NO: 133030 - DNA, 1011 bp, Homo sapiens
  Payload ID: 5998
  Gene Symbol: FAM92B
  Gene Name: family with sequence similarity 92, member B
  ENST ID: ENST00000629253
  CDS Start-End: 39-953
tattccccagcaccgggacagccaaagctctggtcacaatgaacatcgtcttctccagggacagccaggtgagggtgatggagaataccgtggccaacaccgagaagtactttgggcagttctgctcgctgctggccgcctacacgcgcaagacggcccggctgcgggacaaggcggaccagctggtcaagcagctcatcgactttgccaactccgagaaccccgagctgcgggccaccatgaggggcttcgctgaggacctggccaaagtgcaggattaccggcaggcccaggtcgagaggctggagaccaaggtggtcaaccccctgaagctctacggggcacagatcaagcagacacgggctgagatcaagaaattcaaacatgtccaaaatcatgagatcaaacaactggaaaaactggagaaactgaggcagaagtcaccctcggatcagcaaatgatcggccaggcagagaccagagtgcagagggccgctgtggactccagccgcaccaccctccagctggaggagactgtggatggcttccagaggcagaagctcaaggacctgcagaaatttttttgtgactttgtaactattgagatggttttccatgccaaagcggtggaggtgtattctagcgccttccagaccctggagaagtatgacctggagagggatctactggattttagagccaagatgcaaggagtttatgggcattatgacactcggctgcttgccaacaccagcccccctccatctgttcttcagtctctcgccagccagggaactctgcaggtccagctgagtagggcaaatgaagaccctgaacatcctcatgccaatcatggcaggtttagtctctgtgagtgggtggttaaggggcagccagcccactgtgtgtgtgggcagggtgggcatctcatgcttccaggacattctctctaacgacgtagggtaagtgcaatcccaagccgtttaaaataatcccagactgcctggaggc

SEQ ID NO: 133031 - DNA, 1105 bp, Homo sapiens
  Payload ID: 5999
  Gene Symbol: FAM96A
  Gene Name: family with sequence similarity 96, member A
  Uniprot ID: Q9H5X1
  ENST ID: ENST00000300030
  CDS Start-End: 251-733
aatgtgctgacgagccgcgaagattgtttttgtcccgccgaaatcgagcaaagcacgctggaacttgtagtccttgaggccccttccctaggtccttcgagctactccgtctggccccgccttttctctgctctcctgaacctttaggcttgtctcggcccatttgaagaccaggaagttgatcaatcccgaggctgctgagagacggtggcgcgattgggacagtcgccagggatggctgagcgtgaagatgcagcgggtgtccgggctgctctcctggacgctgagcagagtcctgtggctctccggcctctctgagccgggagctgcccggcagccccggatcatggaagagaaagcgctagaagtttatgatttgattagaactatccgggacccagaaaagcccaatactttagaagaactggaagtggtctcggaaagttgtgtggaagttcaggagataaatgaagaagaatatctggttattatcaggttcacgccaacagtacctcattgctctttggcgactcttattgggctgtgcttaagagtaaaacttcagcgatgtttaccatttaaacataagttggaaatctacatttctgaaggaacccactcaacagaagaagacatcaataagcagataaatgacaaagagcgagtggcagctgcaatggaaaaccccaacttacgggaaattgtggaacagtgtgtccttgaacctgactgatagctgttttaagagccactggcctgtaattgtttgatatatttgtttaaactctttgtataatgtcagagactcatgtttaatacataggtgatttgtacctcagagtattttttaaaggattctttccaagcgagatttaattataaggtagtacctaatttgttcaatgtataacattctcaggatttgtaacacttaaatgatcagacagaataatattttctagttattatgtgcaagatgagttgctatttttctgatgctcattctgatacaactatttttcgtgtcaaatatctactgtgcccaaatgtactcaatttaaatcattactctgtaaaataaataagcagatgattcttataatga

SEQ ID NO: 133032 - DNA, 826 bp, Homo sapiens
  Payload ID: 5999
  Gene Symbol: FAM96A
  Gene Name: family with sequence similarity 96, member A
  Uniprot ID: Q9H5X1
  ENST ID: ENST00000380290
  CDS Start-End: 41-349
gcgcgattgggacagtcgccagggatggctgagcgtgaagatgcagcgggtgtccgggctgctctcctggacgctgagcagagtcctgtggctctccggcctctctgagccgggagctgcccggcagccccggatcatggaagagaaagcgctagaagtttatgatttgattagaactatccgggacccagaaaagcccaatactttagaagaactggaagtggtctcggaaagttgtgtggaagttcaggagataaatgaagaagaatatctggttattatcaggttcacgccaacagtacctcattgctctttggcgactcttattgttggaaatctacatttctgaaggaacccactcaacagaagaagacatcaataagcagataaatgacaaagagcgagtggcagctgcaatggaaaaccccaacttacgggaaattgtggaacagtgtgtccttgaacctgactgatagctgttttaagagccactggcctgtaattgtttgatatatttgtttaaactctttgtataatgtcagagactcatgtttaatacataggtgatttgtacctcagagtattttttaaaggattctttccaagcgagatttaattataaggtagtacctaatttgttcaatgtataacattctcaggatttgtaacacttaaatgatcagacagaataatattttctagttattatgtgcaagatgagttgctatttttctgatgctcattctgatacaactatttttcgtgtcaaatatctactgtgcccaaatgtactcaatttaaatcattactctgtaaaataaataag

SEQ ID NO: 133033 - DNA, 561 bp, Homo sapiens
  Payload ID: 5999
  Gene Symbol: FAM96A
  Gene Name: family with sequence similarity 96, member A
  ENST ID: ENST00000559950
  CDS Start-End: 90-482
atttgaagaccaggaagttgatcaatcccgaggctgctgagagacggtggcgcgattgggacagtcgccagggatggctgagcgtgaagatgcagcgggtgtccgggctgctctcctggacgctgagcagagtcctgtggctctccggcctctctgagccgggagctgcccggcagccccggatcatggaagagaaagcgctagaagtttatgatttgattagaactatccgggacccagaaaagcccaatactttagaagaactggaagtggtctcggaaagttgtgtggaagttcaggagataaatgaagaagaatatctggttattatcaggttcacgccaacagtacctcattgctctttggcgactcttattgggctgtgcttaagagtaaaacttcagcgatgtttaccatttaaacataagttggaaatctacatttctgaaggaacccactcaacagaagaagacagtaagtgaatgttgaaacataattgaaaaacaacttcagatagtattttatcttggatactggattcttctgccagccaagaatcta

SEQ ID NO: 133034 - DNA, 636 bp, Homo sapiens
  Payload ID: 5999
  Gene Symbol: FAM96A
  Gene Name: family with sequence similarity 96, member A
  ENST ID: ENST00000559705
  CDS Start-End: 86-295
gaagaccaggaagttgatcaatcccgaggctgctgagagacggtggcgcgattgggacagtcgccagggatggctgagcgtgaagatgcagcgggtgtccgggctgctctcctggacgctgagcagagtcctgtggctctccggcctctctgagccgggagctgcccggcagccccggatcatggaagagaaagcgctagaagtttatggttggaatgcaatggcgggatctcggctcactgcaacctctgccttctggtttcaagtgattctcctgcctcagtctcctaagtagctgggattacaggcgcccggcaccacgcctggatttgattagaactatccgggacccagaaaagcccaatactttagaagaactggaagtggtctcggaaagttgtgtggaagttcaggagataaatgaagaagaatatctggttattatcaggttcacgccaacagtacctcattgctctttggcgactcttattgggctgtgcttaagagtaaaacttcagcgatgtttaccatttaaacataagttggaaatctacatttctgaaggaacccactcaacagaagaagacatcaataagcagataaatgacaaagagcgagtggcagctgcaatggaaa

SEQ ID NO: 133035 - DNA, 1536 bp, Homo sapiens
  Payload ID: 5999
  Gene Symbol: FAM96A
  Gene Name: family with sequence similarity 96, member A
  Uniprot ID: Q9H5X1
  ENST ID: ENST00000557835
  CDS Start-End: 28-336
agtcgccagggatggctgagcgtgaagatgcagcgggtgtccgggctgctctcctggacgctgagcagagtcctgtggctctccggcctctctgagccgggagctgcccggcagccccggatcatggaagagaaagcgctagaagtttatgatttgattagaactatccgggacccagaaaagcccaatactttagaagaactggaagtggtctcggaaagttgtgtggaagttcaggagataaatgaagaagaatatctggttattatcaggttcacgccaacagtacctcattgctctttggcgactcttattgttggaaatctacatttctgaaggaacccactcaacagaagaagacagtaagtgaatgttgaaacataattgaaaaacaacttcagatagtattttatcttggatactggattcttctgccagccaagaatctactgggttactttcaaaaaagtgcacaattggttattggctcttccttcctaggtgaggaaacctaggcatttcaaagaagtaatttttgcagtggactccgagtgcactagagcccacggatgttgactggtttaggccagtggctacacatctgtaaagaatatccagtgctggggaccttgacttatgagctctaagtaggcttcttttctttggtgacaggatagagagctgtgtacttgaaattgaaggtctagcaagtagagctttagtgaatcttggggtaggtgctgtctctctgggttagtatattagaatgggagtggggaaccttttttatatagaggacctctggcctacagagagaaatcaatcagtagctacttaaaaatagcagaagtggggtttgggaaaagcaaaaaacaaaatgttctgtatgatccctgtgttacattaaaaacataattttaatgtttttaatctacaaatgatagagtgcaaataatgagaaatacatttaaaaggcatgttgtacttaagtttcatcactaagtaaattgagaaggtgggaaaaaatagcagaggaatggaagaaagagctaatagaggaagagcaacagtgagatagataccaagaagactcagaaaggcatacacagggctggagagagacacacaaaatctcctacataaaagagagctatagagagggaagcctgctgcttccagaggaacagcctatccaggaaactttttaggtactgtcatgaaaactgttaaaaaccatgccctatttatagttctagacatgtagattattatactctttgtgggctgaatttctttaaaccccacgagctgagggcttctacctgtaatttagaaaaataagagtttaggtaccctaaatccactcaggttatcgttttgaaattccttgaatgataggattttacagcagcaatagtattaagtcttatgagtcttgtttttcatttagtaagtatttattaagtgccttctatgtgtgggtacagttcagcctttgagatacattcctgcctttgtggagcctacattgtagta

SEQ ID NO: 133036 - DNA, 676 bp, Homo sapiens
  Payload ID: 6000
  Gene Symbol: FAM96B
  Gene Name: family with sequence similarity 96, member B
  Uniprot ID: Q9Y3D0
  ENST ID: ENST00000422424
  CDS Start-End: 37-528
cgcacgcctgctaggatcagcggtggtggttccgcgatggtaggcggcggcggggtcggcggcggcctcctggagaatgccaaccccctcatctaccagcgctctggggagcggcctgtgacggcaggcgaggaggacgagcaggttcccgacagcatcgacgcacgcgagatcttcgatctgattcgctccatcaatgacccggagcatccactgacgctagaggagttgaacgtagtagagcaggtgcgggttcaggttagcgaccccgagagtacagtggctgtggctttcacaccaaccattccgcactgcagcatggccacccttattggtctgtccatcaaggtcaagcttctgcgctcccttcctcagcgtttcaagatggacgtgcacattactccggggacccatgcctcagagcatgcagtgaacaagcaacttgcagataaggagcgggtggcagctgccctggagaacacccacctcttggaggttgtgaatcagtgcctgtcagcccgctcctgagcctggcctttgacccctcagcctgcatactggtatcctggtcccagctcctgccagggctgttaccgttgttttcttgaatcactcacaatgagaaactaacattttgctttttgtaataaagttaatttatattcagttcccagca

SEQ ID NO: 133037 - DNA, 696 bp, Homo sapiens
  Payload ID: 6000
  Gene Symbol: FAM96B
  Gene Name: family with sequence similarity 96, member B
  ENST ID: ENST00000567511
  CDS Start-End: 1-484
ggtaggcggcggcggggtcggcggcggcctcctggagaatgccaaccccctcatctaccagcgctctggggagcggcctgtgacggcaggcgaggaggacgagcaggttcccgacagcatcgacgcacgcgagatcttcgatctgattcgctccatcaatgacccggagcatccactgacgctagaggagttgaacgtagtagagcaggtgcgggttcaggttagcgaccccgagagtacagtggctgtggctttcacaccaaccattccgcactgcagcatggccacccttattggtctgtccatcaaggtcaagcttctgcgctcccttcctcagcgtttcaagatggacgtgcacattactccggggacccatgcctcagagcatgcaggaccagagtgtgtcaggcttcagcagcgcaggaggcagccagggggagggatcctaagaaggcagattagtgaacaagcaacttgcagataaggagcgggtggcagctgccctggagaacacccacctcttggaggttgtgaatcagtgcctgtcagcccgctcctgagcctggcctttgacccctcagcctgcatactggtatcctggtcccagctcctgccagggctgttaccgttgttttcttgaatcactcacaatgagaaactaacattttgctttttgtaataaagttaatttatatt

SEQ ID NO: 133038 - DNA, 446 bp, Homo sapiens
  Payload ID: 6000
  Gene Symbol: FAM96B
  Gene Name: family with sequence similarity 96, member B
  ENST ID: ENST00000568572
  CDS Start-End: 1-321
gacagcatcgacgcacgcgagatcttcgatctgattcgctccatcaatgacccggagcatccactgacgctagaggagttgaacgtagtagagcaggtgcgggttcaggttagcgaccccgagagtacagtggctgtggctttcacaccaaccattccgcactgcagcatggccacccttattggtctgtccatcaaggtcaagcttctgcgctcccttcctcagcgtttcaagatggacgtgcacattactccggggacccatgcctcagagcatgcagtgaacaagcaacttgcagataaggagcggcctggcctttgacccctcagcctgcatactggtatcctggtcccagctcctgccagggctgttaccgttgttttcttgaatcactcacaatgagaaactaacattttgctttttgtaataaagttaatttatattca

SEQ ID NO: 133039 - DNA, 713 bp, Homo sapiens
  Payload ID: 6000
  Gene Symbol: FAM96B
  Gene Name: family with sequence similarity 96, member B
  ENST ID: ENST00000562362
  CDS Start-End: 19-129
agcggtggtggttccgcgatggtaggcggcggcggggtcggcggcggcctcctggagaatgccaaccccctcatctaccagcgctctggggagcggcctgtgacggcaggcgaggaggacgagcagtgatatcgagcagctggtggagccgcatcccagcagggcgttcctggcagagggttctaagtgggcaagggcgcagagtcccttttccttcacttcccacatctgattcgctccatcaatgacccggagcatccactgacgctagaggagttgaacgtagtagagcaggtgcgggttcaggttagcgaccccgagagtacagtggctgtggctttcacaccaaccattccgcactgcagcatggccacccttattggtctgtccatcaaggtcaagcttctgcgctcccttcctcagcgtttcaagatggacgtgcacattactccggggacccatgcctcagagcatgcagtgaacaagcaacttgcagataaggagcgggtggcagctgccctggagaacacccacctcttggaggttgtgaatcagtgcctgtcagcccgctcctgagcctggcctttgacccctcagcctgcatactggtatcctggtcccagctcctgccagggctgttaccgttgttttcttgaatcactcacaatgagaaactaacattttgctttttgtaataaagttaatttatattc

SEQ ID NO: 133040 - DNA, 2816 bp, Homo sapiens
  Payload ID: 6001
  Gene Symbol: FAM98A
  Gene Name: family with sequence similarity 98, member A
  Uniprot ID: Q8NCA5
  ENST ID: ENST00000238823
  CDS Start-End: 142-1698
acgctccggacatgcgcagtgcgggagctgaggcgccagctgtggatttggaagttccggggaagtcgcgcatgcgcgagtgtacgcgttgccggcgaagaggggagcctgacgactcggaaatttgaataccacagtagcatggagtgtgacctcatggagactgacatcttggagtcgttggaagatctaggttacaagggcccattgttggaagatggagcgctctctcaggcagtctctgctggagccagttcccccgagtttaccaaactctgtgcttggctggtgtctgaattaagagtgctctgtaaactagaggaaaacgtgcaagcaactaacagtccgagtgaagctgaagaattccagcttgaggtgagtgggctactaggggagatgaactgcccgtatctttcactgacatctggggatgtgaccaagcgccttctcattcagaagaactgcctcctcttgctcacatacctcatctcagaactagaagctgccagaatgctctgtgtgaatgctcctccaaaaaaagctcaagaaggaggcggtagtgaggtctttcaagagttgaaaggcatatgtattgctctaggaatgtccaaacctccagccaatataactatgttccaattcttcagcgggattgaaaaaaaattaaaggaaacattagcaaaagttccacctaatcatgtgggaaagcctttactgaagaagccaatgggaccagcccactgggaaaagatagaagcaattaaccaagccatagccaatgaatatgaagtccggagaaagctgctaataaaacgtttggatgtcactgtacaatcctttggctggtctgacagagctaagagccagacagaaaaattagccaaggtttaccagccgaaacgttcagtcttatcccctaaaactactatttctgttgcccatcttttggctgcaaggcaggacttgtcaaagattttaaggacaagcagcggctctataagagaaaagactgcctgtgccatcaataaggtgttgatgggcagggtgcctgacagaggtggtagacccaatgaaatcgaacctccacccccagagatgccaccgtggcagaagaggcaagatggcccccagcagcaaacaggaggccgaggaggagggagaggtggctatgaacattcctcatacggaggacgaggaggtcatgaacaaggaggcgggagaggtggacgtggtggctatgaccatggtggccgagggggaggaagaggaaataagcatcaaggaggctggacagatggagggagtggtggaggaggtggctaccaagatggtggttatcgagattcaggtttccagccaggtggctatcatggtggccacagcagtggtggctatcaaggcggaggttatggtggcttccaaacatcttcttcatatacaggaagtggataccagggtggtggctaccagcaggacaatagataccaagatggcgggcaccatggtgatcgtggtggtggtcgtggtgggcgaggtggtcgtggaggccgaggtggtcgtgcaggccagggaggaggctggggaggaagagggagccagaattatcaccaagggggtcaatttgaacagcatttccagcatggaggttatcagtataatcattctggatttggacagggaagacattacactagttgaggctaccgaaccttacattttgctagagctcaagtaatagaaacttagtttcagaatcctgaattcagcacctattttgaattaatgtgagaccacaggtggcaggcagattcctgcttggcataagcatttgtaggtcttcattcaattctgttagatttttttattggacttacataatgccgtttatttgagaaacacataacatctctcctttctatgaaaaattttttaaaaggtggttaaaattgcctttaattgcccagtagactaattccacagtcagaacatgcaaacttttttgaagaaattacttgaataagtagttttcatgttttcaatatgcagttttgaaaatgaggattcacctagacttttttagatttactactaggaaaccttcctcatatgaataaccatttatatgtgttttgcttaaagtattccaatgcctattttccaagcacagttctgccccccggttgacttttatgccacgtgtgcttcatgatggaacttttaggtcagttcctattaaatgagctcttttgcagatagcacattcagtagccttattttgttgatggaatactgtatcatatgctcaactctgaaaaccttgaacacggccaaaatccataaagattataaaagcaaactaagttgtgaagctatagtacatgtaggcatttagttaagtatagcaattcaaactgacctgcatccatccaaaacaaattcctccttcaaccttatttttacttgaaatttgctagaagaaatagcaaaccgaaatttgttttatgcatgagttaataccactggctcagcaaatacaagttagtttgctttaagcaggtaactttttttgtaatggaagaaatgcactacaaagttaagacagatttttgctaagtgcaggaggccctttattattgctgcagaaaacaaaagcctggctgagttgatgttttacattctcccttactgaaatctacatgacatgatgcttcttgctgggtttttgtacatgtaaacattgtcaagctgtgaaagaaaatggctggaggtgtgctttgtgtgaaaggtgagcaataaagtatctgttaagttctctc

SEQ ID NO: 133041 - DNA, 2818 bp, Homo sapiens
  Payload ID: 6001
  Gene Symbol: FAM98A
  Gene Name: family with sequence similarity 98, member A
  ENST ID: ENST00000403368
  CDS Start-End: 71-1009
atgcgcgagtgtacgcgttgccggcgaagaggggagcctgacgactcggaaatttgaataccacagtagcatggagtgtgacctcatggagactgacatcttggagtcgttggaagatctaggttacaagggcccattgttggaagatggagcgctctctcaggcagtctctgctggagccagttcccccgagtttaccaaactctgtgcttggctggtgtctgaattaagagtgctctgtaaactagaggaaaacgtgcaagcaactaacagtccgagtgaagctgaagaattccagcttgaggtgagtgggctactaggggagatgaactgcccgtatctttcactgacatctggggatgtgaccaagcgccttctcattcagaagaactgcctcctcttgctcacatacctcatctcagaactagaagctgccagaatgctctgtgtgaatgctcctccaaaaaaagctcaagaaggaggcggtagtgaggtctttcaagagttgaaaggcatatgtattgctctaggaatgtccaaacctccagccaatataactatgttccaattcttcagcgggattgaaaaaaaattaaaggaaacattagcaaaagttccacctaatcatgtgggaaagcctttactgaagaagccaatgggaccagcccactgggaaaagatagaagcaattaaccaagccatagccaatgaatatgaagtccggagaaagctgctaataaaacgtttggatgtcactgtacaatcctttggctggtctgacagagctaagagccagacagaaaaattagccaaggtttaccagccgaaacgttcagtcttatcccctaaaactactatttctgttgcccatcttttggctgcaaggcaggacttgtcaaagattttaaggacaagcagcggctctataagagaaaagactgcctgtgccatcaataaggtgattagagtacctttaattttttccaaatgcatttatttctgttcataaaataaaagtttaaaatatctttcctattctgtaggtgttgatgggcagggtgcctgacagaggtggtagacccaatgaaatcgaacctccacccccagagatgccaccgtggcagaagaggcaagatggcccccagcagcaaacaggaggccgaggaggagggagaggtggctatgaacattcctcatacggaggacgaggaggtcatgaacaaggaggcgggagaggtggacgtggtggctatgaccatggtggccgagggggaggaagaggaaataagcatcaaggaggctggacagatggagggagtggtggaggaggtggctaccaagatggtggttatcgagattcaggtttccagccaggtggctatcatggtggccacagcagtggtggctatcaaggcggaggttatggtggcttccaaacatcttcttcatatacaggaagtggataccagggtggtggctaccagcaggacaatagataccaagatggcgggcaccatggtgatcgtggtggtggtcgtggtgggcgaggtggtcgtggaggccgaggtggtcgtgcaggccagggaggaggctggggaggaagagggagccagaattatcaccaagggggtcaatttgaacagcatttccagcatggaggttatcagtataatcattctggatttggacagggaagacattacactagttgaggctaccgaaccttacattttgctagagctcaagtaatagaaacttagtttcagaatcctgaattcagcacctattttgaattaatgtgagaccacaggtggcaggcagattcctgcttggcataagcatttgtaggtcttcattcaattctgttagatttttttattggacttacataatgccgtttatttgagaaacacataacatctctcctttctatgaaaaattttttaaaaggtggttaaaattgcctttaattgcccagtagactaattccacagtcagaacatgcaaacttttttgaagaaattacttgaataagtagttttcatgttttcaatatgcagttttgaaaatgaggattcacctagacttttttagatttactactaggaaaccttcctcatatgaataaccatttatatgtgttttgcttaaagtattccaatgcctattttccaagcacagttctgccccccggttgacttttatgccacgtgtgcttcatgatggaacttttaggtcagttcctattaaatgagctcttttgcagatagcacattcagtagccttattttgttgatggaatactgtatcatatgctcaactctgaaaaccttgaacacggccaaaatccataaagattataaaagcaaactaagttgtgaagctatagtacatgtaggcatttagttaagtatagcaattcaaactgacctgcatccatccaaaacaaattcctccttcaaccttatttttacttgaaatttgctagaagaaatagcaaaccgaaatttgttttatgcatgagttaataccactggctcagcaaatacaagttagtttgctttaagcaggtaactttttttgtaatggaagaaatgcactacaaagttaagacagatttttgctaagtgcaggaggccctttattattgctgcagaaaacaaaagcctggctgagttgatgttttacattctcccttactgaaatctacatgacatgatgcttcttgctgggtttttgtacatgtaaacattgtcaagctgtgaaagaaaatggctggaggtgtgctttgtgtgaaaggtgagcaataaagtatctg

SEQ ID NO: 133042 - DNA, 260 bp, Homo sapiens
  Payload ID: 6001
  Gene Symbol: FAM98A
  Gene Name: family with sequence similarity 98, member A
  ENST ID: ENST00000431950
  CDS Start-End: 57-260
gcgttgccggcgaagaggggagcctgacgactcggaaatttgaataccacagtagcatggagtgtgacctcatggagactgacatcttggagtcgttggaagatctaggttacaagggcccattgttggaagatggagcgctctctcaggcagtctctgctggagccagttcccccgagtttaccaaactctgtgcttggctggtgtctgaattaagagtgctctgtaaactagaggaaaacgtgcaagcaactaacagt

SEQ ID NO: 133043 - DNA, 4388 bp, Homo sapiens
  Payload ID: 6002
  Gene Symbol: FAM98B
  Gene Name: family with sequence similarity 98, member B
  Uniprot ID: Q52LJ0
  ENST ID: ENST00000397609
  CDS Start-End: 36-1337
acttagagcgccgaacagctctgggccaaaggaccatgagagggccggagccgggtccccaaccgacgatggagggagacgtgctggacacactggaggcgctggggtataaaggaccattgttagaagagcaagcccttacaaaggcggcagagggtggattatcttcacctgaattttcagagctctgtatttggttaggctctcaaataaaatcattatgcaacttggaagaaagtatcacgtctgctggaagagatgatctagagagcttccagcttgagataagtggctttttaaaagaaatggcatgtccatattctgtactcatatcaggagatattaaagatcgtttaaaaaagaaggaggactgtttgaaacttctattatttttaagtacagaacttcaagcttcacagatattacagaacaagaaacataaaaattctcaattagataaaaatagtgaagtttatcaggaagttcaagctatgtttgatacacttggtatacccaagtcaacaacttctgacattccgcatatgctaaaccaagtggaatcaaaggtgaaagatattctctcaaaggtccagaaaaatcatgtgggaaaaccactgctgaaaatggatttaaattcagaacaggcggaacaactggaaagaatcaatgatgctctttcctgtgaatatgagtgccgccgacgaatgttaatgaaacgattagatgtgactgtacagtcctttggatggtctgatagagcaaaggtaaaaacagatgatatagcaagaatttatcagcctaagcgttatgctttgtcacccaagacaacgattacaatggcacatctacttgctgctcgtgaagatctatccaagatcattaggacaagtagtggcaccagccgggagaagaccgcatgtgccattaataaggtgctgatgggaagggtgcctgacaggggaggccggccgaatgaaattgaaccaccacctccagaaatgcccccttggcaaaagagacaagaaggcggcggtggaaggggtggttggggtggtggtggtggaggtggtggtagaggaggtggtgggggtgggggtgggagaggtggctgggggggtggaggaggaggttggggaggtggtgggggagggggaggagggtgggggggaggaggaggaggtggtagaggaggtttccaaggcaggggagattatggtggaagagggggttatggtggaagagggggctatggtggaagaggctatggagatccatatggaggaggtggtggtggtggtggtggtggtggtggaggaggtggatatagaagatactaaaaactataaaaattagatagcagtgcttgcttctttatagatacattagaaatagtgttccaaataacatacttgaatatcatctttgaagtaaacaccatgttagactccctggtgataccactcttgaattggttaatatgtaagaacattgttttttattaccagttgatctctcaaatgaagtgatgactttttccatattctgtgtacccttgagcatgttgtgtctttttaaaaaacaaaaaaaagaacaaaaattattttttaaaatgtaaatatttattaccatcagacttggaaaatggaaagtattttattgtcatgattgaatttagattgttacctgtattttgttcaggtttgagacatataaaagaccccacctgtaatagaaaggaatatagacccttgcctcacctgtattgctgtggatgtgttttgtgggtttttcattcgattttacaaaatagggaaaggcacttccagttgtatttagtaggcagttgttgtgaatcatttttttctcttataggaggagattcctctctagccatgtttctgttaaagtttcattaattgaagcccaagtttactttttactgtacatacttattttctaattggatttgaaatcagcatgattttgtttgacaaagcaaagtttaagattgaggtcagaaatactttaatggagcaaagacacataccaactttacatgacggtgtgagaaatagtcctataaactggtctcttcatcatttatgctctcactttagatatccaaatattaaaaggcaggctgacctgtatcacacagaattaaggcagtaattttctgcttcagtagatcaagggtagggctaaggcatcctgtggtaattctgattcacagctagatttgggaaacacaaagttagggaatggctatatgtgatttgctagttggagcagtcaaagtcttagctatcaagagttgtgaatttgaatcatggcactaggtcaggggtgctatggattgaaatgaccttagttctcaaggagtgatttgtcctcatttgtcaaatgaggaatgagacacttaccatcatctcaggttgtttcttaaagacctaaatacaaatacaatttgttaaaaacttacagagggcctattttgaatgctttaagatgtaggccaagtaatgtatttttctcttagtgtagaaagttaagagaaaaagagctggtaccataaattttttcaatcttagtgtaaaatctgtatctcattgtaggcttctggtcaatacctatacataacaacttaatgtgatctaaccaactcaactgatagaaagctgaattgttcccagtggacaagtggtatttgatgtttagcaggtttttttgttgttatttttttggtaaactctgtggtaaaatctaaaataatgttaaaaccctaaaagtaactattgaatattctgtaatcttagacatgtatttttcaagctaaccctttgaagaaatgtgttcaaggtaggaaaatataaaattttttggttatttgtaaatttattttttgtgtgtttatatttaatgaaaagatgtaatttcatttgtgatagctgaaaaaaaggctttccataattaagaaaatacctttatcagtagctatgaactctgaaaaataatttttaaaaacttttaagaaaaaaactacttgagtaaaatatttcaagagttgtttaaaaatcttctttaaaacctttacatttctgcctcacttcttttttggtagcattagttgctgatgaaggagatttacaactactttcaacttttttaccactaaaggtttatggtaaatatggcagaaacaatagtttatcagtttcattagattttccataagatttctttgtacctttataggagtgctgcttgggttattcactacaatcacttatttcctatcaaagtttagcacttgctcctggaatcgtgttggagctgaaaccactcctatgtacacattcctataaaccttaattgaatgaaaagctgaatcaggtagactcttaatattttactctttcctgtaaggtgggattttcctgataatctttgttcagtaaaaatttcttttgtagaacagtttgctgagcagtatctggaatagcaggaaggaaatttggggccttaatgggaaaggccatagtgtgaaaatgttttataaattgagtgcaatacgacatggagtatgatgaatggcactccactgcttcctaaaatccaacactttttttgatacctccttttcattcttttttgcctggttctcaatttcattttttaattacctcattgtccttccccttttttcttctctttttgtccagcctggtacctaatagcaaatatagacatgatcttactgggagtttctgcctaaagtagtcatctttcctctcgaccgtataaagagcatgtattctgtctataacataatcaccacactattactcataagcacacatcaaaagggaaacaagggttttctttgaacttacttttgttttgcagatcagggaaaccttgcctcattaaacagaaaaaggaaaacattttaaataaaaaacatcttattacctgtatctgtgacaagaggaggcatgacaacctaaaaaaaatttgtgaccagaaaaatgtcctgagcagtgatactatctataccttggaaggagcacaggttagagaaatgtggggatgaaaattggggaaggtgagcaggcagtttaatcttgccttcaggatcaggctgtcagtgtgactttattactttgtatgaagtattatgaattgcccaaatgataaatacacccccatctaaatgttccagaatgcattccacagaggaatttgagtgactgaaatttttcctctttcttcattggtgtggttaaacaaaaattagctggggattaagggaaaattgtggctatgtctgatcattctaaataatcatgaccacaaataaattgccctgagtaggtctgtaacctgga

SEQ ID NO: 133044 - DNA, 3111 bp, Homo sapiens
  Payload ID: 6002
  Gene Symbol: FAM98B
  Gene Name: family with sequence similarity 98, member B
  Uniprot ID: Q52LJ0
  ENST ID: ENST00000491535
  CDS Start-End: 9-1001
aaaggaccatgagagggccggagccgggtccccaaccgacgatggagggagacgtgctggacacactggaggcgctggggtataaaggaccattgttagaagagcaagcccttacaaaggcggcagagggtggattatcttcacctgaattttcagagctctgtatttggttaggctctcaaataaaatcattatgcaacttggaagaaagtatcacgtctgctggaagagatgatctagagagcttccagcttgagataagtggctttttaaaagaaatggcatgtccatattctgtactcatatcaggagatattaaagatcgtttaaaaaagaaggaggactgtttgaaacttctattatttttaagtacagaacttcaagcttcacagatattacagaacaagaaacataaaaattctcaattagataaaaatagtgaagtttatcaggaagttcaagctatgtttgatacacttggtatacccaagtcaacaacttctgacattccgcatatgctaaaccaagtggaatcaaaggtgaaagatattctctcaaaggtccagaaaaatcatgtgggaaaaccactgctgaaaatggatttaaattcagaacaggcggaacaactggaaagaatcaatgatgctctttcctgtgaatatgagtgccgccgacgaatgttaatgaaacgattagatgtgactgtacagtcctttggatggtctgatagagcaaaggtaaaaacagatgatatagcaagaatttatcagcctaagcgttatgctttgtcacccaagacaacgattacaatggcacatctacttgctgctcgtgaagatctatccaagatcattaggacaagtagtggcaccagccgggagaagaccgcatgtgccattaataaggttggtgtttctttcagtacagtggaaaatgaattgatgatatcttacttaatgtttttacagattttagtctatttttctttcatgtcctggtaaatgtttagaaaaaagagtggcaggggggttcagtctaggcttagttatgttatttttgtgtatgtgtgtatgttcacttgaatttgtgtattcataaatcaaagtattttctgaattagaggaattatgaattgtttttgtcaaagctttagcaagaattatgttccatctttctaaaaagtaatcattttttgtcagtaagaatctttcggaattgtttcaagtactgacagattcgttatatccttggtgtaaagggaagaagagtttgtgctttagagtcagaccaatctgggttcccatcctggctctgtcatttacttacagaaatgaccctgagcaagctactgaacttctttgagcttctgtttcctgatttggagtatacatccatttctctgacagtagtctatttaaacaagctcaaggagtctgaatttttcactttacaacagcaataacaataaagtaatttagtatgtttatgtcagcttaactggcatgtcctcttcatttaggtagagcactccatggcaaactttattacaaaagagcaaaaaatcagaaataagggatttggataattttaaagcatcgcttctcactcagtgtaacttgagataaaataccttttcagagggatggttgtttttaaagtcattttgctaactattgctaagttaggcatcaccagtgtttgcctctgtgcttccactgtggctcaatcctatgttctgaaagtgttctctctttaaatatattacctaacatcttgcattgggtgataatttagtcttgctggatcaagagttctatttctgtaagtaacattggccatctcttctgagtttataatttatggtctcattatttgagggtagtcttatgatcagttctggcatctccatatgcccaccaacataccatgtttggtagagagaccagtgagaataataaccaagaaaggctgttttttggatttggtagttaggacatcattgccatctttaaaagaatgttgcatacttagaaccttgtctcactttgaggatattgcactttttatatttcatttgtgacataaatcctaaacttggttttgattggaggatcaatggaagtgtataattaattggtcattttggttgaggcagttgcttttttactttctttcctgaaaggcagtagcaggaagctattggcttccccttgtctgtggtgagcagatgacacccttcttattgctatctttcctctgctcatggcatataaagctgctactttttatagaaggttggatacttaaactcttccctagtttatttttgaaaggattataaagcatagtaaaggaattatattaactgtgttttccttttaataatatggtactagtatcatcactgaaagtaagtgagcttaagtttcttaaaagaagcagttcattgagaatccttctctctctttgcagtgatacctggaattatagtttttatatcaatctctgacctcattaaggtcccatgttatatgtacttcatacatttttgaaatgaaatgtgcttaggaatataatcttttattggataatcaattaccaaatcaatggcaatggaaagtccagagttgttattgtataaatggatattaagttaatgaatgtaaggtatgtcgttatatatataaaaaatgttttcctaaaagaacttcttagtgaaatgggtactacatttgttacagaatttgctaaacaaatttaagtgagaaaaaaattaagcctttaagtttcagaaatactctctcagattgtttaaaaataatatattctaggctgggtgtggtggctcatgcctgtaatcccagcactctgggaggccgaggcaggcggatcacgaggtcaggagatcaagaccatcctggctaacacgttgaaaccctgtctccactaaaaatacaaaaaattagctgggcgtggtggcgggtgcctgtagtcccaactactcggggggctgaggcaggagaatggcgtgaacccaggaggcagagcttgcagtgagctgagatcatgccactgcactccagcctgggcaacagagcaagactccatctc

SEQ ID NO: 133045 - DNA, 305 bp, Homo sapiens
  Payload ID: 6002
  Gene Symbol: FAM98B
  Gene Name: family with sequence similarity 98, member B
  ENST ID: ENST00000559431
  CDS Start-End: 1-305
atatcaggagatattaaagatcgtttaaaaaagaaggaggactgtttgaaacttctattatttttaagtacagaacttcaagcttcacagatattacagaacaagaaacataaaaattctcaattagataaaaatagtgaagtttatcaggaagttcaagctatgtttgatacacttggtatacccaagtcaacaacttctgacattccgcatatgctaaaccaagtggaatcaaaggtgaaagatattctctcaaagatccatatggaggaggtggtggtggtggtggtggtggtggtggagga

SEQ ID NO: 133046 - DNA, 1271 bp, Homo sapiens
  Payload ID: 6003
  Gene Symbol: FAM98C
  Gene Name: family with sequence similarity 98, member C
  Uniprot ID: Q17RN3
  ENST ID: ENST00000252530
  CDS Start-End: 20-1069
gcgccgagaccacactttcatggaggcggtgaaggcggaagcgtgggagggggccgcggtggcccaggacctgctggctctggggtatggaggtgtcccgggggcggcgtcgcggggcgcctcatgcccagacttcagggggctgtgcgtgcggctggcggcggagctggcgacgctgggcgccctcgagcagcagcgagaggcgggcgcggaggtgctgagcgccggcgacggccctggcgcggaggaggactttctgcggcagctcggcagcctgctgcgggagctgcactgcccggatcgcgcgctctgcggcggggatggcgcggctgcgcttcgggaacccggtgccggactgcgcctgctgcgctttctctgctcagagctccaagccacccgcctcctgtgcctccgctctctgctggatccgagtcctaggccaccccttggtgaaggggtagtggagggagccggcatggtccaagaactggaccttaccctccaagccctggggctgcccagacctgcaccagggacccccgccagccagctgctgcaggagttgcatgctaagatctcagagctgcagccttctctgcccccagggtccctgcagcccctcctcagctgctcgctagatgcacccagatgggaagcgttggagtctctgtcccaaagcctcagagatcagtaccgctgccgccgctgcctcctcctcaagcgccttgacctcactacatctgctttccactggagtgaccgggcagaggcccaaggagaggccatgagggcagtgctgatcccaattcgagaggttctgaccccagaatcggacatctccattgcacacgttctggctgcccgagccgacctgtcttgtctcgtcccagccaccagcgtggctgtccgcagagggacctgctgtgccatcaacaaggtgcttatgggcaacgttccagaccgggggggccgcccaaatgagctggagcctcccatgcccacctggaggagccgaagagaggatggaggcccccagtgttggggtcgcaagaagaagaagaagaagtaaagggggactggtggtcgggggcggggggtcctccatgagatgctaatgctatcggtaatctctggggagtccgtttaaggctttccttggtatttggcacccaagccccccatctcctattcctgagtccccaaatgccctgctcccattcacgtcaataccaagaaccatgttctccagagaataaatttaatttatgaca

SEQ ID NO: 133047 - DNA, 1006 bp, Homo sapiens
  Payload ID: 6003
  Gene Symbol: FAM98C
  Gene Name: family with sequence similarity 98, member C
  Uniprot ID: Q17RN3
  ENST ID: ENST00000343358
  CDS Start-End: 1-804
atggaggcggtgaaggcggaagcgtgggagggggccgcggtggcccaggacctgctggctctggggtatggaggtgtcccgggggcggcgtcgcggggcgcctcatgcccagacttcagggggctgtgcgtgcggctggcggcggagctggcgacgctgggcgccctcgagcagcagcgagaggcgggcgcggaggtgctgagcgccggcgacggccctggcgcggaggaggactttctgcggcagctcggcagcctgctgcgggagctgcactgcccggatcgcgcgctctgcggcggggatggcgcggctgcgcttcgggaacccggtgccggactgcgcctgctgcgctttctctgctcagagctccaagccacccgcctcctgtgcctccgctctctgctggatccgagtcctaggccaccccttggtgaaggggtagtggagggagccggcatggtccaagaactggaccttaccctccaagccctggggctgcccagacctgcaccagggacccccgccagccagctgctgcaggagttgcatgctaaggaagcgttggagtctctgtcccaaagcctcagagatcagtaccgctgccgccgctgcctcctcctcaagcgccttgacctcactacatctgctttccactggagtgaccgggcagaggtgcttatgggcaacgttccagaccgggggggccgcccaaatgagctggagcctcccatgcccacctggaggagccgaagagaggatggaggcccccagtgttggggtcgcaagaagaagaagaagaagtaaagggggactggtggtcgggggcggggggtcctccatgagatgctaatgctatcggtaatctctggggagtccgtttaaggctttccttggtatttggcacccaagccccccatctcctattcctgagtccccaaatgccctgctcccattcacgtcaataccaagaaccatgttctccagagaataaatttaatttatgaca

SEQ ID NO: 133048 - DNA, 542 bp, Homo sapiens
  Payload ID: 6003
  Gene Symbol: FAM98C
  Gene Name: family with sequence similarity 98, member C
  ENST ID: ENST00000589408
  CDS Start-End: 1-542
gcggaagcgtgggagggggccgcggtggcccaggacctgctggctctggggtaaaagggtgtgcggtgaggctggtgggtgcaggaaggccaggtctgccccctggacgcggacgaaaagggattcccagtgacatccccgccccctcccgctgcctcggtccccacaggtatggaggtgtcccgggggcggcgtcgcggggcgcctcatgcccagacttcagggggctgtgcgtgcggctggcggcggagctggcgacgctgggcgccctcgagcagcagcgagaggcgggcgcggaggtgctgagcgccggcgacggccctggcgcggaggaggactttctgcggcagctcggcagcctgctgcgggagctgcactgcccggatcgcgcgctctgcggcggggatggcgcggctgcgcttcgggaacccggtgccggactgcgcctgctgcgctttctctgctcagagctccaagccacccgcctcctgtgcctccgctctctgctggatccgagtcctaggccaccccttggtgaaggg

SEQ ID NO: 133049 - DNA, 826 bp, Homo sapiens
  Payload ID: 6003
  Gene Symbol: FAM98C
  Gene Name: family with sequence similarity 98, member C
  ENST ID: ENST00000588262
  CDS Start-End: 20-580
gcgccgagaccacactttcatggaggcggtgaaggcggaagcgtgggagggggccgcggtggcccaggacctgctggctctggggtatggaggtgtcccgggggcggcgtcgcggggcgcctcatgcccagacttcagggggctgtgcgtgcggctggcggcggagctggcgacgctgggcgccctcgagcagcagcgagaggcgggcgcggaggtgctgagcgccggcgacggccctggcgcggaggaggactttctgcggcagctcggcagcctgctgcgggagctgcactgcccggatcgcgcgctctgcggcggggatggcgcggctgcgcttcgggaacccggtgccggactgcgcctgctgcgcccaaggagaggccatgagggcagtgctgatcccaattcgagaggttctgaccccagaatcggacatctccattgcacacgttctggctgcccgagccgacctgtcttgtctcgtcccagccaccagcgtggctgtccgcagagggacctgctgtgccatcaacaaggtgcttatgggcaacgttccagaccgggggggccgcccaaatgagctggagcctcccatgcccacctggaggagccgaagagaggatggaggcccccagtgttggggtcgcaagaagaagaagaagaagtaaagggggactggtggtcgggggcggggggtcctccatgagatgctaatgctatcggtaatctctggggagtccgtttaaggctttccttggtatttggcacccaagccccccatctcctattcctgagtccccaaatgccctgctcccattcacgtcaa

SEQ ID NO: 133050 - DNA, 478 bp, Homo sapiens
  Payload ID: 6003
  Gene Symbol: FAM98C
  Gene Name: family with sequence similarity 98, member C
  ENST ID: ENST00000589029
  CDS Start-End: 1-169
gccgcggtggcccaggacctgctggctctggggtatggaggtgtcccgggggcggcgtcgcggggcgcctcatgcccagacttcagggggctgtgcgtgcggctggcggcggagctggcgacgctgggcgccctcgagcagcagcgagaggcgggcgcggaggtgctgagcgccggcgacggtaaacacggagcgggagggtggcaggggggccgccacggggccaccgagccctgacacccctgtcctcgcaggccctggcgcggaggaggactttctgcggcagctcggcagcctgctgcgggagctgcactgcccggatcgcgcgctctgcggcggggatggcgcggctgcgcttcgggaacccggtgccggactgcgcctgctgcgctttctctgctcagagctccaagccacccgcctcctgtgcctccgctctctgctggatccgagtcctaggccaccccttggtgaaggg

SEQ ID NO: 133051 - DNA, 382 bp, Homo sapiens
  Payload ID: 6004
  Gene Symbol: FANCD2OS
  Gene Name: FANCD2 opposite strand
  ENST ID: ENST00000453223
  CDS Start-End: 1-294
ggataccagctctggtcaccatggaccccactggatgagagtttccaatggctgcggcacacgacacctacaccttcctccaagcacccattcaaggcctccccctgcttcccacacacaccgtccgaccttgaagtgcagctgtgctttcaagaggtcactctagtcctagacagcccattcctggaatctggaagatggagtttcaccacattgcccaagctggtcttgaactcctggactcaagcaatgccttggcctcggcctcccaaagtgttgggattacagcggtgacccacaatatctggcctttgtagcgttcttgtaactaggttaggtataactcagaaaatggaaataaacattacatatacaaagttaa

SEQ ID NO: 133052 - DNA, 1055 bp, Homo sapiens
  Payload ID: 6004
  Gene Symbol: FANCD2OS
  Gene Name: FANCD2 opposite strand
  Uniprot ID: Q96PS1
  ENST ID: ENST00000450660
  CDS Start-End: 218-751
gtgggactgggcccaggttcccaccgcatcgtccgcctcagccagaaccttctggtccccgcccccggatagggacccaggaggcccaagccccttcttccggcggggagtgggagcctctcgcactctcggcagctccagaccctcgggatctccgtttacagttcaggacctcagctgcactttggcgctaacgccctgtttcccaggactgtcaatggcaggataccagctctggtcaccatggaccccactggatgagagtttccaatggctgcggcacacgacacctacaccttcctccaagcacccattcaaggcctccccctgcttcccacacacaccgtccgaccttgaagtgcagctgtgctttcaagaggtcactctagtcctagacagcccattcctggaatctggagtgagtcccaagttaccctgccacacatcagagttgcgcacgatgaacaacaaaggactggtcaggaagccccagcccatccgcctcagtggagtagattctgtctttggcagggttatcacagctcagccaccaaagtggaccgggactttcagagtttcagacaagtcagccttttgcaaaatcattagcagggagcaccagtggcccattggactgaaggagcctcagattcagatgacagtcactatgtgcaaacagatgctgcgctctatcctcttgctgtatgcaacttacaaaaagtgcacctttgccttgcagcactccaagtaaagggtcctcatttgatccccatttactcacaccatgccctttggtatgtacctaaagcttacagaaacctgtccatgtaaatgaaactgtgacattgtcccagccatcttgcttttgtttcaagcagtgatgattcaggagcccctttcatcccttcccctccaaaaaaggaccaatgatagagaacaaggaagaacattcccattgtaaggttgaaccatttagagtcaaactagcattgacatgtccatgtgataaccgttaaacaaatgatataaaccaatgagcctagtgtgaactcaca

SEQ ID NO: 133053 - DNA, 1014 bp, Homo sapiens
  Payload ID: 6004
  Gene Symbol: FANCD2OS
  Gene Name: FANCD2 opposite strand
  Uniprot ID: Q96PS1
  ENST ID: ENST00000524279
  CDS Start-End: 226-759
cccggatggtgggactgggcccaggttcccaccgcatcgtccgcctcagccagaaccttctggtccccgcccccggatagggacccaggaggcccaagccccttcttccggcggggagtgggagcctctcgcactctcggcagctccagaccctcgggatctccgtttacagttcaggacctcagctgcactttggcgctaacgccctgtttcccaggactgtcaatggcaggataccagctctggtcaccatggaccccactggatgagagtttccaatggctgcggcacacgacacctacaccttcctccaagcacccattcaaggcctccccctgcttcccacacacaccgtccgaccttgaagtgcagctgtgctttcaagaggtcactctagtcctagacagcccattcctggaatctggagtgagtcccaagttaccctgccacacatcagagttgcgcacgatgaacaacaaaggactggtcaggaagccccagcccatccgcctcagtggagtagattctgtctttggcagggttatcacagctcagccaccaaagtggaccgggactttcagagtttcagacaagtcagccttttgcaaaatcattagcagggagcaccagtggcccattggactgaaggagcctcagattcagatgacagtcactatgtgcaaacagatgctgcgctctatcctcttgctgtatgcaacttacaaaaagtgcacctttgccttgcagcactccaagtaaagggtcctcatttgatccccatttactcacaccatgccctttgtgccttggtgactgtcaaataaaagcaagtatatactcagttctctccacacttcccacatacttaccaagcaaaaagcccatgaaaaatctgcagcagcctctgatagcaggaagacattatgtggtactcctgaactttcactcctggtccatcaactacaccgtgattctcagcagctaaacactaaaaataaaaatgattttaggaca

SEQ ID NO: 133054 - DNA, 4891 bp, Homo sapiens
  Payload ID: 6005
  Gene Symbol: FAN1
  Gene Name: FANCD2/FANCI-associated nuclease 1
  Uniprot ID: Q9Y2M0
  ENST ID: ENST00000362065
  CDS Start-End: 292-3345
ggcgcgcggagccaggtgggaggtgcgaggtggccgcgcggggatcttgggtgacagggcaccgagggaaggaggacgcgagggcagccaggccctagggagcagggagagtggctcgggctcagtcgcgtggccccaggaagaagaaattgtcgagacgaataacatgaggtcatatagaatcccacttttggtgatttcaagtcaagaaagtaaaagtaaaccattgctatctttcaccttaaatatcctgtgttttattgctcagaacatccagtttttctaatactcatgatgtcagaagggaaacctcctgacaaaaaaaggcctcgtagaagcttatcaatcagcaagaataagaaaaaagcatctaattctattatttcgtgttttaacaatgcaccacctgctaaacttgcctgccccgtttgcagtaaaatggtgcctagatatgacttaaaccggcaccttgatgaaatgtgtgctaacaatgacttcgttcaagtggatccagggcaggttggcttaataaattcaaatgtgtctatggtagatttaaccagtgttaccttagaagatgtaacacctaagaagtcaccaccaccaaagacaaatttaacccctggccaaagtgattcagcaaaaagggaagtaaagcagaagatcagtccctactttaaaagtaatgatgtggtgtgcaaaaatcaagatgagctgagaaatcgtagtgtgaaagtcatttgtttgggaagcctagcatctaaattgtccagaaaatacgtaaaggctaaaaaatcaatagataaggatgaagaatttgccggttctagtccacagagttccaaatccacagttgttaagagcctgattgataactcttcagaaattgaggacgaggatcaaattttggagaacagttctcaaaaagaaaacgtgtttaaatgtgattctctaaaggaagagtgcattcctgaacatatggtaagaggaagtaaaataatggaagccgaaagccaaaaggctacccgggaatgtgagaaatcagccctcacccctggattctcagataatgcgatcatgttattctcaccagatttcactcttaggaatacattaaagtctacttcagaagacagtcttgtaaagcaagagtgtatcaaagaagtggttgaaaaacgtgaggcatgtcattgtgaagaagtaaaaatgactgttgcttcagaagctaaaatacagctgtcagattcagaggcaaaatctcatagttctgcagatgatgcttctgcatggagtaacatccaagaggctcctctgcaggatgacagttgcttaaacaatgatatccctcacagcattcctttggagcaggggtcaagctgcaatggtcctggtcaaacaaccggtcatccttactaccttcggagtttccttgtggtgctgaaaaccgtacttgagaatgaagatgatatgttgctctttgatgagcaggagaagggaattgtaactaaattttatcagttatcagctactggtcagaagttatatgtaaggctctttcaacgtaaattaagctggattaagatgaccaaattagagtatgaagagattgccttagacttaacacctgtgattgaagaattgacgaatgcaggctttctacagacagaatctgagttgcaagaactctctgaagtgcttgaactcctttctgctcctgaactaaaatccctagccaagaccttccacttggtgaatcccaatggacagaaacagcagctggtggacgcctttctcaaattggccaaacagcgttcagtctgcacttggggcaagaataagcctggaattggtgcagtgattttaaaaagagccaaagccttggctggacagtcagtacgaatctgtaaaggccccagggctgtgttttcccgcatcttgctactgttttcgttgaccgactcaatggaagatgaagacgccgcttgtggaggtcagggacagctttcaacagtcctgttggtcaacctcggccgaatggagtttcctagttacaccatcaatcggaaaacccacatcttccaagacagagatgatcttatcagatatgcagcagccacgcacatgctgagtgacatttcttccgcaatggccaatgggaactgggaagaagctaaggagctcgctcagtgtgcaaaaagggattggaacagactgaaaaaccacccttctctgagatgccacgaagatttaccactcttcctgcggtgtttcactgttgggtggatttatacaaggattttgtctcggtttgtggaaatactgcagagacttcacatgtatgaggaagccgtcagagaacttgaaagccttttgtctcagagaatttattgtcctgacagcagaggccgatggtgggatcgactggcccttaatttacaccagcacttgaagcgcctggaaccgactatcaagtgcatcacagaggggctggcggatccggaagtcagaacgggacaccgcctttcactgtatcagcgagccgtgcgcctgcgagagtctccgagctgtaaaaagttcaagcacctcttccagcagctcccagaaatggctgtgcaagatgtgaaacacgtgaccatcacaggcaggctgtgcccacagcgtgggatgtgcaagtctgtgtttgtgatggaggccggggaggccgctgaccccaccacggtcctgtgctctgtggaggagctggcactggcccattacagacgcagcggttttgaccaggggattcatggcgaagggtccaccttcagcaccctgtatggcctcctcctgtgggacatcatcttcatggatgggattccggatgtcttcagaaacgcctgtcaggcattccccctggacttgtgcacagacagcttcttcacaagcagacgcccagcccttgaggccaggctgcagctgattcatgatgcccccgaggagagcctgcgggcctgggtggcagccacgtggcatgagcaggaaggcagagtggcttcccttgtcagctgggatcgcttcacgtctcttcagcaagctcaggatcttgtctcctgcctggggggccctgtgctcagtggtgtgtgcaggcacctggctgctgactttcgacactgtcgagggggcctccccgacctggtggtgtggaactcccagagccgtcactttaagctggtggaagttaaaggccccaatgatcgtctttcacataagcagatgatctggctggctgaactgcagaagctgggggctgaagtagaagtctgccatgtggttgcagttggagctaagagccaaagccttagctaaaagattccctacaggagaaaatggaaatgaggaggagagaaactccggtgtccccgaggtgtcggtgtggtgagggccgctggcgttgaagtacatcctgctctggcccagctccccatagcaggcctccagggggccactgcgctgttgccgcagcatcctgctcagtacgtcgacttcatcagccaggagggagagcttgtgaaaggctgtgatggagccacccaggctgatctgggcctcgggaacccagcggaagtagcacagtttccacagttttatgtgtgttccagagacacgtggcagaataacaccgtgcaggttggcgggtttggaaaaccattctctaaaatactgctccgtatcactgttctggctgtcggtttgctgagctggatctggctttggttttaatatcaatgaatttctccttggaagtaattcttggtcactgatgattccattctttaaggcagacggcattcctcttagtgtggagctgtagcttttctatacagaagagattttattatgttccggggattccctttttagaaagattgaaggatgcaatggcaaatataaactcaatactatgaaaaattaatggaatttcagcctcaaagaacattttcctcccttcctttgtgtccttattctaatcctcctcccctggaattacacttttttatgtgttgactctacctaggctgttactatcagcctgaatgggggcgggatgagagtacctcctatccactaatttgcttaaggataagttctaagacgggctagaaaaaacactagacctggccgattctatcaagaacaatggcaaactgaacagaggcagtcaggaggccaaatgtctgattctttgttctgtacctttcagtagtctgcaaattttctaccaaaaaaaatcccaagaatttatttgggaattattaaaaaggcaaacaatgaatgttattaggacaagaatatagcagtcaggaggccatgactacatcacagccaggcggcattccctgccacagtggcggcttgaatcatcaagaaatggataaatggggctttagtaaatcaggcttgcaggctcaaagctgcaatctgcccactctcaggtactgagactttgtgggcctcagacaccaggaagaaagctgggatacagtcatttgagttaaaaagggaatgacccctcagaaacccgcattagcagtgttactcttggaagtgcctttacttttaacgctctctgttctgaaaaagaggtgtttggttacgtgtgagccaacatcacgttttgttagctgtgatttacctttgtccgtttaaaagacttcacggagccattctgtatacaaggtgtgctctttccaatgtagaaggggttatggaaaagggtgcgatcctttgctgtaaactggagagaccagtcccaaacagaggggaattttaagcccttctcatcacccaattggatgtttttgcttatagcaaattcctgcaaaataaataaataaatatttgcaaaactaaa

SEQ ID NO: 133055 - DNA, 2690 bp, Homo sapiens
  Payload ID: 6005
  Gene Symbol: FAN1
  Gene Name: FANCD2/FANCI-associated nuclease 1
  Uniprot ID: Q9Y2M0
  ENST ID: ENST00000561607
  CDS Start-End: 286-1887
gaggtgcgaggtggccgcgcggggatcttgggtgacagggcaccgagggaaggaggacgcgagggcagccaggccctagggagcagggagagtggctcgggctcagtcgcgtggccccaggtgcgcgtcccaggaagaagaaattgtcgagacgaataacatgaggtcatatagaatcccacttttggtgatttcaagtcaagaaagtaaaagtaaaccattgctatctttcaccttaaatatcctgtgttttattgctcagaacatccagtttttctaatactcatgatgtcagaagggaaacctcctgacaaaaaaaggcctcgtagaagcttatcaatcagcaagaataagaaaaaagcatctaattctattatttcgtgttttaacaatgcaccacctgctaaacttgcctgccccgtttgcagtaaaatggtgcctagatatgacttaaaccggcaccttgatgaaatgtgtgctaacaatgacttcgttcaagtggatccagggcaggttggcttaataaattcaaatgtgtctatggtagatttaaccagtgttaccttagaagatgtaacacctaagaagtcaccaccaccaaagacaaatttaacccctggccaaagtgattcagcaaaaagggaagtaaagcagaagatcagtccctactttaaaagtaatgatgtggtgtgcaaaaatcaagatgagctgagaaatcgtagtgtgaaagtcatttgtttgggaagcctagcatctaaattgtccagaaaatacgtaaaggctaaaaaatcaatagataaggatgaagaatttgccggttctagtccacagagttccaaatccacagttgttaagagcctgattgataactcttcagaaattgaggacgaggatcaaattttggagaacagttctcaaaaagaaaacgtgtttaaatgtgattctctaaaggaagagtgcattcctgaacatatggtaagaggaagtaaaataatggaagccgaaagccaaaaggctacccgggaatgtgagaaatcagccctcacccctggattctcagataatgcgatcatgttattctcaccagatttcactcttaggaatacattaaagtctacttcagaagacagtcttgtaaagcaagagtgtatcaaagaagtggttgaaaaacgtgaggcatgtcattgtgaagaagtaaaaatgactgttgcttcagaagctaaaatacagctgtcagattcagaggcaaaatctcatagttctgcagatgatgcttctgcatggagtaacatccaagaggctcctctgcaggatgacagttgcttaaacaatgatatccctcacagcattcctttggagcaggggtcaagctgcaatggtcctggtcaaacaaccggtcatccttactaccttcggagtttccttgtggtgctgaaaaccgtacttgagaatgaagatgatatgttgctctttgatgagcaggagaagggaattgtaactaaattttatcagttatcagctactggtcagaagttatatgtaaggctctttcaacgtaaattaagctggattaagatgaccaaattagagtatgaagagattgccttagacttaacacctgtgattgaagaattgacgaatgcaggctttctacagacagaatctgagttgcaagaactctctgaagtgcttgaactcctttctgctcctgaactaaaatccctagccaagaccttccacttggtgaatcccaatggacagaaacagcagctggtggacgcctttctcaaattggccaaacagcgttcagtctgcacttggggcaagaataagcctggaattggtgcagtgattttaaaaaggttttgttggctattgttacagtaaaaacatttaaaatgttgatagcacatattaacttacagtagattgtatacttgattgaactgtaattgtttatttcagttgtagttagattgagaaggctggaaaagccttaattgcaatagcctggattctttcttgggttattattcaaaatttttgtcgtaataccgtactaatttccaggaccaagaaaaatcggaaggcaataggcctttggtaaattgtagtattttattttccgagaaaaatacagttttaagtgattcttatgggattttaaggtaaactatttagtcaaatttttattttagtttttgtttactaaacaaagtataatcaggcagtcttaatgtgcaagttttcctgagtttaaacgtaacaatttaccaaaaactgtgagtggcttcttttgtccttgagaagcccttgacctgtttcagttgaaaattacaaaaacttttagaattgatttcttttgcccatgttatttatataatcaaactatatcaactctagcctgggaattcactactgtggagtcgaggatgaaatgagaggatgcttttgaaaacactttaacatgatgttgttatttattttatatatttgttttgtatatttcagttgttatgagcccatccttgttggggaggtgctataaatactaatctttaatgaaacataggtgtaataaggcagacattaagaaaaatataaataccaacacttgaaaaaagctcgtgttatagatttttaaaaagtacttcaataaattacatacttgtaattaattgacttgagaa

SEQ ID NO: 133056 - DNA, 2304 bp, Homo sapiens
  Payload ID: 6005
  Gene Symbol: FAN1
  Gene Name: FANCD2/FANCI-associated nuclease 1
  Uniprot ID: Q9Y2M0
  ENST ID: ENST00000565466
  CDS Start-End: 272-1873
aggtgcgaggtggccgcgcggggatcttgggtgacagggcaccgagggaaggaggacgcgagggcagccaggccctagggagcagggagagtggctcgggctcagtcgcgtggccccaggaagaagaaattgtcgagacgaataacatgaggtcatatagaatcccacttttggtgatttcaagtcaagaaagtaaaagtaaaccattgctatctttcaccttaaatatcctgtgttttattgctcagaacatccagtttttctaatactcatgatgtcagaagggaaacctcctgacaaaaaaaggcctcgtagaagcttatcaatcagcaagaataagaaaaaagcatctaattctattatttcgtgttttaacaatgcaccacctgctaaacttgcctgccccgtttgcagtaaaatggtgcctagatatgacttaaaccggcaccttgatgaaatgtgtgctaacaatgacttcgttcaagtggatccagggcaggttggcttaataaattcaaatgtgtctatggtagatttaaccagtgttaccttagaagatgtaacacctaagaagtcaccaccaccaaagacaaatttaacccctggccaaagtgattcagcaaaaagggaagtaaagcagaagatcagtccctactttaaaagtaatgatgtggtgtgcaaaaatcaagatgagctgagaaatcgtagtgtgaaagtcatttgtttgggaagcctagcatctaaattgtccagaaaatacgtaaaggctaaaaaatcaatagataaggatgaagaatttgccggttctagtccacagagttccaaatccacagttgttaagagcctgattgataactcttcagaaattgaggacgaggatcaaattttggagaacagttctcaaaaagaaaacgtgtttaaatgtgattctctaaaggaagagtgcattcctgaacatatggtaagaggaagtaaaataatggaagccgaaagccaaaaggctacccgggaatgtgagaaatcagccctcacccctggattctcagataatgcgatcatgttattctcaccagatttcactcttaggaatacattaaagtctacttcagaagacagtcttgtaaagcaagagtgtatcaaagaagtggttgaaaaacgtgaggcatgtcattgtgaagaagtaaaaatgactgttgcttcagaagctaaaatacagctgtcagattcagaggcaaaatctcatagttctgcagatgatgcttctgcatggagtaacatccaagaggctcctctgcaggatgacagttgcttaaacaatgatatccctcacagcattcctttggagcaggggtcaagctgcaatggtcctggtcaaacaaccggtcatccttactaccttcggagtttccttgtggtgctgaaaaccgtacttgagaatgaagatgatatgttgctctttgatgagcaggagaagggaattgtaactaaattttatcagttatcagctactggtcagaagttatatgtaaggctctttcaacgtaaattaagctggattaagatgaccaaattagagtatgaagagattgccttagacttaacacctgtgattgaagaattgacgaatgcaggctttctacagacagaatctgagttgcaagaactctctgaagtgcttgaactcctttctgctcctgaactaaaatccctagccaagaccttccacttggtgaatcccaatggacagaaacagcagctggtggacgcctttctcaaattggccaaacagcgttcagtctgcacttggggcaagaataagcctggaattggtgcagtgattttaaaaaggttttgttggctattgttacagtaaaaacatttaaaatgttgatagcacatattaacttacagtagattgtatacttgattgaactgtaattgtttatttcagttgtagttagattgagaaggctggaaaagccttaattgcaatagcctggattctttcttgggttattattcaaaatttttgtcgtaataccgtactaatttccaggaccaagaaaaatcggaaggcaataggcctttggtaaattgtagtattttattttccgagaaaaatacagttttaagtgattcttatgggattttaaggtaaactatttagtcaaatttttattttagtttttgtttactaaacaaagtataatcaggcagtcttaatgtgcaagttttcctgagtttaaacgtaacaatttaccaaaaactgtgagtggcttcttttgtccttgagaagcccttgac

SEQ ID NO: 133057 - DNA, 4999 bp, Homo sapiens
  Payload ID: 6005
  Gene Symbol: FAN1
  Gene Name: FANCD2/FANCI-associated nuclease 1
  ENST ID: ENST00000565280
  CDS Start-End: 266-1558
ggggatcttgggtgacagggcaccgagggaaggaggacgcgagggcagccaggccctagggagcagggagagtggctcgggctcagtcgcgtggccccaggtgcgcgtcccaggaagaagaaattgtcgagacgaataacatgaggtcatatagaatcccacttttggtgatttcaagtcaagaaagtaaaagtaaaccattgctatctttcaccttaaatatcctgtgttttattgctcagaacatccagtttttctaatactcatgatgtcagaagggaaacctcctgacaaaaaaaggcctcgtagaagcttatcaatcagcaagaataagaaaaaagcatctaattctattatttcgtgttttaacaatgcaccacctgctaaacttgcctgccccgtttgcagtaaaatggtgcctagatatgacttaaaccggcaccttgatgaaatgtgtgctaacaatgacttcgttcaagtggatccagggcaggttggcttaataaattcaaatgtgtctatggtagatttaaccagtgttaccttagaagatgtaacacctaagaagtcaccaccaccaaagacaaatttaacccctggccaaagtgattcagcaaaaagggaagtaaagcagaagatcagtccctactttaaaagtaatgatgtggtgtgcaaaaatcaagatgagctgagaaatcgtagtgtgaaagtcatttgtttgggaagcctagcatctaaattgtccagaaaatacgtaaaggctaaaaaatcaatagataaggatgaagaatttgccggttctagtccacagagttccaaatccacagttgttaagagcctgattgataactcttcagaaattgaggacgaggatcaaattttggagaacagttctcaaaaagaaaacgtgtttaaatgtgattctctaaaggaagagtgcattcctgaacatatggtaagaggaagtaaaataatggaagccgaaagccaaaaggctacccgggaatgtgagaaatcagccctcacccctggattctcagataatgcgatcatgttattctcaccagatttcactcttaggaatacattaaagtctacttcagaagacagtcttgtaaagcaagagtgtatcaaagaagtggttgaaaaacgtgaggcatgtcattgtgaagaagtaaaaatgactgttgcttcagaagctaaaatacagctgtcagattcagaggcaaaatctcatagttctgcagatgatgcttctgcatggagtaacatccaagaggctcctctgcaggatgacagttgcttaaacaatgatatccctcacagcattcctttggagcaggggtcaagctgcaatggtcctggtcaaacaaccggtcatccttactaccttcggagtttccttgtggtgctgaaaaccgtacttgagaatgaagatgatatgttgctctttgatgagcaggagaagggaattgtaactaaattttatcagttatcagatttatggactgtgccttttaaagacagggtgtggaggaaatggaaactttcaagctgaaattggtacattaaaaatactagtctatgcctgaagtccttggcagccaggggtggctccaagccagcagtgcagctactggtcagaagttatatgtaaggctctttcaacgtaaattaagctggattaagatgaccaaattagagtatgaagagattgccttagacttaacacctgtgattgaagaattgacgaatgcaggctttctacagacagaatctgagttgcaagaactctctgaagtgcttgaactcctttctgctcctgaactaaaatccctagccaagaccttccacttggtgaatcccaatggacagaaacagcagctggtggacgcctttctcaaattggccaaacagcgttcagtctgcacttggggcaagaataagcctggaattggtgcagtgattttaaaaagagccaaagccttggctggacagtcagtacgaatctgtaaaggccccagggctgtgttttcccgcatcttgctactgttttcgttgaccgactcaatggaagatgaagacgccgcttgtggaggtcagggacagctttcaacagtcctgttggtcaacctcggccgaatggagtttcctagttacaccatcaatcggaaaacccacatcttccaagacagagatgatcttatcagatatgcagcagccacgcacatgctgagtgacatttcttccgcaatggccaatgggaactgggaagaagctaaggagctcgctcagtgtgcaaaaagggattggaacagactgaaaaaccacccttctctgagatgccacgaagatttaccactcttcctgcggtgtttcactgttgggtggatttatacaaggattttgtctcggtttgtggaaatactgcagagacttcacatgtatgaggaagccgtcagagaacttgaaagccttttgtctcagagaatttattgtcctgacagcagaggccgatggtgggatcgactggcccttaatttacaccagcacttgaagcgcctggaaccgactatcaagtgcatcacagaggggctggcggatccggaagtcagaacgggacaccgcctttcactgtatcagcgagccgtgcgcctgcgagagtctccgagctgtaaaaagttcaagcacctcttccagcagctcccagaaatggctgtgcaagatgtgaaacacgtgaccatcacaggcaggctgtgcccacagcgtgggatgtgcaagtctgtgtttgtgatggaggccggggaggccgctgaccccaccacggtcctgtgctctgtggaggagctggcactggcccattacagacgcagcggttttgaccaggggattcatggcgaagggtccaccttcagcaccctgtatggcctcctcctgtgggacatcatcttcatggatgggattccggatgtcttcagaaacgcctgtcaggcattccccctggacttgtgcacagacagcttcttcacaagcagacgcccagcccttgaggccaggctgcagctgattcatgatgcccccgaggagagcctgcgggcctgggtggcagccacgtggcatgagcaggaaggcagagtggcttcccttgtcagctgggatcgcttcacgtctcttcagcaagctcaggatcttgtctcctgcctggggggccctgtgctcagtggtgtgtgcaggcacctggctgctgactttcgacactgtcgagggggcctccccgacctggtggtgtggaactcccagagccgtcactttaagctggtggaagttaaaggccccaatgatcgtctttcacataagcagatgatctggctggctgaactgcagaagctgggggctgaagtagaagtctgccatgtggttgcagttggagctaagagccaaagccttagctaaaagattccctacaggagaaaatggaaatgaggaggagagaaactccggtgtccccgaggtgtcggtgtggtgagggccgctggcgttgaagtacatcctgctctggcccagctccccatagcaggcctccagggggccactgcgctgttgccgcagcatcctgctcagtacgtcgacttcatcagccaggagggagagcttgtgaaaggctgtgatggagccacccaggctgatctgggcctcgggaacccagcggaagtagcacagtttccacagttttatgtgtgttccagagacacgtggcagaataacaccgtgcaggttggcgggtttggaaaaccattctctaaaatactgctccgtatcactgttctggctgtcggtttgctgagctggatctggctttggttttaatatcaatgaatttctccttggaagtaattcttggtcactgatgattccattctttaaggcagacggcattcctcttagtgtggagctgtagcttttctatacagaagagattttattatgttccggggattccctttttagaaagattgaaggatgcaatggcaaatataaactcaatactatgaaaaattaatggaatttcagcctcaaagaacattttcctcccttcctttgtgtccttattctaatcctcctcccctggaattacacttttttatgtgttgactctacctaggctgttactatcagcctgaatgggggcgggatgagagtacctcctatccactaatttgcttaaggataagttctaagacgggctagaaaaaacactagacctggccgattctatcaagaacaatggcaaactgaacagaggcagtcaggaggccaaatgtctgattctttgttctgtacctttcagtagtctgcaaattttctaccaaaaaaaatcccaagaatttatttgggaattattaaaaaggcaaacaatgaatgttattaggacaagaatatagcagtcaggaggccatgactacatcacagccaggcggcattccctgccacagtggcggcttgaatcatcaagaaatggataaatggggctttagtaaatcaggcttgcaggctcaaagctgcaatctgcccactctcaggtactgagactttgtgggcctcagacaccaggaagaaagctgggatacagtcatttgagttaaaaagggaatgacccctcagaaacccgcattagcagtgttactcttggaagtgcctttacttttaacgctctctgttctgaaaaagaggtgtttggttacgtgtgagccaacatcacgttttgttagctgtgatttacctttgtccgtttaaaagacttcacggagccattctgtatacaaggtgtgctctttccaatgtagaaggggttatggaaaagggtgcgatcctttgctgtaaactggagagaccagtcccaaacagaggggaattttaagcccttctcatcacccaattggatgtttttgcttatagcaaattcctgcaaaataaataaataaatatttgcaaaactaaa

SEQ ID NO: 133058 - DNA, 2738 bp, Homo sapiens
  Payload ID: 6005
  Gene Symbol: FAN1
  Gene Name: FANCD2/FANCI-associated nuclease 1
  Uniprot ID: Q9Y2M0
  ENST ID: ENST00000561594
  CDS Start-End: 189-1790
ctgggaatgcctggaagcgccggcgcgcggagccaggaagaagaaattgtcgagacgaataacatgaggtcatatagaatcccacttttggtgatttcaagtcaagaaagtaaaagtaaaccattgctatctttcaccttaaatatcctgtgttttattgctcagaacatccagtttttctaatactcatgatgtcagaagggaaacctcctgacaaaaaaaggcctcgtagaagcttatcaatcagcaagaataagaaaaaagcatctaattctattatttcgtgttttaacaatgcaccacctgctaaacttgcctgccccgtttgcagtaaaatggtgcctagatatgacttaaaccggcaccttgatgaaatgtgtgctaacaatgacttcgttcaagtggatccagggcaggttggcttaataaattcaaatgtgtctatggtagatttaaccagtgttaccttagaagatgtaacacctaagaagtcaccaccaccaaagacaaatttaacccctggccaaagtgattcagcaaaaagggaagtaaagcagaagatcagtccctactttaaaagtaatgatgtggtgtgcaaaaatcaagatgagctgagaaatcgtagtgtgaaagtcatttgtttgggaagcctagcatctaaattgtccagaaaatacgtaaaggctaaaaaatcaatagataaggatgaagaatttgccggttctagtccacagagttccaaatccacagttgttaagagcctgattgataactcttcagaaattgaggacgaggatcaaattttggagaacagttctcaaaaagaaaacgtgtttaaatgtgattctctaaaggaagagtgcattcctgaacatatggtaagaggaagtaaaataatggaagccgaaagccaaaaggctacccgggaatgtgagaaatcagccctcacccctggattctcagataatgcgatcatgttattctcaccagatttcactcttaggaatacattaaagtctacttcagaagacagtcttgtaaagcaagagtgtatcaaagaagtggttgaaaaacgtgaggcatgtcattgtgaagaagtaaaaatgactgttgcttcagaagctaaaatacagctgtcagattcagaggcaaaatctcatagttctgcagatgatgcttctgcatggagtaacatccaagaggctcctctgcaggatgacagttgcttaaacaatgatatccctcacagcattcctttggagcaggggtcaagctgcaatggtcctggtcaaacaaccggtcatccttactaccttcggagtttccttgtggtgctgaaaaccgtacttgagaatgaagatgatatgttgctctttgatgagcaggagaagggaattgtaactaaattttatcagttatcagctactggtcagaagttatatgtaaggctctttcaacgtaaattaagctggattaagatgaccaaattagagtatgaagagattgccttagacttaacacctgtgattgaagaattgacgaatgcaggctttctacagacagaatctgagttgcaagaactctctgaagtgcttgaactcctttctgctcctgaactaaaatccctagccaagaccttccacttggtgaatcccaatggacagaaacagcagctggtggacgcctttctcaaattggccaaacagcgttcagtctgcacttggggcaagaataagcctggaattggtgcagtgattttaaaaaggttttgttggctattgttacagtaaaaacatttaaaatgttgatagcacatattaacttacagtagattgtatacttgattgaactgtaattgtttatttcagttgtagttagattgagaaggctggaaaagccttaattgcaatagcctggattctttcttgggttattattcaaaatttttgtcgtaataccgtactaatttccaggaccaagaaaaatcggaaggcaataggcctttggtaaattgtagtattttattttccgagaaaaatacagttttaagtgattcttatgggattttaaggtaaactatttagtcaaatttttattttagtttttgtttactaaacaaagtataatcaggcagtcttaatgtgcaagttttcctgagtttaaacgtaacaatttaccaaaaactgtgagtggcttcttttgtccttgagaagcccttgacctgtttcagttgaaaattacaaaaacttttagaattgatttcttttgcccatgttatttatataatcaaactatatcaactctagcctgggaattcactactgtggagtcgaggatgaaatgagaggatgcttttgaaaacactttaacatgatgttgttatttattttatatatttgttttgtatatttcagttgttatgagcccatccttgttggggaggtgctataaatactaatctttaatgaaacataggtgtaataaggcagacattaagaaaaatataaataccaacacttgaaaaaagctcgtgttatagatttttaaaaagtacttcaataaattacatacttgtaattaattgacttgagaagtatagaatcctcatctgtgtggtatgttaaatgtcttctaagtcctttctttatctaattgtatttcttaagtatttgatgttaaccttatatgtaacattttataagcaagtaaacattaaatttagccaccctctggctggg

SEQ ID NO: 133059 - DNA, 344 bp, Homo sapiens
  Payload ID: 6005
  Gene Symbol: FAN1
  Gene Name: FANCD2/FANCI-associated nuclease 1
  ENST ID: ENST00000562892
  CDS Start-End: 30-344
aggaagaagaaattgtcgagacgaataacatgaggtcatatagaatcccacttttggtgatttcaagtcaagaaagtaaaactactggtcagaagttatatgtaaggctctttcaacgtaaattaagctggattaagatgaccaaattagagtatgaagagattgccttagacttaacacctgtgattgaagaattgacgaatgcaggctttctacagacagaatctgagttgcaagaactctctgaagtgcttgaactcctttctgctcctgaactaaaatccctagccaagaccttccacttggtgaatcccaatggacagaaacagcagctggtggacgcc

SEQ ID NO: 133060 - DNA, 4888 bp, Homo sapiens
  Payload ID: 6005
  Gene Symbol: FAN1
  Gene Name: FANCD2/FANCI-associated nuclease 1
  Uniprot ID: Q9Y2M0
  ENST ID: ENST00000621063
  CDS Start-End: 292-3345
ggcgcgcggagccaggtgggaggtgcgaggtggccgcgcggggatcttgggtgacagggcaccgagggaaggaggacgcgagggcagccaggccctagggagcagggagagtggctcgggctcagtcgcgtggccccaggaagaagaaattgtcgagacgaataacatgaggtcatatagaatcccacttttggtgatttcaagtcaagaaagtaaaagtaaaccattgctatctttcaccttaaatatcctgtgttttattgctcagaacatccagtttttctaatactcatgatgtcagaagggaaacctcctgacaaaaaaaggcctcgtagaagcttatcaatcagcaagaataagaaaaaagcatctaattctattatttcgtgttttaacaatgcaccacctgctaaacttgcctgccccgtttgcagtaaaatggtgcctagatatgacttaaaccggcaccttgatgaaatgtgtgctaacaatgacttcgttcaagtggatccagggcaggttggcttaataaattcaaatgtgtctatggtagatttaaccagtgttaccttagaagatgtaacacctaagaagtcaccaccaccaaagacaaatttaacccctggccaaagtgattcagcaaaaagggaagtaaagcagaagatcagtccctactttaaaagtaatgatgtggtgtgcaaaaatcaagatgagctgagaaatcgtagtgtgaaagtcatttgtttgggaagcctagcatctaaattgtccagaaaatacgtaaaggctaaaaaatcaatagataaggatgaagaatttgccggttctagtccacagagttccaaatccacagttgttaagagcctgattgataactcttcagaaattgaggacgaggatcaaattttggagaacagttctcaaaaagaaaacgtgtttaaatgtgattctctaaaggaagagtgcattcctgaacatatggtaagaggaagtaaaataatggaagccgaaagccaaaaggctacccgggaatgtgagaaatcagccctcacccctggattctcagataatgcgatcatgttattctcaccagatttcactcttaggaatacattaaagtctacttcagaagacagtcttgtaaagcaagagtgtatcaaagaagtggttgaaaaacgtgaggcatgtcattgtgaagaagtaaaaatgactgttgcttcagaagctaaaatacagctgtcagattcagaggcaaaatctcatagttctgcagatgatgcttctgcatggagtaacatccaagaggctcctctgcaggatgacagttgcttaaacaatgatatccctcacagcattcctttggagcaggggtcaagctgcaatggtcctggtcaaacaaccggtcatccttactaccttcggagtttccttgtggtgctgaaaaccgtacttgagaatgaagatgatatgttgctctttgatgagcaggagaagggaattgtaactaaattttatcagttatcagctactggtcagaagttatatgtaaggctctttcaacgtaaattaagctggattaagatgaccaaattagagtatgaagagattgccttagacttaacacctgtgattgaagaattgacgaatgcaggctttctacagacagaatctgagttgcaagaactctctgaagtgcttgaactcctttctgctcctgaactaaaatccctagccaagaccttccacttggtgaatcccaatggacagaaacagcagctggtggacgcctttctcaaattggccaaacagcgttcagtctgcacttggggcaagaataagcctggaattggtgcagtgattttaaaaagagccaaagccttggctggacagtcagtacgaatctgtaaaggccccagggctgtgttttcccgcatcttgctactgttttcgttgaccgactcaatggaagatgaagacgccgcttgtggaggtcagggacagctttcaacagtcctgttggtcaacctcggccgaatggagtttcctagttacaccatcaatcggaaaacccacatcttccaagacagagatgatcttatcagatatgcagcagccacgcacatgctgagtgacatttcttccgcaatggccaatgggaactgggaagaagctaaggagctcgctcagtgtgcaaaaagggattggaacagactgaaaaaccacccttctctgagatgccacgaagatttaccactcttcctgcggtgtttcactgttgggtggatttatacaaggattttgtctcggtttgtggaaatactgcagagacttcacatgtatgaggaagccgtcagagaacttgaaagccttttgtctcagagaatttattgtcctgacagcagaggccgatggtgggatcgactggcccttaatttacaccagcacttgaagcgcctggaaccgactatcaagtgcatcacagaggggctggcggatccggaagtcagaacgggacaccgcctttcactgtatcagcgagccgtgcgcctgcgagagtctccgagctgtaaaaagttcaagcacctcttccagcagctcccagaaatggctgtgcaagatgtgaaacacgtgaccatcacaggcaggctgtgcccacagcgtgggatgtgcaagtctgtgtttgtgatggaggccggggaggccgctgaccccaccacggtcctgtgctctgtggaggagctggcactggcccattacagacgcagcggttttgaccaggggattcatggcgaagggtccaccttcagcaccctgtatggcctcctcctgtgggacatcatcttcatggatgggattccggatgtcttcagaaacgcctgtcaggcattccccctggacttgtgcacagacagcttcttcacaagcagacgcccagcccttgaggccaggctgcagctgattcatgatgcccccgaggagagcctgcgggcctgggtggcagccacgtggcatgagcaggaaggcagagtggcttcccttgtcagctgggatcgcttcacgtctcttcagcaagctcaggatcttgtctcctgcctggggggccctgtgctcagtggtgtgtgcaggcacctggctgctgactttcgacactgtcgagggggcctccccgacctggtggtgtggaactcccagagccgtcactttaagctggtggaagttaaaggccccaatgatcgtctttcacataagcagatgatctggctggctgaactgcagaagctgggggctgaagtagaagtctgccatgtggttgcagttggagctaagagccaaagccttagctaaaagattccctacaggagaaaatggaaatgaggaggagagaaactccggtgtccccgaggtgtcggtgtggtgagggccgctggcgttgaagtacatcctgctctggcccagctccccatagcaggcctccagggggccactgcgctgttgccgcagcatcctgctcagtacgtcgacttcatcagccaggagggagagcttgtgaaaggctgtgatggagccacccaggctgatctgggcctcgggaacccagcggaagtagcacagtttccacagttttatgtgtgttccagagacacgtggcagaataacaccgtgcaggttggcgggtttggaaaaccattctctaaaatactgctccgtatcactgttctggctgtcggtttgctgagctggatctggctttggttttaatatcaatgaatttctccttggaagtaattcttggtcactgatgattccattctttaaggcagacggcattcctcttagtgtggagctgtagcttttctatacagaagagattttattatgttccggggattccctttttagaaagattgaaggatgcaatggcaaatataaactcaatactatgaaaaattaatggaatttcagcctcaaagaacattttcctcccttcctttgtgtccttattctaatcctcctcccctggaattacacttttttatgtgttgactctacctaggctgttactatcagcctgaatgggggcgggatgagagtacctcctatccactaatttgcttaaggataagttctaagacgggctagaaaaaacactagacctggtcgattctatcaagaacaatggcaaactgaacagaggcagtcaggaggccaaatgtctgattctttgttctgtacctttcagtagtctgcaaattttctaccaaaaaaaatcccaagaatttatttgggaattattaaaaaggcaaacaatgaatgttattaggacaagaatatagcagtcaggaggccatgactacatcacagccaggcggcattccctgccacagtggcggcttgaatcatcaagaaatggataaatggggctttagtaaatcaggcttgcaggctcaaagctgcaatctgcccactctcaggtactgagactttgtgggcctcagacaccaggaagaaagttgggatacagtcatttgagttaaaaagggaatgacccctcagaaacccacattagcagtgttactcttggaactgcctttacttttaacgctctctgttctgaaaaagaggtgtttggttacgtgtgagccaacatcacgttttgttagctgtgatttacctttgtccgtttaaaagacttcacggagccattctgtatacaaggtgtgctctttccaatgtagaaggggttatggaaaagggtgcgatcctttgctgtaaactggagagaccagtcccaaacagaggggaattttaagcccttctcatcacccaattggatgtttttgcttatagcaaattcctgcaaaataaataaataaatatttgcaaaact

SEQ ID NO: 133061 - DNA, 3627 bp, Homo sapiens
  Payload ID: 6006
  Gene Symbol: FAAP100
  Gene Name: Fanconi anemia core complex associated protein 100
  Uniprot ID: Q0VG06
  ENST ID: ENST00000327787
  CDS Start-End: 48-2693
gccgccgcgcggccggggcttctcactctgacgggcccgcgcgcacgatggccggcgccgcgccgcgggtccgctacctggcgggcttctgctgccctctcgggggcctggcggcgggcaagccccgcgtgctgtgccatgaggcagaggtcttcctgtccaccgggagcgagctcgtctacgtgtacgaccaggagggcgggctgctgaccgcggcgttccggttccccgaccaggtgtggcacctggagctgctggcgccgcgcaggttgctgtacgcgctgtgcgcccggaggggcctctactgcctgtcgctggaccacccgggcaggagcaggtctacgagccaggatgacagggacagcgaggacggtgaccagccttcccccgtgatccctgtggaccccgatgcctgcatccttcccgatgctgcgctgtgcgcgttcaccttgctggacagtgtgctggtcaccctggtgcagggccctgcccgatggaagatgcagctgtttgagcagccctgtcctggggaggacccccggccaggaggccagatcggtgaggtggagctgtcctcctacacgcccccagccggggtcccaggaaagcctgcagccccccacttccttccagtgctgtgctctgtgtcaccatcaggctccagggtcccgcacgacctcctcgggggctccgggggcttcacgctggaggacgccctcttcgggctcctctttggagctgatgccaccctcctgcagtcacctgtggtcctctgtggtctccctgatggccagctctgctgtgtgatcctgaaggccctggtcacctccaggtcagcccctggtgacccaaatgcccttgtcaagatcctccatcacctggaggagcccgtcatcttcataggggccttgaagacagagccacaggctgcagaagctgcagagaattttctgcctgacgaggatgtgcactgtgactgcctggtggcctttggtcaccacggccggatgctggccatcaaggccagctgggatgagtccgggaagctggtgcccgagctgcgggagtactgcctcccaggccctgtgctctgcgctgcctgtggcgggggtggccgcgtgtaccacagcaccccttctgacctctgtgtggtggatctgtctcggggaagcaccccgctgggccctgagcagcccgaagaaggcccgggaggcctgccccccatgctgtgcccagccagcctgaacatctgcagtgtcgtctcgctgtccgcgtctcccaggacgcatgaaggtggcaccaagctcctggccctgtccgccaaaggccgcctgatgacctgcagcctggacctggactctgagatgcctggcccagccaggatgaccacagagagtgcaggtcagaaaataaaggagctgctgtctggaattggcaacatctctgagagagtgtcttttctaaagaaggcggttgaccagcggaacaaggcactgacaagcctcaacgaggccatgaacgtgagctgtgcactgctgtcaagcggcacgggccccagacccatctcctgcaccaccagcaccacctggagccgcctgcagacacaggatgtgctcatggccacctgcgtgctagagaacagcagcagcttcagcctggaccaggggtggaccctgtgcatccaggtgctcaccagctcctgtgctctcgacctggactcggcctgctccgccatcacctacaccatccccgtggaccagctcggccccggtgctcggcgggaggtgacgctacccctgggccctggtgagaacggcgggctcgacctgcccgtgaccgtgtcctgcacgctgttctacagtctcagggaggtggtgggcggggcccttgccccctcagactctgaggacccctttctggatgagtgcccctccgacgtcctgcccgagcaagagggtgtttgcctgcccctgagcaggcacacagtggacatgctgcagtgtctgcgcttccctggcctggccccgccacacacacgggccccctccccactcggccccacccgagaccctgtggccacttttctggaaacttgtcgggagcctggcagccagccagcaggacccgcctccctgcgggccgagtacctgcccccatctgtggcttccatcaaggtgtcggcggagctgctcagagctgccttgaaggacggccactcaggcgtgcccctgtgctgtgccaccctgcagtggctccttgctgagaatgctgctgtggacgtcgtgagggcccgagcactatcttccatccagggagtggcccctgatggcgccaacgttcacctcatcgtccgagaggtggccatgactgacctgtgcccagcagggcccatccaggccgtggagattcaagtggaaagctcctctctggccgacatttgcagggcgcaccatgccgttgtcgggcgcatgcagacgatggtgacagagcaggccacccagggctccagcgctcctgatctccgtgtgcagtacctccgccagatccacgccaaccacgagacactgctgcgggaggtgcagaccctgcgcgaccggctctgcacggaggatgaggccagctcctgtgccaccgcccagaggctgctacaggtgtaccggcagctgcgccaccccagcctcatcctgctgtgaccaggcgggcctgcccctgggctctggccacgcttccagcctctgtcacagcccccccaggcctcatgggttagagggaaaccgagctggcctggccagagccgtcagggaaggtaggacctggccacgtaggagcagaacgctcatgaaagtgcttggaggccgtggagcacaaagcagattctgattgggagcaaccgaggcgggctctgaacctggccggtccagcttcgcgtcctctgctggtgtctctccttctctgaccgcggccgcagcccctgcactcgccttcctcactgctgggcagccttcccaccaccgcagcagcccctgaggccaggaggcagtgcagggcattctggacccggagggccagagaaacaggatttctggggtttggacttggggtgagtttgtaactgttgctgccacaccaccaggagcaccggctgcccctctgggtggcactaccaggtgccccacggtacccttgtcacactgttcacacctgcccggctgcccactctgggaccccgaggtaggagggtgctccctgagaccaaagcacaaaacagcatgcagggagctcctgcaagtgcccgtggtctcgtgccacaccaaggaagggccagcgggtggcctgtggccggaatgctcaacaactaggtgcctccagccggggcagtacccagcactgtgcactattttcagggccactcagggtggcgctgtggcccgggggggggccctgagccccagcccccagcctcctccctcagcctgggctacggcccacctcctggtgctggtgttttcatctggggagggtgctcgcgccgctcccgctgcaggcactgtccgcgatgagtgcgggtaggagccgtgaggtgcttctctgctgtgacaaacgaccctgtctgtccgtgaaccttca

SEQ ID NO: 133062 - DNA, 3822 bp, Homo sapiens
  Payload ID: 6006
  Gene Symbol: FAAP100
  Gene Name: Fanconi anemia core complex associated protein 100
  ENST ID: ENST00000443656
  CDS Start-End: 47-340
ccgccgcgcggccggggcttctcactctgacgggcccgcgcgcacgatggccggcgccgcgccgcgggtccgctacctggcgggcttctgctgccctctcgggggcctggcggcgggcaagccccgcgtgctgtgccatgaggcagaggtcttcctgtccaccgggagcgagctcgtctacgtgtacgaccaggagggcgggctgctgaccgcggcgttccggttccccgaccaggtgtggcacctggagctgctggcgccgcgcaggttgctgtacgcgctgtgcgcccggaggggcctctactgcctgtcgctggaccacccgggcaggagcaggtgagggcgggcccgcggcctccctcccgcacactcctgctgcccccggactgcttcagagcgagcagccccacctcatcgcgcttggggacccgggctgccgccagctctgaagcctcggccgccatccctgcccgattatctggagcccctgcccccagcactctttctgcaagtgtcttgctcacagtccttagtctacgagccaggatgacagggacagcgaggacggtgaccagccttcccccgtgatccctgtggaccccgatgcctgcatccttcccgatgctgcgctgtgcgcgttcaccttgctggacagtgtgctggtcaccctggtgcagggccctgcccgatggaagatgcagctgtttgagcagccctgtcctggggaggacccccggccaggaggccagatcggtgaggtggagctgtcctcctacacgcccccagccggggtcccaggaaagcctgcagccccccacttccttccagtgctgtgctctgtgtcaccatcaggctccagggtcccgcacgacctcctcgggggctccgggggcttcacgctggaggacgccctcttcgggctcctctttggagctgatgccaccctcctgcagtcacctgtggtcctctgtggtctccctgatggccagctctgctgtgtgatcctgaaggccctggtcacctccaggtcagcccctggtgacccaaatgcccttgtcaagatcctccatcacctggaggagcccgtcatcttcataggggccttgaagacagagccacaggctgcagaagctgcagagaattttctgcctgacgaggatgtgcactgtgactgcctggtggcctttggtcaccacggccggatgctggccatcaaggccagctgggatgagtccgggaagctggtgcccgagctgcgggagtactgcctcccaggccctgtgctctgcgctgcctgtggcgggggtggccgcgtgtaccacagcaccccttctgacctctgtgtggtggatctgtctcggggaagcaccccgctgggccctgagcagcccgaagaaggcccgggaggcctgccccccatgctgtgcccagccagcctgaacatctgcagtgtcgtctcgctgtccgcgtctcccaggacgcatgaaggtggcaccaagctcctggccctgtccgccaaaggccgcctgatgacctgcagcctggacctggactctgagatgcctggcccagccaggatgaccacagagagtgcaggtcagaaaataaaggagctgctgtctggaattggcaacatctctgagagagtgtcttttctaaagaaggcggttgaccagcggaacaaggcactgacaagcctcaacgaggccatgaacgtgagctgtgcactgctgtcaagcggcacgggccccagacccatctcctgcaccaccagcaccacctggagccgcctgcagacacaggatgtgctcatggccacctgcgtgctagagaacagcagcagcttcagcctggaccaggggtggaccctgtgcatccaggtgctcaccagctcctgtgctctcgacctggactcggcctgctccgccatcacctacaccatccccgtggaccagctcggccccggtgctcggcgggaggtgacgctacccctgggccctggtgagaacggcgggctcgacctgcccgtgaccgtgtcctgcacgctgttctacagtctcagggaggtggtgggcggggcccttgccccctcagactctgaggacccctttctggatgagtgcccctccgacgtcctgcccgagcaagagggtgtttgcctgcccctgagcaggcacacagtggacatgctgcagtgtctgcgcttccctggcctggccccgccacacacacgggccccctccccactcggccccacccgagaccctgtggccacttttctggaaacttgtcgggagcctggcagccagccagcaggacccgcctccctgcgggccgagtacctgcccccatctgtggcttccatcaaggtgtcggcggagctgctcagagctgccttgaaggacggccactcaggcgtgcccctgtgctgtgccaccctgcagtggctccttgctgagaatgctgctgtggacgtcgtgagggcccgagcactatcttccatccagggagtggcccctgatggcgccaacgttcacctcatcgtccgagaggtggccatgactgacctgtgcccagcagggcccatccaggccgtggagattcaagtggaaagctcctctctggccgacatttgcagggcgcaccatgccgttgtcgggcgcatgcagacgatggtgacagagcaggccacccagggctccagcgctcctgatctccgtgtgcagtacctccgccagatccacgccaaccacgagacactgctgcgggaggtgcagaccctgcgcgaccggctctgcacggaggatgaggccagctcctgtgccaccgcccagaggctgctacaggtgtaccggcagctgcgccaccccagcctcatcctgctgtgaccaggcgggcctgcccctgggctctggccacgcttccagcctctgtcacagcccccccaggcctcatgggttagagggaaaccgagctggcctggccagagccgtcagggaaggtaggacctggccacgtaggagcagaacgctcatgaaagtgcttggaggccgtggagcacaaagcagattctgattgggagcaaccgaggcgggctctgaacctggccggtccagcttcgcgtcctctgctggtgtctctccttctctgaccgcggccgcagcccctgcactcgccttcctcactgctgggcagccttcccaccaccgcagcagcccctgaggccaggaggcagtgcagggcattctggacccggagggccagagaaacaggatttctggggtttggacttggggtgagtttgtaactgttgctgccacaccaccaggagcaccggctgcccctctgggtggcactaccaggtgccccacggtacccttgtcacactgttcacacctgcccggctgcccactctgggaccccgaggtaggagggtgctccctgagaccaaagcacaaaacagcatgcagggagctcctgcaagtgcccgtggtctcgtgccacaccaaggaagggccagcgggtggcctgtggccggaatgctcaacaactaggtgcctccagccggggcagtacccagcactgtgcactattttcagggccactcagggtggcgctgtggcccgggggggggccctgagccccagcccccagcctcctccctcagcctgggctacggcccacctcctggtgctggtgttttcatctggggagggtgctcgcgccgctcccgctgcaggcactgtccgcgatgagtgcgggtaggagccgtgaggtgcttctctgctgtgacaaacgaccctgtctgtccgtgaaccttca

SEQ ID NO: 133063 - DNA, 2996 bp, Homo sapiens
  Payload ID: 6006
  Gene Symbol: FAAP100
  Gene Name: Fanconi anemia core complex associated protein 100
  ENST ID: ENST00000425898
  CDS Start-End: 471-2063
tcaaagtgctgggattacaggcgtgagccaccgtgcccggccgttacttgtcctcttaagatgtcttgagagcctcatgcgtcccactgtttggtgacaggctacctggctacctctggaagataagccgggactgccccccagcagcccaccctttctccctagtggggcacgggagacgtcccctgctgagtcctcaccctccctgctctcagcacaggatccagtgtgcttttcctcccgcagcactggcttcgggacgttcagagagaacacactgagtgcgcgcagcctcccctgctcccctcacataaccactggggtcccgagagcgaggggcctgtcactccgggtccctgtggtttagggctgtttctgtagcgcctgcgacccccctggttttcactgtgaaggctgcaagggagaaaagaggcccactaggaacattctggggagccaagggtggggtaatgcaccacccggcccctgcgtggcccagatgtgggtggtgcgcttctcatacctggcagattagcctaggtccccggagcaccagcttcatcctctgtcctctttcctcctgtggcccaagaggagaggtcaggtcagatggctggaggcagcttccagagaggctcggtgtgggtggggccgggagaaacatgcccctggggcgggggctcactctctggcgtggctccacacccaccgtgtgcttgtcgtggagccaggctcggtgcctaccaggcctgagtcaagatgtggcacctggtgctgtgggtgtccccccgctcccgggggtcatgtctgtccttcgcagagtgtcttttctaaagaaggcggttgaccagcggaacaaggcactgacaagcctcaacgaggccatgaacgtgagctgtgcactgctgtcaagcggcacgggccccagacccatctcctgcaccaccagcaccacctggagccgcctgcagacacaggatgtgctcatggccacctgcgtgctagagaacagcagcagcttcagcctggaccaggggtggaccctgtgcatccaggtgctcaccagctcctgtgctctcgacctggactcggcctgctccgccatcacctacaccatccccgtggaccagctcggccccggtgctcggcgggaggtgacgctacccctgggccctggtgagaacggcgggctcgacctgcccgtgaccgtgtcctgcacgctgttctacagtctcagggaggtggtgggcggggcccttgccccctcagactctgaggacccctttctggatgagtgcccctccgacgtcctgcccgagcaagagggtgtttgcctgcccctgagcaggcacacagtggacatgctgcagtgtctgcgcttccctggcctggccccgccacacacacgggccccctccccactcggccccacccgagaccctgtggccacttttctggaaacttgtcgggagcctggcagccagccagcaggacccgcctccctgcgggccgagtacctgcccccatctgtggcttccatcaaggtgtcggcggagctgctcagagctgccttgaaggacggccactcaggcgtgcccctgtgctgtgccaccctgcagtggctccttgctgagaatgctgctgtggacgtcgtgagggcccgagcactatcttccatccagggagtggcccctgatggcgccaacgttcacctcatcgtccgagaggtggccatgactgacctgtgcccagcagggcccatccaggccgtggagattcaagtggaaagctcctctctggccgacatttgcagggcgcaccatgccgttgtcgggcgcatgcagacgatggtgacagagcaggccacccagggctccagcgctcctgatctccgtgtgcagtacctccgccagatccacgccaaccacgagacactgctgcgggaggtgcagaccctgcgcgaccggctctgcacggaggatgaggccagctcctgtgccaccgcccagaggctgctacaggtgtaccggcagctgcgccaccccagcctcatcctgctgtgaccaggcgggcctgcccctgggctctggccacgcttccagcctctgtcacagcccccccaggcctcatgggttagagggaaaccgagctggcctggccagagccgtcagggaaggtaggacctggccacgtaggagcagaacgctcatgaaagtgcttggaggccgtggagcacaaagcagattctgattgggagcaaccgaggcgggctctgaacctggccggtccagcttcgcgtcctctgctggtgtctctccttctctgaccgcggccgcagcccctgcactcgccttcctcactgctgggcagccttcccaccaccgcagcagcccctgaggccaggaggcagtgcagggcattctggacccggagggccagagaaacaggatttctggggtttggacttggggtgagtttgtaactgttgctgccacaccaccaggagcaccggctgcccctctgggtggcactaccaggtgccccacggtacccttgtcacactgttcacacctgcccggctgcccactctgggaccccgaggtaggagggtgctccctgagaccaaagcacaaaacagcatgcagggagctcctgcaagtgcccgtggtctcgtgccacaccaaggaagggccagcgggtggcctgtggccggaatgctcaacaactaggtgcctccagccggggcagtacccagcactgtgcactattttcagggccactcagggtggcgctgtggcccgggggggggccctgagccccagcccccagcctcctccctcagcctgggctacggcccacctcctggtgctggtgttttcatctggggagggtgctcgcgccgctcccgctgcaggcactgtccgcgatgagtgcgggtaggagccgtgaggtgcttctctgctgtgacaaacgaccctgtctgtccgtgaaccttc

SEQ ID NO: 133064 - DNA, 1101 bp, Homo sapiens
  Payload ID: 6006
  Gene Symbol: FAAP100
  Gene Name: Fanconi anemia core complex associated protein 100
  ENST ID: ENST00000541246
  CDS Start-End: 200-1101
tgtccgtactgcaggcccctccacgggcgttctctggtctacgagccaggatgacagggacagcgaggacggtgaccagccttcccccgtgatccctgtggaccccgatgcctgcatccttcccgatgctgcgctgtgcgcgttcaccttgctggacagtgtgctggtcaccctggtgcagggccctgcccgatggaagatgcagctgtttgagcagccctgtcctggggaggacccccggccaggaggccagatcggtgaggtggagctgtcctcctacacgcccccagccggggtcccaggaaagcctgcagccccccacttccttccagtgctgtgctctgtgtcaccatcaggctccagggtcccgcacgacctcctcgggggctccgggggcttcacgctggaggacgccctcttcgggctcctctttggagctgatgccaccctcctgcagtcacctgtggtcctctgtggtctccctgatggccagctctgctgtgtgatcctgaaggccctggtcacctccaggtcagcccctggtgacccaaatgcccttgtcaagatcctccatcacctggaggagcccgtcatcttcataggggccttgaagacagagccacaggctgcagaagctgcagagaattttctgcctgacgaggatgtgcactgtgactgcctggtggcctttggtcaccacggccggatgctggccatcaaggccagctgggatgagtccgggaagctggtgcccgagctgcgggagtactgcctcccaggccctgtgctctgcgctgcctgtggcgggggtggccgcgtgtaccacagcaccccttctgacctctgtgtggtggatctgtctcggggaagcaccccgctgggccctgagcagcccgaagaaggcccgggaggcctgccccccatgctgtgcccagccagcctgaacatctgcagtgtcgtctcgctgtccgcgtctcccaggacgcatgaaggtggcaccaagctcctggccctgtccgccaaaggccgcctgatgacctgcagcctggacctggactctgagatgcctggcccagccaggatgaccacagagagtgcagg

SEQ ID NO: 133065 - DNA, 924 bp, Homo sapiens
  Payload ID: 6006
  Gene Symbol: FAAP100
  Gene Name: Fanconi anemia core complex associated protein 100
  ENST ID: ENST00000536161
  CDS Start-End: 408-924
tactgatcataaatcttgttgcagataggagctgggcttggcgtggggccaaaagcctgccagcccccggagcagagtggggtgggcagcggagtaaaccgcggggtgaggctgctggtttggcgggccttctcccacgtccgtttcctcctccacgtgatcgtgatcatttcctctaggacagtcttggcatgttaccatccgtatggaagagatggcctgggaggactggatggggttggtgtgtgtgagcgagtgactcacaaggcttcagagggttaaaactagcagtcagaagacctgcggattcctgtggggaaattcggtcagaagaccagcggaggatccctgtggggaaattcacaacgatgcggcatctgacttcctgactctgaaggccaaatgagatgcacctggccctcctctccccactccccagcatcaaagacagcatttccagcccaaacaccttcagagcagccctggcgagaagagaggagcaaggaactgactccaggtctacgagccaggatgacagggacagcgaggacggtgaccagccttcccccgtgatccctgtggaccccgatgcctgcatccttcccgatgctgcgctgtgcgcgttcaccttgctggacagtgtgctggtcaccctggtgcagggccctgcccgatggaagatgcagctgtttgagcagccctgtcctggggaggacccccggccaggaggccagatcggtgaggtggagctgtcctcctacacgcccccagccggggtcccaggaaagcctgcagccccccacttccttccagtgctgtgctctgtgtcaccatcaggctccagggtcccgcacgacctcctcgggggctccgggggcttcacgctggaggacgccctcttcgggctcctctttggagctgatg

SEQ ID NO: 133066 - DNA, 1091 bp, Homo sapiens
  Payload ID: 6006
  Gene Symbol: FAAP100
  Gene Name: Fanconi anemia core complex associated protein 100
  ENST ID: ENST00000544302
  CDS Start-End: 343-1091
ttccgggcatggagcaggtgtccgtactgcaggcccctccacgggcgttctctggcggcgttccggttccccgaccaggtgtggcacctggagctgctggcgccgcgcaggttgctgtacgcgctgtgcgcccggaggggcctctactgcctgtcgctggaccacccgggcaggagcaggtctacgagccaggatgacagggacagcgaggacggtgaccagccttcccccgtgatccctgtggaccccgatgcctgcatccttcccgatgctgcgctgtgcgcgttcaccttgctggacagtgtgctggtcaccctggtgcagggccctgcccgatggaagatgcagctgtttgagcagccctgtcctggggaggacccccggccaggaggccagatcggtgaggtggagctgtcctcctacacgcccccagccggggtcccaggaaagcctgcagccccccacttccttccagtgctgtgctctgtgtcaccatcaggctccagggtcccgcacgacctcctcgggggctccgggggcttcacgctggaggacgccctcttcgggctcctctttggagctgatgccaccctcctgcagtcacctgtggtcctctgtggtctccctgatggccagctctgctgtgtgatcctgaaggccctggtcacctccaggtcagcccctggtgacccaaatgcccttgtcaagatcctccatcacctggaggagcccgtcatcttcataggggccttgaagacagagccacaggctgcagaagctgcagagaattttctgcctgacgaggatgtgcactgtgactgcctggtggcctttggtcaccacggccggatgctggccatcaaggccagctgggatgagtccgggaagctggtgcccgagctgcgggagtactgcctcccaggccctgtgctctgcgctgcctgtggcgggggtggccgcgtgtaccacagcaccccttctgacctctgtgtggtggatctgtctcggggaagcaccccgctgggccctgagcagcccgaagaaggcccgggaggcctgccccccatgctgtgcccagccagcctgaacat

SEQ ID NO: 133067 - DNA, 689 bp, Homo sapiens
  Payload ID: 6006
  Gene Symbol: FAAP100
  Gene Name: Fanconi anemia core complex associated protein 100
  ENST ID: ENST00000545865
  CDS Start-End: 1-333
tgcccctccgacgtcctgcccgagcaagagggtgtttgcctgcccctgagcaggcacacagtggacatgctgcagtgtctgcgcttccctggcctggccccgccacacacacgggccccctccccactcggccccacccgagaccctgtggccacttttctggaaacttgtcgggagcctggcagccagccagcaggacccgcctccctgcgggccgagtacctgcccccatctgtggcttccatcaaggtgtcggcggagctgctcagagctgccttgaaggacggccactcagttatgttttttaaacctatatatggaagcgtaacctaaatacagaagagtcacaaaggagcaaactgtgagcttcacagtgcgggcacccggggagggaggcagctgcgctcaccccaaagccccagcaccgttcatcaggcgtgcccctgtgctgtgccaccctgcagtggctccttgctgagaatgctgctgtggacgtcgtgagggcccgagcactatcttccatccagggagtggcccctgatggcgccaacgttcacctcatcgtccgagaggtggccatgactgacctgtgcccagcagggcccatccaggccgtggagattcaagtggaaagctcctctctggccgacatttgcagggcgcaccatgccgttgtcgggcgcatgcag

SEQ ID NO: 133068 - DNA, 569 bp, Homo sapiens
  Payload ID: 6007
  Gene Symbol: FAAP20
  Gene Name: Fanconi anemia core complex associated protein 20
  Uniprot ID: Q6NZ36
  ENST ID: ENST00000378543
  CDS Start-End: 2-340
gatggaggcggcgcggaggccgcggctggggttgagccgccggaggccgcgcccggcgggcgggagcccaggtgcggcccggagcccactgaagtcttcactgtcggacccaagaccttttcctggacaccctttccgccggacctgtggggcccgggccgttcctaccggctgcttcacggggcaggagggcacctggaatcccccgccaggtccctgccccagcgcccggcacctgatccctgcagggcccccagggtggagcagcagccgtctgtggagggtgccgcggccctgcgcagctgccccatgtgccagaaggagttcgcccccaggctgacccagctggatgttgacagccacctggcccagtgcttggccgaaagcacagaagacgtgacgtggtgagcgccatccaagagccctgcgcagagtgcggcgcccggacacgctctcccccgccagcagccccgcctctcggctcccccgccagcagccccgcctctcggctcccccgcatgcgcattaaagcagggcgggctcctgtctgtctctgtgttgtgatgaaa

SEQ ID NO: 133069 - DNA, 729 bp, Homo sapiens
  Payload ID: 6007
  Gene Symbol: FAAP20
  Gene Name: Fanconi anemia core complex associated protein 20
  Uniprot ID: Q6NZ36
  ENST ID: ENST00000378546
  CDS Start-End: 26-568
tcacttccgcccggcgcgggcttggatggaggcggcgcggaggccgcggctggggttgagccgccggaggccgcgcccggcgggcgggccttctggcggccgcccctggtttctcctggggggtgatgagcgggagcggctctgggccgagctactgcgcacggtgagcccggagctgatcctggatcacgaggtgccttcactgcccgccttcccaggacaggagcccaggtgcggcccggagcccactgaagtcttcactgtcggacccaagaccttttcctggacaccctttccgccggacctgtggggcccgggccgttcctaccggctgcttcacggggcaggagggcacctggaatcccccgccaggtccctgccccagcgcccggcacctgatccctgcagggcccccagggtggagcagcagccgtctgtggagggtgccgcggccctgcgcagctgccccatgtgccagaaggagttcgcccccaggctgacccagctggatgttgacagccacctggcccagtgcttggccgaaagcacagaagacgtgacgtggtgagcgccatccaagagccctgcgcagagtgcggcgcccggacacgctctcccccgccagcagccccgcctctcggctcccccgccagcagccccgcctctcggctcccccgcatgcgcattaaagcagggcgggctcctgtctgtctctgtgttgtgatgaaa

SEQ ID NO: 133070 - DNA, 811 bp, Homo sapiens
  Payload ID: 6007
  Gene Symbol: FAAP20
  Gene Name: Fanconi anemia core complex associated protein 20
  Uniprot ID: Q6NZ36
  ENST ID: ENST00000400918
  CDS Start-End: 3-515
ggatggaggcggcgcggaggccgcggctggggttgagccgccggaggccgcgcccggcgggcgggccttctggcggccgcccctggtttctcctggggggtgatgagcgggagcggctctgggccgagctactgcgcacggtgagcccggagctgatcctggatcacgaggtgccttcactgcccgccttcccaggacaggagcccaggtgcggcccggagcccactgaagtcttcactgtcggacccaagaccttttcctggacaccctttccgccggacctgtggggcccgggccgttcctaccggctgcttcacggggcaggagggcacctggaatcccccgccaggtccctgccccagcgcccggcacctgatccctgcagggcccccagggtggagcagcagccgtctgtggagggtgccgcggccctgcgcagctgccccatgtgccagaaggagttcgcccccaggtacttcaactcccgcccccacctgtgtcccgctggctcctaagctgcccccctacgtgtgggttgcgtctgagatgtggggcaggcgccactcacggaaaaaaggcatcagaggagcttccacatcatcggaacattttattcctcaggacgctacacgctcactttcctggcggagcaggtcagtgcatcgagttctgtttccgtggaaaatgtgcaccttggaaaccgcatgacagccccctcggcagggtccccgcggatccgccgcgacgcaggcacagcagcaagttcctccagcacgaagctggcctgcccgggcccaggtgtgagggactg

SEQ ID NO: 133071 - DNA, 1413 bp, Homo sapiens
  Payload ID: 6007
  Gene Symbol: FAAP20
  Gene Name: Fanconi anemia core complex associated protein 20
  ENST ID: ENST00000400919
  CDS Start-End: 27-596
ctcacttccgcccggcgcgggcttggatggaggcggcgcggaggccgcggctggggttgagccgccggaggccgcgcccggcgggcgggagcccaggtgcggcccggagcccactgaagtcttcactgtcggacccaagaccttttcctggacaccctttccgccggacctgtggggcccgggccgttcctaccggctgcttcacggggcaggagggcacctggaatcccccgccaggtccctgccccagcgcccggcacctgatccctgcagggcccccagggtggagcagcagccgtctgtggagggtgccgcggccctgcgcagctgccccatgtgccagaaggagttcgcccccaggtacttcaactcccgcccccacctgtgtcccgctggctcctaagctgcccccctacgtgtgggttgcgtctgagatgtggggcaggcgccactcacggaaaaaaggcatcagaggagcttccacatcatcggaacattttattcctcaggacgctacacgctcactttcctggcggagcaggtcagtgcatcgagttctgtttccgtggaaaatgtgcaccttggaaaccgcatgacagccccctcggcagggtccccgcggatccgccgcgacgcaggcacagcagcaagttcctccagcacgaagctggcctgcccgggcccaggtgtgagggactgttctgctcccagcagcgcccgctgacgcttccctctgcggtctcggcgcaagcgtctgtccctggccgccctcggagccgtgcccagcctggcatgcatatgcggtggttaaggatacagttaaagggtcaatcacgcgtgtccacgacagagacgcacgcggcctcacaccgactcctcggtggacagcaataatgggttgatatactcaaagccttcgaactctgactggtcgatcctctttatggcatccctgtgggcaaaggtggcaggggggaggggggtgaccgtgtgttcattcccttgggggaagcggagtcacgttcgcataagaatcctcccccaacgcccactggagagatgacaccaggcgggtgggactcaagggcaggctgggtcaccagctgcccaaggtgccggcctgccatggggctgcccgaggggtgctccagggacccgcacccagtgggactcactcatcgtctggggtcagctgcacgggctcgctggtgaactgtgtgtcaaagttgtccagaccgtagtcgtctgtgatctgtggctggaatggagggagcgcctgcttcttctccagcttggaaaaacaataggagaagggtcagctccgcgcgggcatcatccctaccagattgagtgttttgcacgcacttcaatcacaaaatgaaacagtgagaaagtcagcatttcaatctgcct

SEQ ID NO: 133072 - DNA, 2313 bp, Homo sapiens
  Payload ID: 6007
  Gene Symbol: FAAP20
  Gene Name: Fanconi anemia core complex associated protein 20
  ENST ID: ENST00000428120
  CDS Start-End: 1-580
ggcgcggaggccgcggctggggttgagccgccggaggccgcgcccggcgggcgggccttctggcggccgcccctggtttctcctggggggtgatgagcgggagcggctctgggccgagctactgcgcacggtgagcccggagctgatcctggatcacgaggtgccttcactgcccgccttcccaggacaggagcccaggtgcggcccggagcccactgaagtcttcactgtcggacccaagaccttttcctggacaccctttccgccggacctgtggggcccgggccgttcctaccggctgcttcacggggcaggagggcacctggaatcccccgccaggtccctgccccagcgcccggcacctgatccctgcagggcccccagggtggagcagcagccgtctgtggagggtgccgcggccctgcgcagctgccccatgtgccagaaggagttcgcccccagaagcaaaaacagctcgggaatgcgaaggcaccggagtccaaagttggcagccaacaacaacaacaacaaaagaaaaggccgggcacggtggctcacgcctgtaatcccagccctttgagaggctgaggcaggctgacccagctggatgttgacagccacctggcccagtgcttggccgaaagcacagaagacgtgacgtgtctttcatggatgtgcaagactttgaatgaccctggcagtcaagggtgagtgtcatccacaggagagccggccagccacgggctccatgggcagttgccccgcaccacgcccacgcaggcccactgtgcagcccccaagtcaccagagttttcgagaaccacttccaaaagacaccgtcgtgaccggagccattagcaaatatcaggatttttcaaaccacacttcaatacatccttcactttaatttataaaacaaattactgaatataaaagtctcccctctgatgagcacagcattactcacatattgtgtacaagaacggccaaactggtaaccggcacgctactggcaacacggcagtatttagccaccagccgcacaatggggtggagcggcccctgagtcatggaggcctggggtctctgcgcctggccaagagggctgcgtggcaatttccacacctgtgcaccaggcctcactcagaggcatgaggtggcgcgaccccctctcccagggagctcagaagacggctctgccacacctgacacctggcagctggcagccctgcctctaggaagcctcagctctggacagctgtgccttcacctgaggggtacttcaactcccgcccccacctgtgtcccgctggctcctaagctgcccccctacgtgtgggttgcgtctgagatgtggggcaggcgccactcacggaaaaaaggcatcagaggagcttccacatcatcggaacattttattcctcaggacgctacacgctcactttcctggcggagcaggtcagtgcatcgagttctgtttccgtggaaaatgtgcaccttggaaaccgcatgacagccccctcggcagggtccccgcggatccgccgcgacgcaggcacagcagcaagttcctccagcacgaagctggcctgcccgggcccaggtgtgagggactgttctgctcccagcagcgcccgctgacgcttccctctgcggtctcggcgcaagcgtctgtccctggccgccctcggagccgtgcccagcctggcatgcatatgcggtggttaaggatacagttaaagggtcaatcacgcgtgtccacgacagagacgcacgcggcctcacaccgactcctcggtggacagcaataatgggttgatatactcaaagccttcgaactctgactggtcgatcctctttatggcatccctgtgggcaaaggtggcaggggggaggggggtgaccgtgtgttcattcccttgggggaagcggagtcacgttcgcataagaatcctcccccaacgcccactggagagatgacaccaggcgggtgggactcaagggcaggctgggtcaccagctgcccaaggtgccggcctgccatggggctgcccgaggggtgctccagggacccgcacccagtgggactcactcatcgtctggggtcagctgcacgggctcgctggtgaactgtgtgtcaaagttgtccagaccgtagtcgtctgtgatctgtggctggaatggagggagcgcctgcttcttctccagcttggaaaaacaataggagaagggtcagctccgcgcgggcatcatccctaccagattgagtgttttgcacgcacttcaatcacaaaatgaaacagtgagaaagtc

SEQ ID NO: 133073 - DNA, 1544 bp, Homo sapiens
  Payload ID: 6007
  Gene Symbol: FAAP20
  Gene Name: Fanconi anemia core complex associated protein 20
  ENST ID: ENST00000420515
  CDS Start-End: 1-587
tggaggcggcgcggaggccgcggctggggttgagccgccggaggccgcgcccggcgggcgggccttctggcggccgcccctggtttctcctggggggtgatgagcgggagcggctctgggccgagctactgcgcacggtgagcccggagctgatcctggatcacgaggtgccttcactgcccgccttcccaggacaggagcccaggtgcggcccggagcccactgaagtcttcactgtcggacccaagaccttttcctggacaccctttccgccggacctgtggggcccgggccgttcctaccggctgcttcacggggcaggagggcacctggaatcccccgccaggtccctgccccagcgcccggcacctgatccctgcagggcccccagggtggagcagcagccgtctgtggagggtgccgcggccctgcgcagctgccccatgtgccagaaggagttcgcccccagaagcaaaaacagctcgggaatgcgaaggcaccggagtccaaagttggcagccaacaacaacaacaacaaaagaaaaggccgggcacggtggctcacgcctgtaatcccagccctttgagaggctgaggcaggtgggttgctggagcccaggagtttgagaccagcctgggcaacatggcaagatcccatctttacatgcctgggcgtggtggcgcgtgcctgtggtcctagctactctggaggctgaagtgggaggattcccttgagccaggaattggaggctgtagtgaagtatgattgcaccactgcactccagcctgggtgacagagtaagaccctgaatcacggacagagggtactgttgggagccctggggagaaatccatgctcttggctgaagctctgagatccttgttgctgtcagggtgctgccccccgccccccggggaggggcttttgtctttgcatcgcctgcttttccagatagtctaaaaaaagacttctgaagacaaggacgttcacgaggaaaaacttgccattttgagctttttaagcagttgctgaaagcttggcagactgcctcaatttttcctaagtaggcgtcaatgaagtcaggtccaggccttggtgtgtctggaatgcttcaagcacattcgaacacttgatcgtaagggagagccggtactttggaaccggaactcacccgaggctgtggccaccgcatgggcaggctagctgggggacaagccccatatctttgggaacaagggtttgcacagccaccctgggatgccctgggactcctgaccgcacaggaccccagcagggaggccgcctggattggagggtctggtctaacagccggacttggtcttgaaccgtcgccctgtcccgcacaggcgcctgctgagcctggagccctggcagaggcgggtctggggagtggagctgccaggaggcctcccatttctcacagccttggtgttctccgggtcacccagaggaccgtcaaatgctggatttgacaaactatgtagaatgttctttgtgtctttaagatcttcttgtggtccta

SEQ ID NO: 133074 - DNA, 2216 bp, Homo sapiens
  Payload ID: 6007
  Gene Symbol: FAAP20
  Gene Name: Fanconi anemia core complex associated protein 20
  Uniprot ID: Q6NZ36
  ENST ID: ENST00000414253
  CDS Start-End: 27-614
ctcacttccgcccggcgcgggcttggatggaggcggcgcggaggccgcggctggggttgagccgccggaggccgcgcccggcgggcgggccttctggcggccgcccctggtttctcctggggggtgatgagcgggagcggctctgggccgagctactgcgcacggtgagcccggagctgatcctggatcacgaggtgccttcactgcccgccttcccaggacaggagcccaggtgcggcccggagcccactgaagtcttcactgtcggacccaagaccttttcctggacaccctttccgccggacctgtggggcccgggccgttcctaccggctgcttcacggggcaggagggcacctggaatcccccgccaggtccctgccccagcgcccggcacctgatccctgcagggcccccagggtggagcagcagccgtctgtggagggtgccgcggccctgcgcagctgccccatgtgccagaaggagttcgcccccaggctgacccagctggatgttgacagccacctggcccagtgcttggccgaaagcacagaagacgtgacgtgtctttcatggatgtgcaagactttgaatgaccctggcagtcaagggtgagtgtcatccacaggagagccggccagccacgggctccatgggcagttgccccgcaccacgcccacgcaggcccactgtgcagcccccaagtcaccagagttttcgagaaccacttccaaaagacaccgtcgtgaccggagccattagcaaatatcaggatttttcaaaccacacttcaatacatccttcactttaatttataaaacaaattactgaatataaaagtctcccctctgatgagcacagcattactcacatattgtgtacaagaacggccaaactggtaaccggcacgctactggcaacacggcagtatttagccaccagccgcacaatggggtggagcggcccctgagtcatggaggcctggggtctctgcgcctggccaagagggctgcgtggcaatttccacacctgtgcaccaggcctcactcagaggcatgaggtggcgcgaccccctctcccagggagctcagaagacggctctgccacacctgacacctggcagctggcagccctgcctctaggaagcctcagctctggacagctgtgccttcacctgaggggtacttcaactcccgcccccacctgtgtcccgctggctcctaagctgcccccctacgtgtgggttgcgtctgagatgtggggcaggcgccactcacggaaaaaaggcatcagaggagcttccacatcatcggaacattttattcctcaggacgctacacgctcactttcctggcggagcaggtcagtgcatcgagttctgtttccgtggaaaatgtgcaccttggaaaccgcatgacagccccctcggcagggtccccgcggatccgccgcgacgcaggcacagcagcaagttcctccagcacgaagctggcctgcccgggcccaggtgtgagggactgttctgctcccagcagcgcccgctgacgcttccctctgcggtctcggcgcaagcgtctgtccctggccgccctcggagccgtgcccagcctggcatgcatatgcggtggttaaggatacagttaaagggtcaatcacgcgtgtccacgacagagacgcacgcggcctcacaccgactcctcggtggacagcaataatgggttgatatactcaaagccttcgaactctgactggtcgatcctctttatggcatccctgtgggcaaaggtggcaggggggaggggggtgaccgtgtgttcattcccttgggggaagcggagtcacgttcgcataagaatcctcccccaacgcccactggagagatgacaccaggcgggtgggactcaagggcaggctgggtcaccagctgcccaaggtgccggcctgccatggggctgcccgaggggtgctccagggacccgcacccagtgggactcactcatcgtctggggtcagctgcacgggctcgctggtgaactgtgtgtcaaagttgtccagaccgtagtcgtctgtgatctgtggctggaatggagggagcgcctgcttcttctccagcttggaaaaacaataggagaagggtcagctccgcgcgggcatcatccctaccagattgagtgttttgcacgcacttcaatcacaaaatgaaacagtgagaaagtc

SEQ ID NO: 133075 - DNA, 855 bp, Homo sapiens
  Payload ID: 6007
  Gene Symbol: FAAP20
  Gene Name: Fanconi anemia core complex associated protein 20
  ENST ID: ENST00000440825
  CDS Start-End: 1-442
cgcggaggccgcggctggggttgagccgccggaggccgcgcccggcgggcgggagcccaggtgcggcccggagcccactgaagtcttcactgtcggacccaagaccttttcctggacaccctttccgccggacctgtggggcccgggccgttcctaccggctgcttcacggggcaggagggcacctggaatcccccgccaggtccctgccccagcgcccggcacctgatccctgcagggcccccagggtggagcagcagccgtctgtggagggtgccgcggccctgcgcagctgccccatgtgccagaaggagttcgcccccagaagcaaaaacagctcgggaatgcgaaggcaccggagtccaaagttggcagccaacaacaacaacaacaaaagaaaaggccgggcacggtggctcacgcctgtaatcccagccctttgagaggctgaggcaggtgggttgctggagcccaggagtttgagaccagcctgggcaacatggcaagatcccatctttacatgcctgggcgtggtggcgcgtgcctgtggtcctagctactctggaggctgaagtgggaggattcccttgagccaggaattggaggctgtagtgaagtatgattgcaccactgcactccagcctgggtgacagagctgacccagctggatgttgacagccacctggcccagtgcttggccgaaagcacagaagacgtgacgtggtgagcgccatccaagagccctgcgcagagtgcggcgcccggacacgctctcccccgccagcagccccgcctctcggctcccccgccagcagccccgcctctcggctcccccgcatgcgcattaaagcagggc

SEQ ID NO: 133076 - DNA, 875 bp, Homo sapiens
  Payload ID: 6008
  Gene Symbol: FAAP24
  Gene Name: Fanconi anemia core complex associated protein 24
  ENST ID: ENST00000254262
  CDS Start-End: 152-361
ggctggatgaaggactgggcgagcaccgagggcgtgaacccggaaggtggcgcggccaccagtaacatgatctctagactgggacggtggggttcctgccggctgtattcgggccttggactggactgagaagctacggtggagaccatccatggaaaagaacccccctgatgatacgggccccgtgcacgtgcctttggggcatattgtggccaatgagaaatggcgcgggtcacagctggcgcaggagatgcaagatgctgcattctttatgtcaccgaagctgatttggtggcaggaaatggctacagaaagaggcttgttcgggttagaaattccaataatcttaaaggaattgtagtcgttgaaaaaacccggatgagtgaacaatacttcccagccctacagaagtttactgtgctggaccttggaatggtgctgcttccagtggccagccagatggaagcatcctgcctcgtcatccagttggttcaagagcaaaccaaagagcccagtaagaaccctcttctcgggaagaaacgggccctgctgctgtctgagccttcgctccttcgaaccgtgcagcagatcccaggagttggaaaagttaaagctccccttctcctccagaagtttccaagcatccagcaactgagtaatgcttccattggggaactggagcaggtggtcggacaagcagtggcacagcagatccatgccttcttcacgcagcccaggtgagggctggcctcagggccacggcatcttctcctgagaccacaaacaccaggatcttgttttcagctttaaaaaccaagagaatgggccgggtgcactggctcacgcctctaatctcagcactttgggaggccgaa

SEQ ID NO: 133077 - DNA, 836 bp, Homo sapiens
  Payload ID: 6008
  Gene Symbol: FAAP24
  Gene Name: Fanconi anemia core complex associated protein 24
  ENST ID: ENST00000589646
  CDS Start-End: 306-668
gactgggcgagcaccgagggcgtgaacccggaaggtggcgcggccaccagtaacatgatctctagactgggacggtggggttcctgccggctgtattcgggccttggactggactgagaagctacgggaaaattaagctcattttcgaggatggcttgacaccagacttttatctgtcgaacagatgctgcattctttatgtcaccgaagctgatttggtggcaggaaatggctacagaaagaggcttgttcgggttagaaattccaataatcttaaaggaattgtagtcgttgaaaaaacccggatgagtgaacaatacttcccagccctacagaagtttactgtgctggaccttggaatggtgctgcttccagtggccagccagatggaagcatcctgcctcgtcatccagttggttcaagagcaaaccaaagagcccagtaagaaccctcttctcgggaagaaacgggccctgctgctgtctgagccttcgctccttcgaaccgtgcagcagatcccaggagttggaaaagttaaagctccccttctcctccagaagtttccaagcatccagcaactgagtaatgcttccattggggaactggagcaggtggtcggacaagcagtggcacagcagatccatgccttcttcacgcagcccaggtgagggctggcctcagggccacggcatcttctcctgagaccacaaacaccaggatcttgttttcagctttaaaaaccaagagaatgggccgggtgcactggctcacgcctctaatctcagcactttgggaggccgaagacagcggatcatctgaggtcaggagttcaagac

SEQ ID NO: 133078 - DNA, 784 bp, Homo sapiens
  Payload ID: 6008
  Gene Symbol: FAAP24
  Gene Name: Fanconi anemia core complex associated protein 24
  ENST ID: ENST00000590179
  CDS Start-End: 130-492
gcggccaccagtaacatgatctctagactgggacggtggggttcctgccggctgtattcgggccttggactggactgagaagctacgtccaataatcttaaaggaattgtagtcgttgaaaaaacccggatgagtgaacaatacttcccagccctacagaagtttactgtgctggaccttggaatggtgctgcttccagtggccagccagatggaagcatcctgcctcgtcatccagttggttcaagagcaaaccaaagagcccagtaagaaccctcttctcgggaagaaacgggccctgctgctgtctgagccttcgctccttcgaaccgtgcagcagatcccaggagttggaaaagttaaagctccccttctcctccagaagtttccaagcatccagcaactgagtaatgcttccattggggaactggagcaggtggtcggacaagcagtggcacagcagatccatgccttcttcacgcagcccaggtgagggctggcctcagggccacggcatcttctcctgagaccacaaacaccaggatcttgttttcagctttaaaaaccaagagaatgggccgggtgcactggctcacgcctctaatctcagcactttgggaggccgaagacagcggatcatctgaggtcaggagttcaagaccagcctggccaacatggagaaacccctaaaaataggaacaattagccaggcatggtgacaggtgcctgtaatcccagctacttgggaggccgaggcatgagaatcacttgaacccgggaggcgg

SEQ ID NO: 133079 - DNA, 2298 bp, Homo sapiens
  Payload ID: 6008
  Gene Symbol: FAAP24
  Gene Name: Fanconi anemia core complex associated protein 24
  Uniprot ID: Q9BTP7
  ENST ID: ENST00000588258
  CDS Start-End: 111-758
ggaaggtggcgcggccaccagtaacatgatctctagactgggacggtggggttcctgccggctgtattcgggccttggactggactgagaagctacggtggagaccatccatggaaaagaacccccctgatgatacgggccccgtgcacgtgcctttggggcatattgtggccaatgagaaatggcgcgggtcacagctggcgcaggagatgcaagggaaaattaagctcattttcgaggatggcttgacaccagacttttatctgtcgaacagatgctgcattctttatgtcaccgaagctgatttggtggcaggaaatggctacagaaagaggcttgttcgggttagaaattccaataatcttaaaggaattgtagtcgttgaaaaaacccggatgagtgaacaatacttcccagccctacagaagtttactgtgctggaccttggaatggtgctgcttccagtggccagccagatggaagcatcctgcctcgtcatccagttggttcaagagcaaaccaaagagcccagtaagaaccctcttctcgggaagaaacgggccctgctgctgtctgagccttcgctccttcgaaccgtgcagcagatcccaggagttggaaaagttaaagctccccttctcctccagaagtttccaagcatccagcaactgagtaatgcttccattggggaactggagcaggtggtcggacaagcagtggcacagcagatccatgccttcttcacgcagcccaggtgagggctggcctcagggccacggcatcttctcctgagaccacaaacaccaggatcttgttttcagctttaaaaaccaagagaatgggccgggtgcactggctcacgcctctaatctcagcactttgggaggccgaagacagcggatcatctgaggtcaggagttcaagaccagcctggccaacatggagaaacccctaaaaataggaacaattagccaggcatggtgacaggtgcctgtaatcccagctacttgggaggccgaggcatgagaatcacttgaacccgggaggcggaggttgcagtgagctgagatcgtgccactgcactccagcctgggcaccagagcgagactccgtctcaaagaaaacaacaaaaaaaaaaaaaaaagaaaaaggattttctccagcagcaaccagtgaaagatgaggcgaggcttgaatggagcccgtgggtcgtcctgccttagcgtctgagttcagcttgtgaagttagtgggccgcagagggcactgccttcattctgctaagacgaaaagggctggtgggatcttcgcaagagagtcagggactcacactcagcaaaaagcattagggccgattttaatgtgcgaccttgacctgcatctgtcatggaaagtgccttctaaaaagcttcagtggtggatgtgaccatctgaaggaaacaaatgtacaaggaagcactgtgtatcctaagccctgggttcccagagtttcacctgctgttcatcaggtctggccttcatatacccgtactgcgagggctgtttccaatgtaaataaataactgcgcaacagttccttcctcctttcctttgttcctccctccccccggcctttttttttggcagatgtacagtttgtttataatcactgcatatgtcttctgcacacagaaagtatgaagtctgaagttcccacttaaagttgaaaactcaacggccgggcatagtggctcacacctgtaatcccagcactttgggaggccaaggggggtgaatcacaaggtcaggagatccagaccatcctggccgacatggtgaagccctgtctctactaaaaatacaaaaattagctgggtgtggtggcacacacctgtaatcccaactactcaggagactgaggcacgagaatcgcttgaacccaggaggtggaggttgcaatgggccgagattgcaccactgcactccagcctggatgacagagtgagactccatctcaaaaaaaaaaaaaaaaaatttaaagttgaaaactcaacatgcatgaggcagaacaggctgtgtttgtatatgaaaggcccaacaatggaaggatacaagaaaatgatggcagcagctgcatctagtgagggaagcaggggctggggatcaaaaggtacaaattgcccattcaaaaaatagacacaggccaggcacagtggctcacacctgtagtcccagcactttgggaggctgaggtgggaggattgcttgagtccaggatttcgagatcagcctgggcaacatggcaagaccccatctctac

SEQ ID NO: 133080 - DNA, 865 bp, Homo sapiens
  Payload ID: 6008
  Gene Symbol: FAAP24
  Gene Name: Fanconi anemia core complex associated protein 24
  Uniprot ID: Q9BTP7
  ENST ID: ENST00000590281
  CDS Start-End: 88-735
ctgccggctgtattcgggccttggactggactgagaagctacggtgcggatccagctggggtatcaggggctaggtggagaccatccatggaaaagaacccccctgatgatacgggccccgtgcacgtgcctttggggcatattgtggccaatgagaaatggcgcgggtcacagctggcgcaggagatgcaagggaaaattaagctcattttcgaggatggcttgacaccagacttttatctgtcgaacagatgctgcattctttatgtcaccgaagctgatttggtggcaggaaatggctacagaaagaggcttgttcgggttagaaattccaataatcttaaaggaattgtagtcgttgaaaaaacccggatgagtgaacaatacttcccagccctacagaagtttactgtgctggaccttggaatggtgctgcttccagtggccagccagatggaagcatcctgcctcgtcatccagttggttcaagagcaaaccaaagagcccagtaagaaccctcttctcgggaagaaacgggccctgctgctgtctgagccttcgctccttcgaaccgtgcagcagatcccaggagttggaaaagttaaagctccccttctcctccagaagtttccaagcatccagcaactgagtaatgcttccattggggaactggagcaggtggtcggacaagcagtggcacagcagatccatgccttcttcacgcagcccaggtgagggctggcctcagggccacggcatcttctcctgagaccacaaacaccaggatcttgttttcagctttaaaaaccaagagaatgggccgggtgcactggctcacgcctctaatctcagcactttgggaggc

SEQ ID NO: 133081 - DNA, 5451 bp, Homo sapiens
  Payload ID: 6009
  Gene Symbol: FANCA
  Gene Name: Fanconi anemia, complementation group A
  Uniprot ID: O15360
  ENST ID: ENST00000389301
  CDS Start-End: 32-4399
agccgccgccggggctgtaggcgccaaggccatgtccgactcgtgggtcccgaactccgcctcgggccaggacccagggggccgccggagggcctgggccgagctgctggcgggaagggtcaagagggaaaaatataatcctgaaagggcacagaaattaaaggaatcagctgtgcgcctcctgcgaagccatcaggacctgaatgcccttttgcttgaggtagaaggtccactgtgtaaaaaattgtctctcagcaaagtgattgactgtgacagttctgaggcctatgctaatcattctagttcatttataggctctgctttgcaggatcaagcctcaaggctgggggttcccgtgggtattctctcagccgggatggttgcctctagcgtgggacagatctgcacggctccagcggagaccagtcaccctgtgctgctgactgtggagcagagaaagaagctgtcttccctgttagagtttgctcagtatttattggcacacagtatgttctcccgtctttccttctgtcaagaattatggaaaatacagagttctttgttgcttgaagcggtgtggcatcttcacgtacaaggcattgtgagcctgcaagagctgctggaaagccatcccgacatgcatgctgtgggatcgtggctcttcaggaatctgtgctgcctttgtgaacagatggaagcatcctgccagcatgctgacgtcgccagggccatgctttctgattttgttcaaatgtttgttttgaggggatttcagaaaaactcagatctgagaagaactgtggagcctgaaaaaatgccgcaggtcacggttgatgtactgcagagaatgctgatttttgcacttgacgctttggctgctggagtacaggaggagtcctccactcacaagatcgtgaggtgctggttcggagtgttcagtggacacacgcttggcagtgtaatttccacagatcctctgaagaggttcttcagtcataccctgactcagatactcactcacagccctgtgctgaaagcatctgatgctgttcagatgcagagagagtggagctttgcgcggacacaccctctgctcacctcactgtaccgcaggctctttgtgatgctgagtgcagaggagttggttggccatttgcaagaagttctggaaacgcaggaggttcactggcagagagtgctctcctttgtgtctgccctggttgtctgctttccagaagcgcagcagctgcttgaagactgggtggcgcgtttgatggcccaggcattcgagagctgccagctggacagcatggtcactgcgttcctggttgtgcgccaggcagcactggagggcccctctgcgttcctgtcatatgcagactggttcaaggcctcctttgggagcacacgaggctaccatggctgcagcaagaaggccctggtcttcctgtttacgttcttgtcagaactcgtgccttttgagtctccccggtacctgcaggtgcacattctccacccacccctggttcccggcaagtaccgctccctcctcacagactacatctcattggccaagacacggctggccgacctcaaggtttctatagaaaacatgggactctacgaggatttgtcatcagctggggacattactgagccccacagccaagctcttcaggatgttgaaaaggccatcatggtgtttgagcatacggggaacatcccagtcaccgtcatggaggccagcatattcaggaggccttactacgtgtcccacttcctccccgccctgctcacacctcgagtgctccccaaagtccctgactcccgtgtggcgtttatagagtctctgaagagagcagataaaatccccccatctctgtactccacctactgccaggcctgctctgctgctgaagagaagccagaagatgcagccctgggagtgagggcagaacccaactctgctgaggagcccctgggacagctcacagctgcactgggagagctgagagcctccatgacagaccccagccagcgtgatgttatatcggcacaggtggcagtgatttctgaaagactgagggctgtcctgggccacaatgaggatgacagcagcgttgagatatcaaagattcagctcagcatcaacacgccgagactggagccacgggaacacatggctgtggacctcctgctgacgtctttctgtcagaacctgatggctgcctccagtgtcgctcccccggagaggcagggtccctgggctgccctcttcgtgaggaccatgtgtggacgtgtgctccctgcagtgctcacccggctctgccagctgctccgtcaccagggcccgagcctgagtgccccacatgtgctggggttggctgccctggccgtgcacctgggtgagtccaggtctgcgctcccagaggtggatgtgggtcctcctgcacctggtgctggccttcctgtccctgcgctctttgacagcctcctgacctgtaggacgagggattccttgttcttctgcctgaaattttgtacagcagcaatttcttactctctctgcaagttttcttcccagtcacgagatactttgtgcagctgcttatctccaggccttattaaaaagtttcagttcctcatgttcagattgttctcagaggcccgacagcctctttctgaggaggacgtagccagcctttcctggagacccttgcaccttccttctgcagactggcagagagctgccctctctctctggacacacagaaccttccgagaggtgttgaaagaggaagatgttcacttaacttaccaagactggttacacctggagctggaaattcaacctgaagctgatgctctttcagatactgaacggcaggacttccaccagtgggcgatccatgagcactttctccctgagtcctcggcttcagggggctgtgacggagacctgcaggctgcgtgtaccattcttgtcaacgcactgatggatttccaccaaagctcaaggagttatgaccactcagaaaattctgatttggtctttggtggccgcacaggaaatgaggatattatttccagattgcaggagatggtagctgacctggagctgcagcaagacctcatagtgcctctcggccacaccccttcccaggagcacttcctctttgagattttccgcagacggctccaggctctgacaagcgggtggagcgtggctgccagccttcagagacagagggagctgctaatgtacaaacggatcctcctccgcctgccttcgtctgtcctctgcggcagcagcttccaggcagaacagcccatcactgccagatgcgagcagttcttccacttggtcaactctgagatgagaaacttctgctcccacggaggtgccctgacacaggacatcactgcccacttcttcaggggcctcctgaacgcctgtctgcggagcagagacccctccctgatggtcgacttcatactggccaagtgccagacgaaatgccccttaattttgacctctgctctggtgtggtggccgagcctggagcctgtgctgctctgccggtggaggagacactgccagagcccgctgccccgggaactgcagaagctacaagaaggccggcagtttgccagcgatttcctctcccctgaggctgcctccccagcacccaacccggactggctctcagctgctgcactgcactttgcgattcaacaagtcagggaagaaaacatcaggaagcagctaaagaagctggactgcgagagagaggagctattggttttccttttcttcttctccttgatgggcctgctgtcgtcacatctgacctcaaatagcaccacagacctgccaaaggctttccacgtttgtgcagcaatcctcgagtgtttagagaagaggaagatatcctggctggcactctttcagttgacagagagtgacctcaggctggggcggctcctcctccgtgtggccccggatcagcacaccaggctgctgcctttcgctttttacagtcttctctcctacttccatgaagacgcggccatcagggaagaggccttcctgcatgttgctgtggacatgtacttgaagctggtccagctcttcgtggctggggatacaagcacagtttcacctccagctggcaggagcctggagctcaagggtcagggcaaccccgtggaactgataacaaaagctcgtctttttctgctgcagttaatacctcggtgcccgaaaaagagcttctcacacgtggcagagctgctggctgatcgtggggactgcgacccagaggtgagcgccgccctccagagcagacagcaggctgcccctgacgctgacctgtcccaggagcctcatctcttctgacgggacctgccactgcacaccagcccagctcccgtgtaaataatttattacaagcataacatggagctcttgttgcactaaaaagtggattacaaatctcctcgactgctttagtggggaaaggaatcaattatttatgaactgtccggccccgagtcactcagcgtttgcgggaaaataaaccactggtcccagagcagaggaaggctacttgagccggacaccaagcccgcctccagcaccaagggcgggcagcaccctccgaccctcccatgcgggtgcacacgaagggtgaggctgacacagccactgcggagtccaggctgctagaggtgctcatcctcactgccgtcctcaggtgggttcgggcttcaccgcctggccctctgtggtcacagaggggctcggtggcccaggtggtggttccgcctccaggggcagggccttgtcctgggtctgtgtcagcgggtgcaccatggacatgtgtacattgaggttgtgggccttctcaaaccgccggccacactggtcacaggcaaagtccagctcagtctcagccttgtgtttggtcatgtggtacttgagggatgcccgctgcctgcactggaacccacagacctcacacctgggggacagaggcagataagaaggtgcgagggccacagccctgggagggggtcctgactcacacttactgcaaaggcttggctcccgaatgtcgcatttggtggacgagaaggtgcttccgctgcttgaaggtttgtccacattcgtcacagatatagttccgcacctctgagaggggagagtccagtgagtccaggcccctgatgctccaacctcccggggggacgacgatgacaatgtgaaaccatcacagctgggaagacatttctgcacatggttcaccatgcagtgggcccaagcaaggggcctatgagggcctcgtttattaagatctttaaactgctttatacactgtcacgtggcttcatcagctgtgtgcatttcaggatggtttttaaagaaacctcagaaagctatttccttaa

SEQ ID NO: 133082 - DNA, 1641 bp, Homo sapiens
  Payload ID: 6009
  Gene Symbol: FANCA
  Gene Name: Fanconi anemia, complementation group A
  Uniprot ID: O15360
  ENST ID: ENST00000389302
  CDS Start-End: 43-936
cgggcgcagggagccgccgccggggctgtaggcgccaaggccatgtccgactcgtgggtcccgaactccgcctcgggccaggacccagggggccgccggagggcctgggccgagctgctggcgggaagggtcaagagggaaaaatataatcctgaaagggcacagaaattaaaggaatcagctgtgcgcctcctgcgaagccatcaggacctgaatgcccttttgcttgaggtagaaggtccactgtgtaaaaaattgtctctcagcaaagtgattgactgtgacagttctgaggcctatgctaatcattctagttcatttataggctctgctttgcaggatcaagcctcaaggctgggggttcccgtgggtattctctcagccgggatggttgcctctagcgtgggacagatctgcacggctccagcggagaccagtcaccctgtgctgctgactgtggagcagagaaagaagctgtcttccctgttagagtttgctcagtatttattggcacacagtatgttctcccgtctttccttctgtcaagaattatggaaaatacagagttctttgttgcttgaagcggtgtggcatcttcacgtacaaggcattgtgagcctgcaagagctgctggaaagccatcccgacatgcatgctgtgggatcgtggctcttcaggaatctgtgctgcctttgtgaacagatggaagcatcctgccagcatgctgacgtcgccagggccatgctttctgattttgttcaaatgtttgttttgaggggatttcagaaaaactcagatctgagaagaactgtggagcctgaaaaaatgccgcaggtcacggttgatgtactgcagagaatgctgatttttgcacttgacgctttggctgctggagtacaggaggagtcctccactcacaagatcgtgaggtgctgagcttcagcagcccgctcctgagcacacttcctctgccagttacgataacgtgcgtgaggaggaggcgaccatgggaaagcccggggaacgctctggtcagccttttcctgtgaggatgaggtcggaaggtgcgcccactgcagtatcctgttccgcctctggaagtcctgcaccaatgtttgtcccactcactgtgacctcctcctgtgtggagtctccccttgctcctccttccctgggtgtgattcaggctctagagctggccctgcctctcagccccccacatttctagaacacactgtagctgtgcctctacagactcccgctgcctggcctccacagatcctgctcagattcaccagtaggcaaagcttggccctattagctttttctctccatggctctgtggagatgtgcggagacccttacaggtcgggaggcggaagctgaggagtgggggctgggtggaaggtggacatcggggtttggtggaaatggggctctggggtttgcttccctctagtgtgggcaggggaccttgaagtgaagtcttgagaaaccagtagaatttgccactgtttccaggccttgtcaaccttttcattctttattttgctcctcatttcccatccctcacagtaactgtttaactgctcaattaaatgtgttgtaccgttcggtacttttactgaaacagtgaataaa

SEQ ID NO: 133083 - DNA, 1000 bp, Homo sapiens
  Payload ID: 6009
  Gene Symbol: FANCA
  Gene Name: Fanconi anemia, complementation group A
  ENST ID: ENST00000543736
  CDS Start-End: 43-840
cgggcgcagggagccgccgccggggctgtaggcgccaaggccatgtccgactcgtgggtcccgaactccgcctcgggccaggacccagggggccgccggagggcctgggccgagctgctggcgggaagggtcaagagggaaaaatataatcctgaaagggcacagaaattaaaggaatcagctgtgcgcctcctgcgaagccatcaggacctgaatgcccttttgcttgaggtagaaggtccactgtgtaaaaaattgtctctcagcaaagtgattgactgtgacagttctgaggcctatgctaatcattctagttcatttataggctctgctttgcaggatcaagcctcaaggctgggggttcccgtgggtattctctcagccgggatggttgcctctagcgtgggacagatctgcacggctccagcggagaccagtcaccctgtgctgctgactgtggagcagagaagttctttgttgcttgaagcggtgtggcatcttcacgtacaaggcattgtgagcctgcaagagctgctggaaagccatcccgacatgcatgctgtgggatcgtggctcttcaggaatctgtgctgcctttgtgaacagatggaagcatcctgccagcatgctgacgtcgccagggccatgctttctgattttgttcaaatgtttgttttgaggggatttcagaaaaactcagatctgagaagaactgtggagcctgaaaaaatgccgcaggtcacggttgatgtactgcagagaatgctgatttttgcacttgacgctttggctgctggagtacaggaggagtcctccactcacaagatcgtgaggtgctgagcttcagcagcccgctcctgagcacacttcctctgccagttacgataacgtgcgtgaggaggaggcgaccatgggaaagcccggggaacgctctggtcagccttttcctgtgaggatgaggtcggaaggtgcgcccactgcagtatcctgttccgcctct

SEQ ID NO: 133084 - DNA, 1088 bp, Homo sapiens
  Payload ID: 6009
  Gene Symbol: FANCA
  Gene Name: Fanconi anemia, complementation group A
  ENST ID: ENST00000534992
  CDS Start-End: 41-949
ggcgcagggagccgccgccggggctgtaggcgccaaggccatgtccgactcgtgggtcccgaactccgcctcgggccaggacccagggggccgccggagggcctgggccgagctgctggcgggaagggtcaagagggaaaaatataatcctgaaagggcacagaaattaaaggaatcagctgtgcgcctcctgcgaagccatcaggacctgaatgcccttttgcttgaggtagaaggtccactgtgtaaaaaattgtctctcagcaaagtgattgactgtgacagttctgaggcctatgctaatcattctagttcatttataggctctgctttgcaggatcaagcctcaaggctgggggttcccgtgggtattctctcagccgggatggttgcctctagcgtgggacagatctgcacggctccagcggagaccagtcaccctgtgctgctgactgtggagcagagaaagaagctgtcttccctgttagagtttgctcagtatttattggcacacagtatgttctcccgtctttccttctgtcaagaattatggaaaatacagagttctttgttgcttgaagcggtgtggcatcttcacgtacaaggcattgtgagcctgcaagagctgctggaaagccatcccgacatgcatgctgtgggatcgtggctcttcaggaatctgtgctgcctttgtgaacagatggaagcatcctgccagcatgctgacgtcgccagggccatgctttctgattttgttcaaatgtttgttttgaggggatttcagaaaaactcagatctgagaagaactgtggagcctgaaaaaatgccgcaggtcacggttgatgtactgcagagaatgctgatttttgcacttgacgctttggctgctggagtacaggaggagtcctccactcacaagatcgtgagagcttcagcagcccgctcctgagcacacttcctctgccagttacgataacgtgcgtgaggaggaggcgaccatgggaaagcccggggaacgctctggtcagccttttcctgtgaggatgaggtcggaaggtgcgcccactgcagtatcctgttccgcctct

SEQ ID NO: 133085 - DNA, 915 bp, Homo sapiens
  Payload ID: 6009
  Gene Symbol: FANCA
  Gene Name: Fanconi anemia, complementation group A
  ENST ID: ENST00000567988
  CDS Start-End: 1-328
agccagcctttcctggagacccttgcaccttccttctgcagactggcagagagctgccctctctctctggacacacagaaccttccgagaggtgttgaaagaggaagatgttcacttaacttaccaagactggttacacctggagctggaaattcaacctgaagctgatgctctttcagatactgaacggcaggacttccaccagtgggcgatccatgagcactttctccctgagtcctcggcttcagggggctgtgacggagacctgcaggctgcgtgtaccattcttgtcaacgcactgatggatttccaccaaaggagatggtagctgacctggagctgcagcaagacctcatagtgcctctcggccacaccccttcccaggagcacttcctctttgagattttccgcagacggctccaggctctgacaagcgggtggagcgtggctgccagccttcagagacagagggagctgctaatgtacaaacggatcctcctccgcctgccttcgtctgtcctctgcggcagcagcttccaggcagaacagcccatcactgccagatgcgagcagttcttccacttggtcaactctgagatgagaaacttctgctcccacggaggtgccctgacacaggacatcactgcccacttcttcaggggcctcctgaacgcctgtctgcggagcagagacccctccctgatggtcgacttcatactggccaagtgccagacgaaatgccccttaattttgacctctgctctggtgtggtggccgagcctggagcctgtgctgctctgccggtggaggagacactgccagagcccgctgccccgggaactgcagaagctacaagaaggccggcagtttgccagcgatttcctctcccctgaggctgcctccccagcacccaac

SEQ ID NO: 133086 - DNA, 732 bp, Homo sapiens
  Payload ID: 6009
  Gene Symbol: FANCA
  Gene Name: Fanconi anemia, complementation group A
  ENST ID: ENST00000564475
  CDS Start-End: 1-722
ggctctcagctgctgcactgcactttgcgattcaacaagtcagggaagaaaacatcaggaagcagctaaagaagctggactgcgagagagaggagctattggttttccttttcttcttctccttgatgggcctgctgtcgtcacatctgacctcaaatagcaccacagacctgccaaaggctttccacgtttgtgcagcaatcctcgagtgtttagagaagaggaagatatcctggctggcactctttcagttgacagagagtgacctcaggctggggcggctcctcctccgtgtggccccggatcagcacaccaggctgctgcctttcgctttttacagtcttctctcctacttccatgaagacgcggccatcagggaagaggccttcctgcatgttgctgtggacatgtacttgaagctggtccagctcttcgtggctggggatacaagcacagtttcacctccagctggcaggagcctggagctcaagggtcaggcagggcaaccccgtggaactgataacaaaagctcgtctttttctgctgcagttaatacctcggtgcccgaaaaagagcttctcacacgtggcagaggtaacgtcaagatgcccaccttgggccatgtgggggacatgagaattgacagctgcctgggccatgtgcctgcctggctggcaatacaactcgactatttctgccagagcccctcccctgtggtctgaggcctagtgg

SEQ ID NO: 133087 - DNA, 860 bp, Homo sapiens
  Payload ID: 6009
  Gene Symbol: FANCA
  Gene Name: Fanconi anemia, complementation group A
  ENST ID: ENST00000567943
  CDS Start-End: 34-510
ggagccgccgccggggctgtaggcgccaaggccatgtccgactcgtgggtcccgaactccgcctcgggccaggacccagggggccgccggagggcctgggccgagctgctgggtaggtgggcgcggcaggccgcgggagtgggcggcgtccggcccgggacggtttcgccggttccccgatcccttcccgccagagcctccgccggtcggatccccggacgccgcgcccggggggctgtgcggggtgggcgcccggctggggcggcgcggctgcctcggacccggcccctcctgcgcctgggcggacgcccccagccgccgcccgcggggcgctcccttctttcccgaacgccgcccccgccggccgccctgtcaggcgggcctggggtgcgcggcctggggctcccctcagcgcagaggccgcccctcgccagccgtccccgggctcccctgcctcgggccctcctgggccgtcttccccggcgtccgcggtggggccgtctccgttagtttcccgagacctgcgccctggggaggagccccggcccctcttcgggagggtgtcgctgcgggaagggtcaagagggaaaaatataatcctgaaagggcacagaaattaaaggaatcagctgtgcgcctcctgcgaagccatcaggacctgaatgcccttttgcttgaggtagaaggtccactgtgtaaaaaattgtctctcagcaaagtgattgactgtgacagttctgaggcctatgctaatcattctagttcatttataggctctgctttgcaggatcaagcctcaaggctgggggttcccgtgggtattctctcagccgggatggttgcctctagcgtgggacaga

SEQ ID NO: 133088 - DNA, 571 bp, Homo sapiens
  Payload ID: 6009
  Gene Symbol: FANCA
  Gene Name: Fanconi anemia, complementation group A
  ENST ID: ENST00000563513
  CDS Start-End: 7-351
aaggccatgtccgactcgtgggtcccgaactccgcctcgggccaggacccagggggccgccggagggcctgggccgagctgctggcgggaagggtcaagagggaaaaatataatcctgaaagggcacagaaattaaaggaatcagctgtgcgcctcctgcgaagccatcaggacctgaatgcccttttgcttgaggtagaaggtccactgtgtaaaaaattgtctctcagcaaagtgattgactgtgacagttctgaggcctatgctaatcattctagttcatttataggatcaagcctcaaggctgggggttcccgtgggtattctctcagccgggatggttgcctctagcgtgggacagatctgcacggctccagcggagaccagtcaccctgtgctgctgactgtggagcagagaaagaagctgtcttccctgttagagtttgctcagtatttattggcacacagtatgttctcccgtctttccttctgtcaagaattatggaaaatacagagttctttgttgcttgaagcggtgtggcatcttcacgtacaaggcattgtgagcctg

SEQ ID NO: 133089 - DNA, 461 bp, Homo sapiens
  Payload ID: 6009
  Gene Symbol: FANCA
  Gene Name: Fanconi anemia, complementation group A
  ENST ID: ENST00000567510
  CDS Start-End: 1-306
ccccacagccaagctcttcaggatgttgaaaaggccatcatggtgtttgagcatacggggaacatcccagtcaccgtcatggaggccagcatattcaggaggccttactacgtgtcccacttcctccccgccctgctcacacctcgagtgctccccaaagtccctgactcccgtgtggcgtttatagagtctctgaagagatggagtctcgctctgttgcccaggctggagtgcaattgcacaatcttggctcactgcaagctctgcctcctgggttggagcaattgtcctgcctcagcctcctgagtagctgggattatagagcagataaaatccccccatctctgtactccacctactgccaggcctgctctgctgctgaagagaagccagaagatgcagccctgggagtgagggcagaacccaactctgctgaggagcccctgggacagctcacagct

SEQ ID NO: 133090 - DNA, 727 bp, Homo sapiens
  Payload ID: 6009
  Gene Symbol: FANCA
  Gene Name: Fanconi anemia, complementation group A
  ENST ID: ENST00000568626
  CDS Start-End: 1-505
tttccgcagacggctccaggctctgacaagcgggtggagcgtggctgccagccttcagagacagagggagctgctaatgtacaaacggatcctcctccgcctgccttcgtctgtcctctgcggcagcagcttccaggcagaacagcccatcactgccagatgcgagcagttcttccacttggtcaactctgagatgagaaacttctgctcccacggaggtgccctgacacaggacatcactgcccacttcttcaggggcctcctgaacgcctgtctgcggagcagagacccctccctgatggtcgacttcatactggccaagtgccagacgaaatgccccttaattttgacctctgctctggtgtggtggccgagcctggagcctgtgctgctctgccggtggaggagacactgccagagcccgctgccccgggaactgcagaagctacaagaaggccggcagtttgccagcgactattggttttccttttcttcttctccttgatgggcctgctgtcgtcacatctgacctcaaatagcaccacagacctgccaaaggctttccacgtttgtgcagcaatcctcgagtgtttagagaagaggaagatatcctggctggcactctttcagttgacagagagtgacctcaggctggggcggctcctcctccgtgtggccccggatcagcacaccaggctgctgcctttcgctttttacagtcttctct

SEQ ID NO: 133091 - DNA, 1694 bp, Homo sapiens
  Payload ID: 6009
  Gene Symbol: FANCA
  Gene Name: Fanconi anemia, complementation group A
  ENST ID: ENST00000563673
  CDS Start-End: 21-971
gggctgtaggcgccaaggccatgtccgactcgtgggtcccgaactccgcctcgggccaggacccagggggccgccggagggcctgggccgagctgctggcgggaagggtcaagagggaaaaatataatcctgaaagggcacagaaattaaaggaatcagctgtgcgcctcctgcgaagccatcaggacctgaatgcccttttgcttgaggtagaaggtccactgtgtaaaaaattgtctctcagcaaagtgattgactgtgacagttctgaggcctatgctaatcattctagttcatttataggctctgctttgcaggatcaagcctcaaggctgggggttcccgtgggtattctctcagccgggatggttgcctctagcgtgggacagatctgcacggctccagcggagaccagtcaccctgtgctgctgactgtggagcagagaaagaagctgtcttccctgttagagtttgctcagtatttattggcacacagtatgttctcccgtctttccttctgtcaagaattatggaaaatacagagttctttgttgcttgaagcggtgtggcatcttcacgtacaaggcattgtgagcctgcaagagctgctggaaagccatcccgacatgcatgctgtgggatcgtggctcttcaggaatctgtgctgcctttgtgaacagatggaagcatcctgccagcatgctgacgtcgccagggccatgctttctgattttgttcaaatgtttgttttgaggggatttcagaaaaactcagatctgagaagaactgtggagcctgaaaaaatgccgcaggtcacggttgatgtactgcagagaatgctgatttttgcacttgacgctttggctgctggagtacaggaggagtcctccactcacaagatcgtgaggtgctggtatgttcctgagggtggcctgcctgagtgtgcagcagggaggtgtctgccaaattaaagagccaagatattttaaacacttccagagcttcagcagcccgctcctgagcacacttcctctgccagttacgataacgtgcgtgaggaggaggcgaccatgggaaagcccggggaacgctctggtcagccttttcctgtgaggatgaggtcggaaggtgcgcccactgcagtatcctgttccgcctctggaagtcctgcaccaatgtttgtcccactcactgtgacctcctcctgtgtggagtctccccttgctcctccttccctgggtgtgattcaggctctagagctggccctgcctctcagccccccacatttctagaacacactgtagctgtgcctctacagactcccgctgcctggcctccacagatcctgctcagattcaccagtaggcaaagcttggccctattagctttttctctccatggctctgtggagatgtgcggagacccttacaggtcgggaggcggaagctgaggagtgggggctgggtggaaggtggacatcggggtttggtggaaatggggctctggggtttgcttccctctagtgtgggcaggggaccttgaagtgaagtcttgagaaaccagtagaatttgccactgtttccaggccttgtcaaccttttcattctttattttgctcctcatttcccatccctcacagtaactgtttaactgctcaattaaatgtgttgtaccgttcggtacttttactgaaa

SEQ ID NO: 133092 - DNA, 460 bp, Homo sapiens
  Payload ID: 6009
  Gene Symbol: FANCA
  Gene Name: Fanconi anemia, complementation group A
  ENST ID: ENST00000564870
  CDS Start-End: 1-460
taaagaagctggactgcgagagagaggagagcaccacagacctgccaaaggctttccacgtttgtgcagcaatcctcgagtgtttagagaagaggaagatatcctggctggcactctttcagttgacagagagtgacctcaggctggggcggctcctcctccgtgtggccccggatcagcacaccaggctgctgcctttcgctttttacagtcttctctcctacttccatgaagacgcggccatcagggaagaggccttcctgcatgttgctgtggacatgtacttgaagctggtccagctcttcgtggctggggatacaagcacagtttcacctccagctggcaggagcctggagctcaagggtcagggcaaccccgtggaactgataacaaaagctcgtctttttctgctgcagttaatacctcggtgcccgaaaaagagcttctcacacgtggcaga

SEQ ID NO: 133093 - DNA, 762 bp, Homo sapiens
  Payload ID: 6009
  Gene Symbol: FANCA
  Gene Name: Fanconi anemia, complementation group A
  ENST ID: ENST00000561660
  CDS Start-End: 1-548
tgttctcagaggcccgacagcctctttctgaggaggacgtagccagcctttcctggagacccttgcaccttccttctgcagactggcagagagctgccctctctctctggacacacagaaccttccgagaggtgttgaaagaggaagatgttcacttaacttaccaagactggttacacctggagctggaaattcaacctgaagctgatgctctttcagatactgaacggcaggacttccaccagtgggcgatccatgagcactttctccctgagtcctcggcttcagggggctgtgacggagacctgcaggctgcgtgtaccattcttgtcaacgcactgatggatttccaccaaagctcaaggagttatgaccactcagaaaattctgatttggtctttggtggccgcacaggaaatgaggatattatttccagattgcaggatcctcctccgcctgccttcgtctgtcctctgcggcagcagcttccaggcagaacagcccatcactgccagatgcgagcagttcttccacttggtcaactctgagatgagaaacttctgctcccacggaggtgccctgacacaggacatcactgcccacttcttcaggggcctcctgaacgcctgtctgcggagcagagacccctccctgatggtcgacttcatactggccaagtgccagacgaaatgccccttaattttgacctctgctctggtgtggtggccgagcctggagcctgtgctgctctgccggtggagg

SEQ ID NO: 133094 - DNA, 696 bp, Homo sapiens
  Payload ID: 6009
  Gene Symbol: FANCA
  Gene Name: Fanconi anemia, complementation group A
  ENST ID: ENST00000561722
  CDS Start-End: 1-588
gctttccacgtttgtgcagcaatcctcgagtgtttagagaagaggaagatatcctggctggcactctttcagttgacagagagtgacctcaggctggggcggctcctcctccgtgtggccccggatcagcacaccaggctgctgcctttcgctttttacagtcttctctcctacttccatgaagacgcggccatcagggaagaggccttcctgcatgttgctgtggacatgtacttgaagctggtccagctcttcgtggctggggatacaagcacagtttcacctccagctggcaggagcctggagctcaagggtcaggcaggtgcaagggccagtcccacctccaggggagctccccccagccggaggctccttctgccaaagaatgttccggcacagcatgcagactatgggggacacaccagccctgtttctttaatacctcggtgcccgaaaaagagcttctcacacgtggcagagctgctggctgatcgtggggactgcgacccagaggtgagcgccgccctccagagcagacagcaggctgcccctgacgctgacctgtcccaggagcctcatctcttctgacgggacctgccactgcacaccagcccagctcccgtgtaaataatttattacaagcataacatggagctcttgttgcactaaaaagtggattacaaatctcctcgactg

SEQ ID NO: 133095 - DNA, 812 bp, Homo sapiens
  Payload ID: 6009
  Gene Symbol: FANCA
  Gene Name: Fanconi anemia, complementation group A
  ENST ID: ENST00000565582
  CDS Start-End: 1-633
gtcaagagggaaaaatataatcctgaaagggcacagaaattaaaggaatcagctgtgcgcctcctgcgaagccatcaggacctgaatgcccttttgcttgaggtagaaggtccactgtgtaaaaaattgtctctcagcaaagtgattgactgtgacagttctgaggcctatgctaatcattctagttcatttataggctctgctttgcaggatcaagcctcaaggctgggggttcccgtgggtattctctcagccgggatggttgcctctagcgtgggacagatctgcacggctccagcggagaccagtcaccctgtgctgctgactgtggagcagagaaagaagctgtcttccctgttagagtttgctcagtatttattggcacacagtatgttctcccgtctttccttctgtcaagaattatggaaaatacagagttctttgttgcttgaagcggtgtggcatcttcacgtacaaggcattgtgagcctgcaagagctgctggaaagccatcccgacatgcatgctgtgggatcgtggctcttcaggaatctgtgctgcctttgtgaacagatggaagcatcctgccagcatgctgacgtcgccagggccatgctttctggtcacggttgatgtactgcagagaatgctgatttttgcacttgacgctttggctgctggagtacaggaggagtcctccactcacaagatcgtgaggtgctgagcttcagcagcccgctcctgagcacacttcctctgccagttacgataacgtgcgtgaggaggaggcgaccatgggaaagcccggggaa

SEQ ID NO: 133096 - DNA, 618 bp, Homo sapiens
  Payload ID: 6009
  Gene Symbol: FANCA
  Gene Name: Fanconi anemia, complementation group A
  ENST ID: ENST00000567621
  CDS Start-End: 1-377
gttctttgttgcttgaagcggtgtggcatcttcacgtacaaggcattgtgagcctgcaagagctgctggaaagccatcccgacatgcatgctgtgggatcgtggctcttcaggaatctgtgctgcctttgtgaacagatggaagcatcctgccagcatgctgacgtcgccagggccatgctttctgattttgttcaaatgtttgttttgaggggatttcagaaaaactcagatctgagaagaactgtggagcctgaaaaaatgccgcaggtcacggttgatgtactgcagagaatgctgatttttgcacttgacgctttggctgctggagtacaggaggagtcctccactcacaagatcgtgaggtgctgcatctgatgctgttcagatgcagagagagtggagctttgcgcggacacaccctctgctcacctcactgtaccgcaggctctttgtgatgctgagtgcagaggagttggttggccatttgcaagaagttctggaaacgcaggaggttcactggcagagagtgctctcctttgtgtctgccctggttgtctgctttccagaagcgcagcagctgcttgaagactgggtggcgcgtttgatggcccaggca

SEQ ID NO: 133097 - DNA, 4601 bp, Homo sapiens
  Payload ID: 6009
  Gene Symbol: FANCA
  Gene Name: Fanconi anemia, complementation group A
  Uniprot ID: O15360
  ENST ID: ENST00000568369
  CDS Start-End: 32-4306
agccgccgccggggctgtaggcgccaaggccatgtccgactcgtgggtcccgaactccgcctcgggccaggacccagggggccgccggagggcctgggccgagctgctggcgggaagggtcaagagggaaaaatataatcctgaaagggcacagaaattaaaggaatcagctgtgcgcctcctgcgaagccatcaggacctgaatgcccttttgcttgaggtagaaggtccactgtgtaaaaaattgtctctcagcaaagtgattgactgtgacagttctgaggcctatgctaatcattctagttcatttataggctctgctttgcaggatcaagcctcaaggctgggggttcccgtgggtattctctcagccgggatggttgcctctagcgtgggacagatctgcacggctccagcggagaccagtcaccctgtgctgctgactgtggagcagagaaagaagctgtcttccctgttagagtttgctcagtatttattggcacacagtatgttctcccgtctttccttctgtcaagaattatggaaaatacagagttctttgttgcttgaagcggtgtggcatcttcacgtacaaggcattgtgagcctgcaagagctgctggaaagccatcccgacatgcatgctgtgggatcgtggctcttcaggaatctgtgctgcctttgtgaacagatggaagcatcctgccagcatgctgacgtcgccagggccatgctttctgattttgttcaaatgtttgttttgaggggatttcagaaaaactcagatctgagaagaactgtggagcctgaaaaaatgccgcaggtcacggttgatgtactgcagagaatgctgatttttgcacttgacgctttggctgctggagtacaggaggagtcctccactcacaagatcgtgaggtgctggttcggagtgttcagtggacacacgcttggcagtgtaatttccacagatcctctgaagaggttcttcagtcataccctgactcagatactcactcacagccctgtgctgaaagcatctgatgctgttcagatgcagagagagtggagctttgcgcggacacaccctctgctcacctcactgtaccgcaggctctttgtgatgctgagtgcagaggagttggttggccatttgcaagaagttctggaaacgcaggaggttcactggcagagagtgctctcctttgtgtctgccctggttgtctgctttccagaagcgcagcagctgcttgaagactgggtggcgcgtttgatggcccaggcattcgagagctgccagctggacagcatggtcactgcgttcctggttgtgcgccaggcagcactggagggcccctctgcgttcctgtcatatgcagactggttcaaggcctcctttgggagcacacgaggctaccatggctgcagcaagaaggccctggtcttcctgtttacgttcttgtcagaactcgtgccttttgagtctccccggtacctgcaggtgcacattctccacccacccctggttcccggcaagtaccgctccctcctcacagactacatctcattggccaagacacggctggccgacctcaaggtttctatagaaaacatgggactctacgaggatttgtcatcagctggggacattactgagccccacagccaagctcttcaggatgttgaaaaggccatcatggtgtttgagcatacggggaacatcccagtcaccgtcatggaggccagcatattcaggaggccttactacgtgtcccacttcctccccgccctgctcacacctcgagtgctccccaaagtccctgactcccgtgtggcgtttatagagtctctgaagagagcagataaaatccccccatctctgtactccacctactgccaggcctgctctgctgctgaagagaagccagaagatgcagccctgggagtgagggcagaacccaactctgctgaggagcccctgggacagctcacagctgcactgggagagctgagagcctccatgacagaccccagccagcgtgatgttatatcggcacaggtggcagtgatttctgaaagactgagggctgtcctgggccacaatgaggatgacagcagcgttgagatatcaaagattcagctcagcatcaacacgccgagactggagccacgggaacacatggctgtggacctcctgctgacgtctttctgtcagaacctgatggctgcctccagtgtcgctcccccggagaggcagggtccctgggctgccctcttcgtgaggaccatgtgtggacgtgtgctccctgcagtgctcacccggctctgccagctgctccgtcaccagggcccgagcctgagtgccccacatgtgctggggttggctgccctggccgtgcacctgggtgagtccaggtctgcgctcccagaggtggatgtgggtcctcctgcacctggtgctggccttcctgtccctgcgctctttgacagcctcctgacctgtaggacgagggattccttgttcttctgcctgaaattttgtacagcagcaatttcttactctctctgcaagttttcttcccagtcacgagatactttgtgcagctgcttatctccaggccttattaaaaagtttcagttcctcatgttcagattgttctcagaggcccgacagcctctttctgaggaggacgtagccagcctttcctggagacccttgcaccttccttctgcagactggcagagagctgccctctctctctggacacacagaaccttccgagaggtgttgaaagaggaagatgttcacttaacttaccaagactggttacacctggagctggaaattcaacctgaagctgatgctctttcagatactgaacggcaggacttccaccagtgggcgatccatgagcactttctccctgagtcctcggcttcagggggctgtgacggagacctgcaggctgcgtgtaccattcttgtcaacgcactgatggatttccaccaaagctcaaggagttatgaccactcagaaaattctgatttggtctttggtggccgcacaggaaatgaggatattatttccagattgcaggagatggtagctgacctggagctgcagcaagacctcatagtgcctctcggccacaccccttcccaggagcacttcctctttgagattttccgcagacggctccaggctctgacaagcgggtggagcgtggctgccagccttcagagacagagggagctgctaatgtacaaacggatcctcctccgcctgccttcgtctgtcctctgcggcagcagcttccaggcagaacagcccatcactgccagatgcgagcagttcttccacttggtcaactctgagatgagaaacttctgctcccacggaggtgccctgacacaggacatcactgcccacttcttcaggggcctcctgaacgcctgtctgcggagcagagacccctccctgatggtcgacttcatactggccaagtgccagacgaaatgccccttaattttgacctctgctctggtgtggtggccgagcctggagcctgtgctgctctgccggtggaggagacactgccagagcccgctgccccgggaactgcagaagctacaagaaggccggcagtttgccagcgatttcctctcccctgaggctgcctccccagcacccaacccggactggctctcagctgctgcactgcactttgcgattcaacaagtcagggaagaaaacatcaggaagcagctaaagaagctggactgcgagagagaggagctattggttttccttttcttcttctccttgatgggcctgctgtcgtcacatctgacctcaaatagcaccacagacctgccaaaggctttccacgtttgtgcagcaatcctcgagtgtttagagaagaggaagatatcctggctggcactctttcagttgacagagagtgacctcaggctggggcggctcctcctccgtgtggccccggatcagcacaccaggctgctgcctttcgctttttacagtcttctctcctacttccatgaagacgcggccatcagggaagaggccttcctgcatgttgctgtggacatgtacttgaagctggtccagctcttcgtggctggggatacaagcacagtttcacctccagctggcaggagcctggagctcaagggtcaggcagggcaaccccgtggaactgataacaaaagctcgtctttttctgctgcagttaatacctcggtgcccgaaaaagagcttctcacacgtggcagagctgctggctgatcgtggggactgcgacccagaggtgagcgccgccctccagagcagacagcaggctgcccctgacgctgacctgtcccaggagcctcatctcttctgacgggacctgccactgcacaccagcccagctcccgtgtaaataatttattacaagcataacatggagctcttgttgcactaaaaagtggattacaaatctcctcgactgctttagtggggaaaggaatcaattatttatgaactgtccggccccgagtcactcagcgtttgcgggaaaataaaccactggtcccagagc

SEQ ID NO: 133098 - DNA, 633 bp, Homo sapiens
  Payload ID: 6009
  Gene Symbol: FANCA
  Gene Name: Fanconi anemia, complementation group A
  ENST ID: ENST00000563510
  CDS Start-End: 1-154
cctctctctctggacacacagaaccttccgagaggtgttgaaagaggaagatgttcacgtaggtgaccgttccttctcctgcatcatgccacgtcctgagtctagggtttgtgtgtgctcctcgggcaagaacagcagcacctggtcatggtgatgtgcacctgcagtcccagccatctgagaggctgagggggagaattctggagttcaggaggcagagtctgcagcgagctacgattgcaccactgcacacactccagcctgggcaacagaacctgtttccaaaaataaatgaagttaacttaccaagactggttacacctggagctggaaattcaacctgaagctgatgctctttcagatactgaacgctcaaggagttatgaccactcagaaaattctgatttggtctttggtggccgcacaggaaatgaggatattatttccagattgcaggagatggtagctgacctggagctgcagcaagacctcatagtgcctctcggccacaccccttcccaggagcacttcctctttgagattttccgcagacggctccaggctctgacaagcgggtggagcgtggctgccagccttcagagacagagggagctgctaatgtacaaacggatc

SEQ ID NO: 133099 - DNA, 713 bp, Homo sapiens
  Payload ID: 6009
  Gene Symbol: FANCA
  Gene Name: Fanconi anemia, complementation group A
  ENST ID: ENST00000567879
  CDS Start-End: 1-645
ccgagcctggagcctgtgctgctctgccggtggaggagacactgccagagcccgctgccccgggaactgcagaagctacaagaaggccggcagtttgccagcgatttcctctcccctgaggctgcctccccagcacccaacccggactggctctcagctgctgcactgcactttgcgattcaacaagtcagggaagaaaacatcaggaagcagctaaagaagctggactgcgagagagaggagctattggttttccttttcttcttctccttgatgggcctgctgtcgtcacatctgacctcaaatagcaccacagacctgccaaaggctttccacgtttgtgcagcaatcctcgagtgtttagagaagaggaagatatcctggctggcactctttcagttgacagagagtgacgcggccatcagggaagaggccttcctgcatgttgctgtggacatgtacttgaagctggtccagctcttcgtggctggggatacaagcacagtttcacctccagctggcaggagcctggagctcaaggggcaaccccgtggaactgataacaaaagctcgtctttttctgctgcagttaatacctcggtgcccgaaaaagagcttctcacacgtggcagagctgctggctgatcgtggggactgcgacccagaggtgagcgccgccctccagagcagacagcaggctgcccctgacgctg

SEQ ID NO: 133100 - DNA, 413 bp, Homo sapiens
  Payload ID: 6009
  Gene Symbol: FANCA
  Gene Name: Fanconi anemia, complementation group A
  ENST ID: ENST00000567205
  CDS Start-End: 1-192
ggcccgagcctgagtgccccacatgtgctggggttggctgccctggccgtgcacctgggtgagtccaggtctgcgctcccagaggtggatgtgggtcctcctgcacctggtgctggccttcctgtccctgcgctctttgacagcctcctgacctgtaggacgagggattccttgttcttctgcctgaagtgagctcttcttccacagtcgcgtcttctctcctctctctcgaaaagtgacacatgctcgtttgataaaattagaagagacagacatgcagacataccacccaaagataaccactttttagcattttgattttgtacagcagcaatttcttactctctctgcaagttttcttcccagtcacgagatactttgtgcagctgcttatctccaggccttattaaaaa

SEQ ID NO: 133101 - DNA, 395 bp, Homo sapiens
  Payload ID: 6009
  Gene Symbol: FANCA
  Gene Name: Fanconi anemia, complementation group A
  ENST ID: ENST00000566409
  CDS Start-End: 1-125
ttgcacttgacgctttggctgctggagtacaggaggagtcctccactcacaagatcgtgaggtgctggtatgttcctgagggtggcctgcctgagtgtgcagcagggaggtgtctgccaaattaaagagccaagatattttaaacacttccagagcttcagcagcccgctcctgagcacacttcctctgccagttacgataacgtgcgtgaggaggaggcgaccatgggaaagcccggggaacgctctggtcagccttttcctgtgaggatgaggtcggaaggttcggagtgttcagtggacacacgcttggcagtgtaatttccacagatcctctgaagaggttcttcagtcataccctgactcagatactcactcacagccctgtgctgaaag

SEQ ID NO: 133102 - DNA, 605 bp, Homo sapiens
  Payload ID: 6009
  Gene Symbol: FANCA
  Gene Name: Fanconi anemia, complementation group A
  ENST ID: ENST00000563318
  CDS Start-End: 1-232
taaaaagtttcagttcctcatgttcagattgttctcagaggcccgacagcctctttctgaggaggacgtagccagcctttcctggagacccttgcaccttccttctgcagactggcagagagctgccctctctctctggacacacagaaccttccgagaggtgttgaaagaggaagatgttcacctggtcatggtgatgtgcacctgcagtcccagccatctgagaggctgagggggagaattctggagttcaggaggcagagtctgcagcgagctacgattgcaccactgcacacactccagcctgggcaacagaacctgtttccaaaaataaatgaagttaacttaccaagactggttacacctggagctggaaattcaacctgaagctgatgctctttcagatactgaacggcaggacttccaccagtgggcgatccatgagcactttctccctgagtcctcggcttcagggggctgtgacggagacctgcaggctgcgtgtaccattcttgtcaacgcactgatggatttccaccaaagctcaaggagttatgaccactcagaaaattctgatttggtctttggtggccgcacaggaaatg

SEQ ID NO: 133103 - DNA, 2894 bp, Homo sapiens
  Payload ID: 6010
  Gene Symbol: FANCB
  Gene Name: Fanconi anemia, complementation group B
  Uniprot ID: Q8NB91
  ENST ID: ENST00000324138
  CDS Start-End: 155-2734
aggatgcagcgcgctggcgggaggtttggagcagatggataccgtatcgacgtggggcctccggtatgttgccgctgcgttgaggtttagaaacatcaactggaatcaatttgcatttgaaaattagatcagcacaaagacttgatattgtggaatgactagcaaacaagcaatgtcatctaacgaacaagaaaggctcttgtgttataatggggaagtccttgttttccagttgtctaaaggaaattttgcagataaagagcctacaaaaacacccatattacatgtcagaagaatggtatttgacagaggaacaaaagtatttgttcagaagtccactggattttttaccataaaggaagaaaactctcatttaaaaatcatgtgttgcaactgtgtgtcagatttcagaactggaattaacctcccttacattgtgatagaaaaaaataaaaagaataatgtttttgaatattttttactaatccttcacagtactaataaatttgaaatgcgtttgagttttaaactaggctatgagatgaaggatggcctaagggtccttaatggccctttaattttatggaggcatgtcaaagcattcttctttatctcttctcaaactggcaaagttgttagtgtgtcaggtaacttttcctctattcagtgggcaggggagattgaaaatttaggtatggttttattgggactaaaggaatgttgtttatctgaggaagaatgtactcaagagccttcaaaatcagattatgcaatttggaataccaaattttgtgtatattctcttgaaagtcaagaagtattaagtgatatatacattattcctcctgcttacagcagtgtggtgacttatgtacatatttgtgcaactgagatcatcaaaaaccagttaagaatatctctcattgcccttactcgaaagaatcagctgatttcatttcagaatggaactcctaaaaatgtgtgccagcttccatttggagatccttgtgcagttcaacttatggattcaggtggaggaaacctctttttcgttgtatcctttatatccaataatgcttgtgctgtatggaaagagagctttcaggttgctgctaaatgggaaaaacttagcttagtactgatagatgactttattggaagtggaactgaacaagtactcctactttttaaggactccttgaactcagactgcctgacttcatttaaaataacggatcttggaaaaataaactattcgagtgaaccatcagattgcaatgaagatgacttatttgaagacaaacaagagaatcgttacctggtggttccacctctagaaacaggactgaaagtttgtttttcttcttttcgggaattacggcagcatctgttgcttaaggaaaaaattatttcaaaatcttacaaagctttaataaacctagttcaaggaaaagatgataatacgtcaagtgcagaggagaaggaatgtcttgttcctctttgtggtgaagaagaaaattctgtccatatcttagatgaaaagttatcagacaattttcaagattcagaacagctagtagagaagatatggtatcgtgtaatagatgatagcttggttgttggagtgaaaactacatcttctttgaagctgtccctgaatgatgtgactttatcattgttaatggatcaagcccatgactccagatttcggcttctaaagtgtcaaaatagggtgattaagttgagtacaaatcctttcccagcaccatacttgatgccatgtgaaataggattggaagcaaaaagggtcacgttgacccctgatagcaagaaagaggaaagctttgtttgtgaacacccatctaagaaagagtgtgtacagataattactgctgtaacatctctttcaccacttttaacattcagtaaattttgttgcactgtactgctacaaattatggagagagaaagtggtaactgtcctaaagatcgttatgttgtgtgtggcagagtttttttaagtctagaagatctttcaactgggaagtacctactgacatttccaaagaagaaacctatagagcacatggaagatctttttgcacttcttgcagcattccataaatcttgttttcaaatcacatcacccggctatgccctgaattcaatgaaggtgtggctcttagaacatatgaaatgtgaaataatcaaagaatttccagaagtgtacttttgtgaaagaccgggaagtttctatgggacactcttcacttggaaacagagaacaccattcgaagggattttaataatctattccaggaatcaaacagttatgttccagtgccttcataatctcatcagaattctccctataaactgtttcctcaaaaatctaaaatcaggaagtgagaatttcctaattgataatatggcatttactttggagaaggaactagtcacccttagttctctttcttctgccatagctaaacatgaaagcaattttatgcagaggtgtgaagtgagcaaaggaaagagtagtgtcgtcgcggctgctttatcagacagaagggaaaatatccatccctacagaaaagaacttcagagagaaaagaagaaaatgttgcaaacgaacctaaaagtgagtggtgccctttacagagaaataactttgaaagtagctgaggttcagttgaaatcagactttgctgcacagaaactgagtaatttataattataatttcaatttgatcatattttaaaatatgttttcaccaccatataagattttggttctacttgctatatgcctcctttgtaaaaataaacaccgaggcttactgtagtagaaactttagttttgatgatgcacaaaataaacagcagtggttctc

SEQ ID NO: 133104 - DNA, 3008 bp, Homo sapiens
  Payload ID: 6010
  Gene Symbol: FANCB
  Gene Name: Fanconi anemia, complementation group B
  Uniprot ID: Q8NB91
  ENST ID: ENST00000398334
  CDS Start-End: 269-2848
agcgcgctggcgggaggtttggagcagatggataccgtatcgacgtggggcctccggtatgttgccgctgcgttgagtttcataagtacaagccagacctttgatttacctaccctatcttctttactgatgaagctgaaactactttgtgatgcctattgtcccagatctttctgttaattgcctaacaacaaaccagtttagaaacatcaactggaatcaatttgcatttgaaaattagatcagcacaaagacttgatattgtggaatgactagcaaacaagcaatgtcatctaacgaacaagaaaggctcttgtgttataatggggaagtccttgttttccagttgtctaaaggaaattttgcagataaagagcctacaaaaacacccatattacatgtcagaagaatggtatttgacagaggaacaaaagtatttgttcagaagtccactggattttttaccataaaggaagaaaactctcatttaaaaatcatgtgttgcaactgtgtgtcagatttcagaactggaattaacctcccttacattgtgatagaaaaaaataaaaagaataatgtttttgaatattttttactaatccttcacagtactaataaatttgaaatgcgtttgagttttaaactaggctatgagatgaaggatggcctaagggtccttaatggccctttaattttatggaggcatgtcaaagcattcttctttatctcttctcaaactggcaaagttgttagtgtgtcaggtaacttttcctctattcagtgggcaggggagattgaaaatttaggtatggttttattgggactaaaggaatgttgtttatctgaggaagaatgtactcaagagccttcaaaatcagattatgcaatttggaataccaaattttgtgtatattctcttgaaagtcaagaagtattaagtgatatatacattattcctcctgcttacagcagtgtggtgacttatgtacatatttgtgcaactgagatcatcaaaaaccagttaagaatatctctcattgcccttactcgaaagaatcagctgatttcatttcagaatggaactcctaaaaatgtgtgccagcttccatttggagatccttgtgcagttcaacttatggattcaggtggaggaaacctctttttcgttgtatcctttatatccaataatgcttgtgctgtatggaaagagagctttcaggttgctgctaaatgggaaaaacttagcttagtactgatagatgactttattggaagtggaactgaacaagtactcctactttttaaggactccttgaactcagactgcctgacttcatttaaaataacggatcttggaaaaataaactattcgagtgaaccatcagattgcaatgaagatgacttatttgaagacaaacaagagaatcgttacctggtggttccacctctagaaacaggactgaaagtttgtttttcttcttttcgggaattacggcagcatctgttgcttaaggaaaaaattatttcaaaatcttacaaagctttaataaacctagttcaaggaaaagatgataatacgtcaagtgcagaggagaaggaatgtcttgttcctctttgtggtgaagaagaaaattctgtccatatcttagatgaaaagttatcagacaattttcaagattcagaacagctagtagagaagatatggtatcgtgtaatagatgatagcttggttgttggagtgaaaactacatcttctttgaagctgtccctgaatgatgtgactttatcattgttaatggatcaagcccatgactccagatttcggcttctaaagtgtcaaaatagggtgattaagttgagtacaaatcctttcccagcaccatacttgatgccatgtgaaataggattggaagcaaaaagggtcacgttgacccctgatagcaagaaagaggaaagctttgtttgtgaacacccatctaagaaagagtgtgtacagataattactgctgtaacatctctttcaccacttttaacattcagtaaattttgttgcactgtactgctacaaattatggagagagaaagtggtaactgtcctaaagatcgttatgttgtgtgtggcagagtttttttaagtctagaagatctttcaactgggaagtacctactgacatttccaaagaagaaacctatagagcacatggaagatctttttgcacttcttgcagcattccataaatcttgttttcaaatcacatcacccggctatgccctgaattcaatgaaggtgtggctcttagaacatatgaaatgtgaaataatcaaagaatttccagaagtgtacttttgtgaaagaccgggaagtttctatgggacactcttcacttggaaacagagaacaccattcgaagggattttaataatctattccaggaatcaaacagttatgttccagtgccttcataatctcatcagaattctccctataaactgtttcctcaaaaatctaaaatcaggaagtgagaatttcctaattgataatatggcatttactttggagaaggaactagtcacccttagttctctttcttctgccatagctaaacatgaaagcaattttatgcagaggtgtgaagtgagcaaaggaaagagtagtgtcgtcgcggctgctttatcagacagaagggaaaatatccatccctacagaaaagaacttcagagagaaaagaagaaaatgttgcaaacgaacctaaaagtgagtggtgccctttacagagaaataactttgaaagtagctgaggttcagttgaaatcagactttgctgcacagaaactgagtaatttataattataatttcaatttgatcatattttaaaatatgttttcaccaccatataagattttggttctacttgctatatgcctcctttgtaaaaataaacaccgaggcttactgtagtagaaactttagttttgatgatgcacaaaataaacagcagtggttctc

SEQ ID NO: 133105 - DNA, 2712 bp, Homo sapiens
  Payload ID: 6010
  Gene Symbol: FANCB
  Gene Name: Fanconi anemia, complementation group B
  ENST ID: ENST00000452869
  CDS Start-End: 259-2712
cgggaggtttggagcagatggataccgtatcgacgtggggcctccggtatgttgccgctgcgttgagtttcataagtacaagccagacctttgatttacctaccctatcttctttactgatgaagctgaaactactttgtgatgcctattgtcccagatctttctgttaattgcctaacaacaaaccagtttagaaacatcaactggaatcaatttgcatttgaaaattagatcagcacaaagacttgatattgtggaatgactagcaaacaagcaatgtcatctaacgaacaagaaaggctcttgtgttataatggggaagtccttgttttccagttgtctaaaggaaattttgcagataaagagcctacaaaaacacccatattacatgtcagaagaatggtatttgacagaggaacaaaagtatttgttcagaagtccactggattttttaccataaaggaagaaaactctcatttaaaaatcatgtgttgcaactgtgtgtcagatttcagaactggaattaacctcccttacattgtgatagaaaaaaataaaaagaataatgtttttgaatattttttactaatccttcacagtactaataaatttgaaatgcgtttgagttttaaactaggctatgagatgaaggatggcctaagggtccttaatggccctttaattttatggaggcatgtcaaagcattcttctttatctcttctcaaactggcaaagttgttagtgtgtcaggtaacttttcctctattcagtgggcaggggagattgaaaatttaggtatggttttattgggactaaaggaatgttgtttatctgaggaagaatgtactcaagagccttcaaaatcagattatgcaatttggaataccaaattttgtgtatattctcttgaaagtcaagaagtattaagtgatatatacattattcctcctgcttacagcagtgtggtgacttatgtacatatttgtgcaactgagatcatcaaaaaccagttaagaatatctctcattgcccttactcgaaagaatcagctgatttcatttcagaatggaactcctaaaaatgtgtgccagcttccatttggagatccttgtgcagttcaacttatggattcaggtggaggaaacctctttttcgttgtatcctttatatccaataatgcttgtgctgtatggaaagagagctttcaggttgctgctaaatgggaaaaacttagcttagtactgatagatgactttattggaagtggaactgaacaagtactcctactttttaaggactccttgaactcagactgcctgacttcatttaaaataacggatcttggaaaaataaactattcgagtgaaccatcagattgcaatgaagatgacttatttgaagacaaacaagagaatcgttacctggtggttccacctctagaaacaggactgaaagtttgtttttcttcttttcgggaattacggcagcatctgttgcttaaggaaaaaattatttcaaaatcttacaaagctttaataaacctagttcaaggaaaagatgataatacgtcaagtgcagaggagaaggaatgtcttgttcctctttgtggtgaagaagaaaattctgtccatatcttagatgaaaagttatcagacaattttcaagattcagaacagctagtagagaagatatggtatcgtgtaatagatgatagcttggttgttggagtgaaaactacatcttctttgaagctgtccctgaatgatgtgactttatcattgttaatggatcaagcccatgactccagatttcggcttctaaagtgtcaaaatagggtgattaagttgagtacaaatcctttcccagcaccatacttgatgccatgtgaaataggattggaagcaaaaagggtcacgttgacccctgatagcaagaaagaggaaagctttgtttgtgaacacccatctaagaaagagtgtgtacagataattactgctgtaacatctctttcaccacttttaacattcagtaaattttgttgcactgtactgctacaaattatggagagagaaagtggtaactgtcctaaagatcgttatgttgtgtgtggcagagtttttttaagtctagaagatctttcaactgggaagtacctactgacatttccaaagaagaaacctatagagcacatggaagatctttttgcacttcttgcagcattccataaatcttgttttcaaatcacatcacccggctatgccctgaattcaatgaaggtgtggctcttagaacatatgaaatgtgaaataatcaaagaatttccagaagtgtacttttgtgaaagaccgggaagtttctatgggacactcttcacttggaaacagagaacaccattcgaagggattttaataatctattccaggaatcaaacagttatgttccagtgccttcataatctcatcagaattctccctataaactgtttcctcaaaaatctaaaatcaggaagtgagaatttcctaattgataatatggcatttactttggagaaggaactagtcacccttagttctctttcttctgccatagctaaacatgaaagcaattttatgcagaggtgtgaagtgagcaaaggaaagagtagtgtcgtcgcggctgctttatcagacagaagggaaaatatccatccctacagaaaagaacttcagaga

SEQ ID NO: 133106 - DNA, 4585 bp, Homo sapiens
  Payload ID: 6011
  Gene Symbol: FANCC
  Gene Name: Fanconi anemia, complementation group C
  Uniprot ID: Q00597
  ENST ID: ENST00000289081
  CDS Start-End: 256-1932
actgctgacacgtgtgcgcgcgcgcggctccactgccgggcgaccgcgggaaaattccaaaaaaactcaaaaagccaatacgaggcaaagccaaattttcaagccacagatcccgggcggtggcttcctttccgccactgcccaaactgctgaagcagctcccgcgaggaccacccgatttaatgtgtgccgaccatttccttcagtgctggacaggctgctgtgaagggacatcaccttttcgctttttccaagatggctcaagattcagtagatctttcttgtgattatcagttttggatgcagaagctttctgtatgggatcaggcttccactttggaaacccagcaagacacctgtcttcacgtggctcagttccaggagttcctaaggaagatgtatgaagccttgaaagagatggattctaatacagtcattgaaagattccccacaattggtcaactgttggcaaaagcttgttggaatccttttattttagcatatgatgaaagccaaaaaattctaatatggtgcttatgttgtctaattaacaaagaaccacagaattctggacaatcaaaacttaactcctggatacagggtgtattatctcatatactttcagcactcagatttgataaagaagttgctcttttcactcaaggtcttgggtatgcacctatagattactatcctggtttgcttaaaaatatggttttatcattagcgtctgaactcagagagaatcatcttaatggatttaacactcaaaggcgaatggctcccgagcgagtggcgtccctgtcacgagtttgtgtcccacttattaccctgacagatgttgaccccctggtggaggctctcctcatctgtcatggacgtgaacctcaggaaatcctccagccagagttctttgaggctgtaaacgaggccattttgctgaagaagatttctctccccatgtcagctgtagtctgcctctggcttcggcaccttcccagccttgaaaaagcaatgctgcatctttttgaaaagctaatctccagtgagagaaattgtctgagaaggatcgaatgctttataaaagattcatcgctgcctcaagcagcctgccaccctgccatattccgggttgttgatgagatgttcaggtgtgcactcctggaaaccgatggggccctggaaatcatagccactattcaggtgtttacgcagtgctttgtagaagctctggagaaagcaagcaagcagctgcggtttgcactcaagacctactttccttacacttctccatctcttgccatggtgctgctgcaagaccctcaagatatccctcggggacactggctccagacactgaagcatatttctgaactgctcagagaagcagttgaagaccagactcatgggtcctgcggaggtccctttgagagctggttcctgttcattcacttcggaggatgggctgagatggtggcagagcaattactgatgtcggcagccgaaccccccacggccctgctgtggctcttggccttctactacggcccccgtgatgggaggcagcagagagcacagactatggtccaggtgaaggccgtgctgggccacctcctggcaatgtccagaagcagcagcctctcagcccaggacctgcagacggtagcaggacagggcacagacacagacctcagagctcctgcacaacagctgatcaggcaccttctcctcaacttcctgctctgggctcctggaggccacacgatcgcctgggatgtcatcaccctgatggctcacactgctgagataactcacgagatcattggctttcttgaccagaccttgtacagatggaatcgtcttggcattgaaagccctagatcagaaaaactggcccgagagctccttaaagagctgcgaactcaagtctagaaggcacgcaggccgtgtgggtgcccggcgtgagggatcaggctcgccagggccacaggacaggtgatgacctgtggccacgcatttgtggagtaagtgccctcgctgggctgtgagaatgagctgtacacatcttgggacaatctgctagtatctattttacaaaatgcagagccaggtccctcagcccagactcagtcagacatgttcactaatgactcaagtgagccttcggtactcctggtgcccgcccggccagaccgtcagcttgataattactaaagcaaaggcctgggtgggagaacaggtttctagtttttacccaagtcaagctgcacatctattatttaaaaattcaaagtcttagaaccaagaatttggtcatgaaccattaaagaatttagagagaacttagctctttttagactctttttaggagtcagggatctgggataaagccacactgtcttgctgtatggagaaattcttcaaggggagtcagggtccctcaggcttcccttgtgtctccctggacctgcctgacaggccacaggagcagacagcacacccaagcccgggcctccggcacactctttccactctgtatttgctaaatgatgctaactgctaccaaaaggcccttgggacatcagaggagccggcaggcgaaggtagaggatgtgttccagaaacattagaaggcaggattaattcagttagttagttctcttgttaaatggaaatgggaattggaaattcctgataaagaattggcctggctgggtgcagtggctcacacctgtgatcccagcactttgggaggccaaggcagggggattacttcagcccaggagttccagactgcctggctaacatggcaataccctatctctactaaaaatacaaaaattatcggggtgcaatggcatgcatctgtaatcccagctattcaagaggctgaggcatgaggatctcttgaacccgggaggtgggagttgtagtgagccgagatcatgacactgcactccagcctgggcaacagagcgagaccatctcttaaaaaaaggcattgttagtgtaatctcaaggttaacatttatttcatgtcagtacagggtgctttttcctttcagggacattctggaattgtattggttgtacattcttttgtgtctattctgtttgtcaagtgagtcaagacttgcttttgtccattttgatttgtgtgtattagtctgagtcttggctccgttttgaggtatgagcaaagttttgctggattagaagttaacctttagggaaattccttattttggtatgtggcaatgctaatagatccactgaagatctggaaaattccaggaacttttcacctgagcctttcttctgagaaatgctgcagtcagaagggtgtgctggtaaagtattttggtggcagctgccatcatggtcattgccttcatataacatgcttcgtgctcatggtcattgccttcatataacatgcttcgtgccatcatgatccttgccttcatataacaaacatgcttcgtcagaggtgttggggttgaaaaaggagctgcatgcttcactggagttgagggcctctctcctgttctgactttaagccagaacttgtggctgggccatggaagctgtgactcctctgtggacatggtggcagcagggaacccctagagagaggggccactgggaccaggcctcctgttgtggagggactcctgggacagtcctccaccctgtcctgtggtcctgtgtacagggttggcctcttcctcctcccctgccaggcctctgcccatgccccttccttccttctcctgggactggtgaagctaggcatctggaagacttcttcctagcctggaagccctgacctcggcccatctgcagaatctcccagttccttcacagctgccgagtcctctcacgggtgcggtggaggcggccttgccggtggtgctttctgggcagccaggggttcctgggtgggaggactgtccctctggggacgtggcactgaagtgcctgctggcttcatgtggccctttgccctttcccagcctgagagatgctcaaaggtggggagctgggggagccacccctcggccattccctccacctccaagacaggtggcggccgggcaggcactcttaagcccacctccccctcttgttgccttcgatttcggcaaagcctgggcaggtgccaccgggaaggaatggcatccgagatgctgggcggggacgcggcgtggccgagggggccttgacggcgttggcggggcctgggcacaggggcagccgcagggaggcagggatggcaaggcgtgaagccaccctggaaggaactggaccaaggtcttcagaggtgcgacagggtctggaatctgaccttactctagcaggagtttttgtagactctccctgatagtttagtttttgataaagcatgctggtaaaaccactaccctcagagagagccaaaaatacagaagaggcggagagcgcccctccaaccaggctgttattcccctggactccgtgacatctgtggaattttttagctctttaaaatctgtaatttgttgtctattttttcattctaaataaaacttcagtttgcacctaa

SEQ ID NO: 133107 - DNA, 4504 bp, Homo sapiens
  Payload ID: 6011
  Gene Symbol: FANCC
  Gene Name: Fanconi anemia, complementation group C
  Uniprot ID: Q00597
  ENST ID: ENST00000375305
  CDS Start-End: 176-1852
gagcccccggagaggcgggagccgggtgttggcgttttggttctttttgttcattgagcgcaggcagctatgtcttcttcaaaggagaggagcaaagatttaatgtgtgccgaccatttccttcagtgctggacaggctgctgtgaagggacatcaccttttcgctttttccaagatggctcaagattcagtagatctttcttgtgattatcagttttggatgcagaagctttctgtatgggatcaggcttccactttggaaacccagcaagacacctgtcttcacgtggctcagttccaggagttcctaaggaagatgtatgaagccttgaaagagatggattctaatacagtcattgaaagattccccacaattggtcaactgttggcaaaagcttgttggaatccttttattttagcatatgatgaaagccaaaaaattctaatatggtgcttatgttgtctaattaacaaagaaccacagaattctggacaatcaaaacttaactcctggatacagggtgtattatctcatatactttcagcactcagatttgataaagaagttgctcttttcactcaaggtcttgggtatgcacctatagattactatcctggtttgcttaaaaatatggttttatcattagcgtctgaactcagagagaatcatcttaatggatttaacactcaaaggcgaatggctcccgagcgagtggcgtccctgtcacgagtttgtgtcccacttattaccctgacagatgttgaccccctggtggaggctctcctcatctgtcatggacgtgaacctcaggaaatcctccagccagagttctttgaggctgtaaacgaggccattttgctgaagaagatttctctccccatgtcagctgtagtctgcctctggcttcggcaccttcccagccttgaaaaagcaatgctgcatctttttgaaaagctaatctccagtgagagaaattgtctgagaaggatcgaatgctttataaaagattcatcgctgcctcaagcagcctgccaccctgccatattccgggttgttgatgagatgttcaggtgtgcactcctggaaaccgatggggccctggaaatcatagccactattcaggtgtttacgcagtgctttgtagaagctctggagaaagcaagcaagcagctgcggtttgcactcaagacctactttccttacacttctccatctcttgccatggtgctgctgcaagaccctcaagatatccctcggggacactggctccagacactgaagcatatttctgaactgctcagagaagcagttgaagaccagactcatgggtcctgcggaggtccctttgagagctggttcctgttcattcacttcggaggatgggctgagatggtggcagagcaattactgatgtcggcagccgaaccccccacggccctgctgtggctcttggccttctactacggcccccgtgatgggaggcagcagagagcacagactatggtccaggtgaaggccgtgctgggccacctcctggcaatgtccagaagcagcagcctctcagcccaggacctgcagacggtagcaggacagggcacagacacagacctcagagctcctgcacaacagctgatcaggcaccttctcctcaacttcctgctctgggctcctggaggccacacgatcgcctgggatgtcatcaccctgatggctcacactgctgagataactcacgagatcattggctttcttgaccagaccttgtacagatggaatcgtcttggcattgaaagccctagatcagaaaaactggcccgagagctccttaaagagctgcgaactcaagtctagaaggcacgcaggccgtgtgggtgcccggcgtgagggatcaggctcgccagggccacaggacaggtgatgacctgtggccacgcatttgtggagtaagtgccctcgctgggctgtgagaatgagctgtacacatcttgggacaatctgctagtatctattttacaaaatgcagagccaggtccctcagcccagactcagtcagacatgttcactaatgactcaagtgagccttcggtactcctggtgcccgcccggccagaccgtcagcttgataattactaaagcaaaggcctgggtgggagaacaggtttctagtttttacccaagtcaagctgcacatctattatttaaaaattcaaagtcttagaaccaagaatttggtcatgaaccattaaagaatttagagagaacttagctctttttagactctttttaggagtcagggatctgggataaagccacactgtcttgctgtatggagaaattcttcaaggggagtcagggtccctcaggcttcccttgtgtctccctggacctgcctgacaggccacaggagcagacagcacacccaagcccgggcctccggcacactctttccactctgtatttgctaaatgatgctaactgctaccaaaaggcccttgggacatcagaggagccggcaggcgaaggtagaggatgtgttccagaaacattagaaggcaggattaattcagttagttagttctcttgttaaatggaaatgggaattggaaattcctgataaagaattggcctggctgggtgcagtggctcacacctgtgatcccagcactttgggaggccaaggcagggggattacttcagcccaggagttccagactgcctggctaacatggcaataccctatctctactaaaaatacaaaaattatcggggtgcaatggcatgcatctgtaatcccagctattcaagaggctgaggcatgaggatctcttgaacccgggaggtgggagttgtagtgagccgagatcatgacactgcactccagcctgggcaacagagcgagaccatctcttaaaaaaaggcattgttagtgtaatctcaaggttaacatttatttcatgtcagtacagggtgctttttcctttcagggacattctggaattgtattggttgtacattcttttgtgtctattctgtttgtcaagtgagtcaagacttgcttttgtccattttgatttgtgtgtattagtctgagtcttggctccgttttgaggtatgagcaaagttttgctggattagaagttaacctttagggaaattccttattttggtatgtggcaatgctaatagatccactgaagatctggaaaattccaggaacttttcacctgagcctttcttctgagaaatgctgcagtcagaagggtgtgctggtaaagtattttggtggcagctgccatcatggtcattgccttcatataacatgcttcgtgctcatggtcattgccttcatataacatgcttcgtgccatcatgatccttgccttcatataacaaacatgcttcgtcagaggtgttggggttgaaaaaggagctgcatgcttcactggagttgagggcctctctcctgttctgactttaagccagaacttgtggctgggccatggaagctgtgactcctctgtggacatggtggcagcagggaacccctagagagaggggccactgggaccaggcctcctgttgtggagggactcctgggacagtcctccaccctgtcctgtggtcctgtgtacagggttggcctcttcctcctcccctgccaggcctctgcccatgccccttccttccttctcctgggactggtgaagctaggcatctggaagacttcttcctagcctggaagccctgacctcggcccatctgcagaatctcccagttccttcacagctgccgagtcctctcacgggtgcggtggaggcggccttgccggtggtgctttctgggcagccaggggttcctgggtgggaggactgtccctctggggacgtggcactgaagtgcctgctggcttcatgtggccctttgccctttcccagcctgagagatgctcaaaggtggggagctgggggagccacccctcggccattccctccacctccaagacaggtggcggccgggcaggcactcttaagcccacctccccctcttgttgccttcgatttcggcaaagcctgggcaggtgccaccgggaaggaatggcatccgagatgctgggcggggacgcggcgtggccgagggggccttgacggcgttggcggggcctgggcacaggggcagccgcagggaggcagggatggcaaggcgtgaagccaccctggaaggaactggaccaaggtcttcagaggtgcgacagggtctggaatctgaccttactctagcaggagtttttgtagactctccctgatagtttagtttttgataaagcatgctggtaaaaccactaccctcagagagagccaaaaatacagaagaggcggagagcgcccctccaaccaggctgttattcccctggactccgtgacatctgtggaattttttagctctttaaaatctgtaatttgttgtctattttttcattctaaataaaacttcagtttgcaccta

SEQ ID NO: 133108 - DNA, 591 bp, Homo sapiens
  Payload ID: 6011
  Gene Symbol: FANCC
  Gene Name: Fanconi anemia, complementation group C
  ENST ID: ENST00000433829
  CDS Start-End: 142-591
cttccctccattctttttgtggacgccaggccatatcttcaaagcccgtgagagatttttcagatttaatgtgtgccgaccatttccttcagtgctggacaggctgctgtgaagggacatcaccttttcgctttttccaagatggctcaagattcagtagatctttcttgtgattatcagttttggatgcagaagctttctgtatgggatcaggcttccactttggaaacccagcaagacacctgtcttcacgtggctcagttccaggagttcctaaggaagatgtatgaagccttgaaagagatggattctaatacagtcattgaaagattccccacaattggtcaactgttggcaaaagcttgttggaatccttttattttagcatatgatgaaagccaaaaaattctaatatggtgcttatgttgtctaattaacaaagaaccacagaattctggacaatcaaaacttaactcctggatacagggtgtattatctcatatactttcagcactcagatttgataaagaagttgctcttttcactcaaggtcttgggtatgcacctatagattactatcctggtttgctt

SEQ ID NO: 133109 - DNA, 2709 bp, Homo sapiens
  Payload ID: 6011
  Gene Symbol: FANCC
  Gene Name: Fanconi anemia, complementation group C
  ENST ID: ENST00000490972
  CDS Start-End: 263-1741
agaatgcactgctgacacgtgtgcgcgcgcgcggctccactgccgggcgaccgcgggaaaattccaaaaaaactcaaaaagccaatacgaggcaaagccaaattttcaagccacagatcccgggcggtggcttcctttccgccactgcccaaactgctgaagcagctcccgcgaggaccacccgatttaatgtgtgccgaccatttccttcagtgctggacaggctgctgtgaagggacatcaccttttcgctttttccaagatggctcaagattcagtagatctttcttgtgattatcagttttggatgcagaagctttctgtatgggatcaggcttccactttggaaacccagcaagacacctgtcttcacgtggctcagttccaggagttcctaaggaagatgtatgaagccttgaaagagatggattctaatacagtcattgaaagattccccacaattggtcaactgttggcaaaagcttgttggaatccttttattttagcatatgatgaaagccaaaaaattctaatatggtgcttatgttgtctaattaacaaagaaccacagaattctggacaatcaaaacttaactcctggatacagggtgtattatctcatatactttcagcactcagatttgataaagaagttgctcttttcactcaaggtcttgggtatgcacctatagattactatcctggtttgcttaaaaatatggttttatcattagcgtctgaactcagagagaatcatcttaatggatttaacactcaaaggcgaatggctcccgagcgagtggcgtccctgtcacgagtttgtgtcccacttattaccctgacagatgttgaccccctggtggaggctctcctcatctgtcatggacgtgaacctcaggaaatcctccagccagagttctttgaggctgtaaacgaggccattttgctgaagaagatttctctccccatgtcagctgtagtctgcctctggcttcggcaccttcccagccttgaaaaagcaatgctgcatctttttgaaaagctaatctccagtgagagaaattgtctgagaaggatcgaatgctttataaaagattcatcgctgcctcaagcagcctgccaccctgccatattccgggttgttgatgagatgttcaggtgtgcactcctggaaaccgatggggccctggaaatcatagccactattcaggtgtttacgcagtgctttgtagaagctctggagaaagcaagcaagcagctgcggtttgcactcaagacctactttccttacacttctccatctcttgccatggtgctgctgcaagaccctcaagatatccctcggggacactggctccagacactgaagcatatttctgaactgctcagagaagcagttgaagaccagactcatgggtcctgcggaggtccctttgagagctggttcctgttcattcacttcggaggatgggctgagatggtggcagagcaattactgatgtcggcagccgaaccccccacggccctgctgtggctcttggccttctactacggcccccgtgatgggaggcagcagagagcacagactatgatggcatatgtcatggcaacctgcaggcatggtgatctccagccttgtggtcagaggcgttctcctgtccccaccgaggtggccagagacgagacgctgccagcccattctcctgcaaaacgaagacccttcttccccaaggtcatttgatctgttattgctcagctgccatatctgccccagggtcgcgtcctccaaggcgtgccctgcagaggcgggctgttctgaggggtgtgccggcagcagagcctggccacagccagggccctgtctcgctccccagcagcccggccagggcttgcttccatcttgactgtctcctttcttggatcagtcaacagatcctcacattactggctttatttacatctcttactaaagtaatcagatgatattaaccactttgcttctgaaaaagaagttggtcatttcctaaataacagagcagctaagtatgggactggataactgtctgtggcaaagacagttgttattttatgtggaatataataattacaggaagcaatgctttgattaaaggcattggcacctcccttgcaagcattgatttgctaggttcttaaaacttcaactgccagtgctctatgctgatcttagtagttaaagaggacaaggctcattttgtatagagccctgcttctcttggctttggcattttctgttgtttgaaaacacacagactaataaagatgtctgcgtattttgtttaaaggcttgcatggcataggaaagaaaaatagttttagattttaaaaagttgaaatttggtgataatttattttggatcagaaataaagctttgtgaaaaaattataacccacgtatgtatttgaggattgctgtctgattaaaaagaaagctttttatttcttcccctttaaaagatcacgttaagctaaggaaaatcctggttgatgtttttaacagtaataagatgtacggggcacatatggtttttaaagcccttttatattctgtcttatttgattctgaataagctaagttggtagatatgtgttcaattccatcacagtcaaaaggttactgacagagaatcacttttgaagtataaagaaataaattattcaataacactt

SEQ ID NO: 133110 - DNA, 5219 bp, Homo sapiens
  Payload ID: 6012
  Gene Symbol: FANCD2
  Gene Name: Fanconi anemia, complementation group D2
  Uniprot ID: Q9BXW9
  ENST ID: ENST00000287647
  CDS Start-End: 94-4509
gtcagagcggcgtcgggcctggcgggaaagtcgaaaactacgggcggcgacggcttctcggaagtaatttaagtgcacaagacattggtcaaaatggtttccaaaagaagactgtcaaaatctgaggataaagagagcctgacagaagatgcctccaaaaccaggaagcaaccactttccaaaaagacaaagaaatctcatattgctaatgaagttgaagaaaatgacagcatctttgtaaagcttcttaagatatcaggaattattcttaaaacgggagagagtcagaatcaactagctgtggatcaaatagctttccaaaagaagctctttcagaccctgaggagacacccttcctatcccaaaataatagaagaatttgttagtggcctggagtcttacattgaggatgaagacagtttcaggaactgccttttgtcttgtgagcgtctgcaggatgaggaagccagtatgggtgcatcttattctaagagtctcatcaaactgcttctggggattgacatactgcagcctgccattatcaaaaccttatttgagaagttgccagaatatttttttgaaaacaagaacagtgatgaaatcaacatacctcgactcattgtcagtcaactaaaatggcttgacagagttgtggatggcaaggacctcaccaccaagatcatgcagctgatcagtattgctccagagaacctgcagcatgacatcatcaccagcctacctgagatcctaggggattcccagcacgctgatgtggggaaagaactcagtgacctactgatagagaatacttcactcactgtcccaatcctggatgtcctttcaagcctccgacttgacccaaacttcctattgaaggttcgccagttggtgatggataagttgtcgtctattagattggaggatttacctgtgataataaagttcattcttcattccgtaacagccatggatacacttgaggtaatttctgagcttcgggagaagttggatctgcagcattgtgttttgccatcacggttacaggcttcccaagtaaagttgaaaagtaaaggacgagcaagttcctcaggaaatcaagaaagcagcggtcagagctgtattattctcctctttgatgtaataaagtcagctattagatatgagaaaaccatttcagaagcctggattaaggcaattgaaaacactgcctcagtatctgaacacaaggtgtttgacctggtgatgcttttcatcatctatagcaccaatactcagacaaagaagtacattgacagggtgctaagaaataagattcgatcaggctgcattcaagaacagctgctccagagtacattctctgttcattacttagttcttaaggatatgtgttcatccattctgtcgctggctcagagtttgcttcactctctagaccagagtataatttcatttggcagtctcctatacaaatatgcatttaagttttttgacacgtactgccagcaggaagtggttggtgccttagtgacccatatctgcagtgggaatgaagctgaagttgatactgccttagatgtccttctagagttggtagtgttaaacccatctgctatgatgatgaatgctgtctttgtaaagggcattttagattatctggataacatatcccctcagcaaatacgaaaactcttctatgttctcagcacactggcatttagcaaacagaatgaagccagcagccacatccaggatgacatgcacttggtgataagaaagcagctctctagcaccgtattcaagtacaagctcattgggattattggtgctgtgaccatggctggcatcatggcggcagacagaagtgaatcacctagtttgacccaagagagagccaacctgagcgatgagcagtgcacacaggtgacctccttgttgcagttggttcattcctgcagtgagcagtctcctcaggcctctgcactttactatgatgaatttgccaacctgatccaacatgaaaagctggatccaaaagccctggaatgggttgggcataccatctgtaatgatttccaggatgccttcgtagtggactcctgtgttgttccggaaggtgactttccatttcctgtgaaagcactgtacggactggaagaatacgacactcaggatgggattgccataaacctcctgccgctgctgttttctcaggactttgcaaaagatgggggtccggtgacctcacaggaatcaggccaaaaattggtgtctccgctgtgcctggctccgtatttccggttactgagactttgtgtggagagacagcataacggaaacttggaggagattgatggtctactagattgtcctatattcctaactgacctggagcctggagagaagttggagtccatgtctgctaaagagcgttcattcatgtgttctctcatatttcttactctcaactggttccgagagattgtaaatgccttctgccaggaaacatcacctgagatgaaggggaaggtgctcactcggttaaagcacattgtagaattgcaaataatcctggaaaagtacttggcagtcaccccagactatgtccctcctcttggaaactttgatgtggaaactttagatataacacctcatactgttactgctatttcagcaaaaatcagaaagaaaggaaaaatagaaaggaaacaaaaaacagatggcagcaagacatcctcctctgacacactttcagaagagaaaaattcagaatgtgaccctacgccatctcatagaggccagctaaacaaggagttcacagggaaggaagaaaagacatcattgttactacataattcccatgcttttttccgagagctggacattgaggtcttctctattctacattgtggacttgtgacgaagttcatcttagatactgaaatgcacactgaagctacagaagttgtgcaacttgggccccctgagctgcttttcttgctggaagatctctcccagaagctggagagtatgctgacacctcctattgccaggagagtcccctttctcaagaacaaaggaagccggaatattggattctcacatctccaacagagatctgcccaagaaattgttcattgtgtttttcaactgctgaccccaatgtgtaaccacctggagaacattcacaactattttcagtgtttagctgctgagaatcacggtgtagttgatggaccaggagtgaaagttcaggagtaccacataatgtcttcctgctatcagaggctgctgcagatttttcatgggctttttgcttggagtggattttctcaacctgaaaatcagaatttactgtattcagccctccatgtccttagtagccgactgaaacagggagaacacagccagcctttggaggaactactcagccagagcgtccattacttgcagaatttccatcaaagcattcccagtttccagtgtgctctttatctcatcagacttttgatggttattttggagaaatcaacagcttctgctcagaacaaagaaaaaattgcttcccttgccagacaattcctctgtcgggtgtggccaagtggggataaagagaagagcaacatctctaatgaccagctccatgctctgctctgtatctacctggagcacacagagagcattctgaaggccatagaggagattgctggtgttggtgtcccagaactgatcaactctcctaaagatgcatcttcctccacattccctacactgaccaggcatacttttgttgttttcttccgtgtgatgatggctgaactagagaagacggtgaaaaaaattgagcctggcacagcagcagactcgcagcagattcatgaagagaaactcctctactggaacatggctgttcgagacttcagtatcctcatcaacttgataaaggtatttgatagtcatcctgttctgcatgtatgtttgaagtatgggcgtctctttgtggaagcatttctgaagcaatgtatgccgctcctagacttcagttttagaaaacaccgggaagatgttctgagcttactggaaaccttccagttggacacaaggctgcttcatcacctgtgtgggcattccaagattcaccaggacacgagactcacccaacatgtgcctctgctcaaaaagaccctggaacttttagtttgcagagtcaaagctatgctcactctcaacaattgtagagaggctttctggctgggcaatctaaaaaaccgggacttgcagggtgaagagattaagtcccaaaattcccaggagagcacagcagatgagagtgaggatgacatgtcatcccaggcctccaagagcaaagccactgaggtatctctacaaaacccaccagagtctggcactgatggttgcattttgttaattgttctaagttggtggagcagaactttgcctacttatgtttattgtcaaatgcttctatgcccatttccattccctccataacagcttctgtgcttatataatttttgggacccagaagaaacaacgacacaatcttagaatcactcctgagtatctcgagttgtggcatttgttatagagttgacaattttctgcattatagcctctcattttccatgaattcatatctgaaaccattttagaagggagaagtcatcgaagtattttctgagtgttgagaagaatgagttaaaccatttaaacacatttgaaacatacaaaaatagaaatgtgaaagcatttggtgaaagccaaagcacagagtcagaagctgccaccttagagaactgaaataaaaatagaagttcttacgcttttttgtggtacagatgctttcgacaatttaaagaaagctaaataaaaatgtagacatggctggcgcagtggctcatgcttgtaatcctagcactttttgaggccaaggtaggaggattgcttgagtccgggagctcaaggcaaagctgcacaacataacaagaccctatctccacaaaaaaaatgaaaaataaacctgggtgcggtggctcacacctgtaatcccagcactttgggaggccgatgtgggcagatcacaaggtcaggagttcaagaccagcctggccaacatagtgaaaccccatctctactgaaaatacaaaaattagctgggtgtggtggcacgtgcctgttatctcagctacttgggaggctga

SEQ ID NO: 133111 - DNA, 5102 bp, Homo sapiens
  Payload ID: 6012
  Gene Symbol: FANCD2
  Gene Name: Fanconi anemia, complementation group D2
  Uniprot ID: Q9BXW9
  ENST ID: ENST00000383807
  CDS Start-End: 79-4434
ggcctggcgggaaagtcgaaaactacgggcggcgacggcttctcggaagtaatttaagtgcacaagacattggtcaaaatggtttccaaaagaagactgtcaaaatctgaggataaagagagcctgacagaagatgcctccaaaaccaggaagcaaccactttccaaaaagacaaagaaatctcatattgctaatgaagttgaagaaaatgacagcatctttgtaaagcttcttaagatatcaggaattattcttaaaacgggagagagtcagaatcaactagctgtggatcaaatagctttccaaaagaagctctttcagaccctgaggagacacccttcctatcccaaaataatagaagaatttgttagtggcctggagtcttacattgaggatgaagacagtttcaggaactgccttttgtcttgtgagcgtctgcaggatgaggaagccagtatgggtgcatcttattctaagagtctcatcaaactgcttctggggattgacatactgcagcctgccattatcaaaaccttatttgagaagttgccagaatatttttttgaaaacaagaacagtgatgaaatcaacatacctcgactcattgtcagtcaactaaaatggcttgacagagttgtggatggcaaggacctcaccaccaagatcatgcagctgatcagtattgctccagagaacctgcagcatgacatcatcaccagcctacctgagatcctaggggattcccagcacgctgatgtggggaaagaactcagtgacctactgatagagaatacttcactcactgtcccaatcctggatgtcctttcaagcctccgacttgacccaaacttcctattgaaggttcgccagttggtgatggataagttgtcgtctattagattggaggatttacctgtgataataaagttcattcttcattccgtaacagccatggatacacttgaggtaatttctgagcttcgggagaagttggatctgcagcattgtgttttgccatcacggttacaggcttcccaagtaaagttgaaaagtaaaggacgagcaagttcctcaggaaatcaagaaagcagcggtcagagctgtattattctcctctttgatgtaataaagtcagctattagatatgagaaaaccatttcagaagcctggattaaggcaattgaaaacactgcctcagtatctgaacacaaggtgtttgacctggtgatgcttttcatcatctatagcaccaatactcagacaaagaagtacattgacagggtgctaagaaataagattcgatcaggctgcattcaagaacagctgctccagagtacattctctgttcattacttagttcttaaggatatgtgttcatccattctgtcgctggctcagagtttgcttcactctctagaccagagtataatttcatttggcagtctcctatacaaatatgcatttaagttttttgacacgtactgccagcaggaagtggttggtgccttagtgacccatatctgcagtgggaatgaagctgaagttgatactgccttagatgtccttctagagttggtagtgttaaacccatctgctatgatgatgaatgctgtctttgtaaagggcattttagattatctggataacatatcccctcagcaaatacgaaaactcttctatgttctcagcacactggcatttagcaaacagaatgaagccagcagccacatccaggatgacatgcacttggtgataagaaagcagctctctagcaccgtattcaagtacaagctcattgggattattggtgctgtgaccatggctggcatcatggcggcagacagaagtgaatcacctagtttgacccaagagagagccaacctgagcgatgagcagtgcacacaggtgacctccttgttgcagttggttcattcctgcagtgagcagtctcctcaggcctctgcactttactatgatgaatttgccaacctgatccaacatgaaaagctggatccaaaagccctggaatgggttgggcataccatctgtaatgatttccaggatgccttcgtagtggactcctgtgttgttccggaaggtgactttccatttcctgtgaaagcactgtacggactggaagaatacgacactcaggatgggattgccataaacctcctgccgctgctgttttctcaggactttgcaaaagatgggggtccggtgacctcacaggaatcaggccaaaaattggtgtctccgctgtgcctggctccgtatttccggttactgagactttgtgtggagagacagcataacggaaacttggaggagattgatggtctactagattgtcctatattcctaactgacctggagcctggagagaagttggagtccatgtctgctaaagagcgttcattcatgtgttctctcatatttcttactctcaactggttccgagagattgtaaatgccttctgccaggaaacatcacctgagatgaaggggaaggtgctcactcggttaaagcacattgtagaattgcaaataatcctggaaaagtacttggcagtcaccccagactatgtccctcctcttggaaactttgatgtggaaactttagatataacacctcatactgttactgctatttcagcaaaaatcagaaagaaaggaaaaatagaaaggaaacaaaaaacagatggcagcaagacatcctcctctgacacactttcagaagagaaaaattcagaatgtgaccctacgccatctcatagaggccagctaaacaaggagttcacagggaaggaagaaaagacatcattgttactacataattcccatgcttttttccgagagctggacattgaggtcttctctattctacattgtggacttgtgacgaagttcatcttagatactgaaatgcacactgaagctacagaagttgtgcaacttgggccccctgagctgcttttcttgctggaagatctctcccagaagctggagagtatgctgacacctcctattgccaggagagtcccctttctcaagaacaaaggaagccggaatattggattctcacatctccaacagagatctgcccaagaaattgttcattgtgtttttcaactgctgaccccaatgtgtaaccacctggagaacattcacaactattttcagtgtttagctgctgagaatcacggtgtagttgatggaccaggagtgaaagttcaggagtaccacataatgtcttcctgctatcagaggctgctgcagatttttcatgggctttttgcttggagtggattttctcaacctgaaaatcagaatttactgtattcagccctccatgtccttagtagccgactgaaacagggagaacacagccagcctttggaggaactactcagccagagcgtccattacttgcagaatttccatcaaagcattcccagtttccagtgtgctctttatctcatcagacttttgatggttattttggagaaatcaacagcttctgctcagaacaaagaaaaaattgcttcccttgccagacaattcctctgtcgggtgtggccaagtggggataaagagaagagcaacatctctaatgaccagctccatgctctgctctgtatctacctggagcacacagagagcattctgaaggccatagaggagattgctggtgttggtgtcccagaactgatcaactctcctaaagatgcatcttcctccacattccctacactgaccaggcatacttttgttgttttcttccgtgtgatgatggctgaactagagaagacggtgaaaaaaattgagcctggcacagcagcagactcgcagcagattcatgaagagaaactcctctactggaacatggctgttcgagacttcagtatcctcatcaacttgataaaggtatttgatagtcatcctgttctgcatgtatgtttgaagtatgggcgtctctttgtggaagcatttctgaagcaatgtatgccgctcctagacttcagttttagaaaacaccgggaagatgttctgagcttactggaaaccttccagttggacacaaggctgcttcatcacctgtgtgggcattccaagattcaccaggacacgagactcacccaacatgtgcctctgctcaaaaagaccctggaacttttagtttgcagagtcaaagctatgctcactctcaacaattgtagagaggctttctggctgggcaatctaaaaaaccgggacttgcagggtgaagagattaagtcccaaaattcccaggagagcacagcagatgagagtgaggatgacatgtcatcccaggcctccaagagcaaagccactgaggatggtgaagaagacgaagtaagtgctggagaaaaggagcaagatagtgatgagagttatgatgactctgattagaccccagataaattgttgcctgcttctgtgtctctgccagcctgtgatcattttgtgttagagtttgaaatccgctgtttgcctttcttactggtaggatccttttttgttcctctttttttttttttttttttttttttaaagacggggactcgctgtgtttcccaggctggagtgcagtgctgcaatcttggctcactgcaacctccatctcctaggttcaagcgattctcctgcctcagcctcctgagtagctgggacgacaggcacatgccaccatgcccagctaatttttgtatttttagtagatacggggttttaccatgtcggccagatggtctcaatctcctgaactcatgatccacctgcctcagcctcccaaagtgctgggattacaggcatgagccaccgctcccagccatattttgttcttaaagtggggtctttattaacttgtggacatcatggattgtctaacaccatcacagtccctggctcaggattctaatgtagcattatttattggtttggataaacccagctgtgctacactgcagagtaaaatctctgagtcatgattctggactttgggagctagttttgaaactctgatttattgtagaacttaggcttgtaccaattttacaaataaattctgttctaagttc

SEQ ID NO: 133112 - DNA, 3425 bp, Homo sapiens
  Payload ID: 6012
  Gene Symbol: FANCD2
  Gene Name: Fanconi anemia, complementation group D2
  ENST ID: ENST00000421731
  CDS Start-End: 1-2249
tgttaaacccatctgctatgatgatgaatgctgtctttgtaaagggcattttagattatctggataacatatcccctcagcaaatacgaaaactcttctatgttctcagcacactggcatttagcaaacagaatgaagccagcagccacatccaggatgacatgcacttggtgataagaaagcagctctctagcaccgtattcaagtacaagctcattgggattattggtgctgtgaccatggctggcatcatggcggcagacagaagtgaatcacctagtttgacccaagagagagccaacctgagcgatgagcagtgcacacaggtgacctccttgttgcagttggttcattcctgcagtgagcagtctcctcaggcctctgcactttactatgatgaatttgccaacctgatccaacatgaaaagctggatccaaaagccctggaatgggttgggcataccatctgtaatgatttccaggatgccttcgtagtggactcctgtgttgttccggaaggtgactttccatttcctgtgaaagcactgtacggactggaagaatacgacactcaggatgggattgccataaacctcctgccgctgctgttttctcaggactttgcaaaagatgggggtccggtgacctcacaggaatcaggccaaaaattggtgtctccgctgtgcctggctccgtatttccggttactgagactttgtgtggagagacagcataacggaaacttggaggagattgatggtctactagattgtcctatattcctaactgacctggagcctggagagaagttggagtccatgtctgctaaagagcgttcattcatgtgttctctcatatttcttactctcaactggttccgagagattgtaaatgccttctgccaggaaacatcacctgagatgaaggggaaggtgctcactcggttaaagcacattgtagaattgcaaataatcctggaaaagtacttggcagtcaccccagactatgtccctcctcttggaaactttgatgtggaaactttagatataacacctcatactgttactgctatttcagcaaaaatcagaaagaaaggaaaaatagaaaggaaacaaaaaacagatggcagcaagacatcctcctctgacacactttcagaagagaaaaattcagaatgtgaccctacgccatctcatagaggccagctaaacaaggagttcacagggaaggaagaaaagacatcattgttactacataattcccatgcttttttccgagagctggacattgaggtcttctctattctacattgtggacttgtgacgaagttcatcttagatactgaaatgcacactgaagctacagaagttgtgcaacttgggccccctgagctgcttttcttgctggaagatctctcccagaagctggagagtatgctgacacctcctattgccaggagagtcccctttctcaagaacaaaggaagccggaatattggattctcacatctccaacagagatctgcccaagaaattgttcattgtgtttttcaactgctgaccccaatgtgtaaccacctggagaacattcacaactattttcagtgtttagctgctgagaatcacggtgtagttgatggaccaggagtgaaagttcaggagtaccacataatgtcttcctgctatcagaggctgctgcagatttttcatgggctttttgcttggagtggattttctcaacctgaaaatcagaatttactgtattcagccctccatgtccttagtagccgactgaaacagggagaacacagccagcctttggaggaactactcagccagagcgtccattacttgcagaatttccatcaaagcattcccagtttccagtgtgctctttatctcatcagacttttgatggttattttggagaaatcaacagcttctgctcagaacaaagaaaaaattgcttcccttgccagacaattcctctgtcgggtgtggccaagtggggataaagagaagagcaacatctctaatgaccagctccatgctctgctctgtatctacctggagcacacagagagcattctgaaggccatagaggagattgctggtgttggtgtcccagaactgatcaactctcctaaagatgcatcttcctccacattccctacactgaccagattcatgaagagaaactcctctactggaacatggctgttcgagacttcagtatcctcatcaacttgataaaggtatttgatagtcatcctgttctgcatgtatgtttgaagtatgggcgtctctttgtggaagcatttctgaagcaatgtatgccgctcctagacttcagttttagaaaacaccgggaagatgttctgagcttactggaaaccttccagttggacacaaggctgcttcatcacctgtgtgggcattccaagattcaccaggacacgagactcacccaacatgtgcctctgctcaaaaagaccctggaacttttagtttgcagagtcaaagctatgctcactctcaacaattgtagagaggctttctggctgggcaatctaaaaaaccgggacttgcagggtgaagagattaagtcccaaaattcccaggagagcacagcagatgagagtgaggatgacatgtcatcccaggcctccaagagcaaagccactgaggatggtgaagaagacgaagtaagtgctggagaaaaggagcaagatagtgatgagagttatgatgactctgattagaccccagataaattgttgcctgcttctgtgtctctgccagcctgtgatcattttgtgttagagtttgaaatccgctgtttgcctttcttactggtaggatccttttttgttcctctttttttttttttttttttttttttaaagacggggactcgctgtgtttcccaggctggagtgcagtgctgcaatcttggctcactgcaacctccatctcctaggttcaagcgattctcctgcctcagcctcctgagtagctgggacgacaggcacatgccaccatgcccagctaatttttgtatttttagtagatacggggttttaccatgtcggccagatggtctcaatctcctgaactcatgatccacctgcctcagcctcccaaagtgctgggattacaggcatgagccaccgctcccagccatattttgttcttaaagtggggtctttattaacttgtggacatcatggattgtctaacaccatcacagtccctggctcaggattctaatgtagcattatttattggtttggataaacccagctgtgctacactgcagagtaaaatctctgagtcatgattctggactttgggagctagttttgaaactctgatttattgtagaacttaggcttgtaccaattttacaaataaattctgttctaa

SEQ ID NO: 133113 - DNA, 5185 bp, Homo sapiens
  Payload ID: 6012
  Gene Symbol: FANCD2
  Gene Name: Fanconi anemia, complementation group D2
  Uniprot ID: Q9BXW9
  ENST ID: ENST00000419585
  CDS Start-End: 162-4517
gtctctcgaggccccgctcccctgcggcctaatctctaagtccgggccgcggtcggcgttctcctctggggctccgcgccccgaaccttggcttcctcatctgccctgagatgggataatccccacaggaagtaatttaagtgcacaagacattggtcaaaatggtttccaaaagaagactgtcaaaatctgaggataaagagagcctgacagaagatgcctccaaaaccaggaagcaaccactttccaaaaagacaaagaaatctcatattgctaatgaagttgaagaaaatgacagcatctttgtaaagcttcttaagatatcaggaattattcttaaaacgggagagagtcagaatcaactagctgtggatcaaatagctttccaaaagaagctctttcagaccctgaggagacacccttcctatcccaaaataatagaagaatttgttagtggcctggagtcttacattgaggatgaagacagtttcaggaactgccttttgtcttgtgagcgtctgcaggatgaggaagccagtatgggtgcatcttattctaagagtctcatcaaactgcttctggggattgacatactgcagcctgccattatcaaaaccttatttgagaagttgccagaatatttttttgaaaacaagaacagtgatgaaatcaacatacctcgactcattgtcagtcaactaaaatggcttgacagagttgtggatggcaaggacctcaccaccaagatcatgcagctgatcagtattgctccagagaacctgcagcatgacatcatcaccagcctacctgagatcctaggggattcccagcacgctgatgtggggaaagaactcagtgacctactgatagagaatacttcactcactgtcccaatcctggatgtcctttcaagcctccgacttgacccaaacttcctattgaaggttcgccagttggtgatggataagttgtcgtctattagattggaggatttacctgtgataataaagttcattcttcattccgtaacagccatggatacacttgaggtaatttctgagcttcgggagaagttggatctgcagcattgtgttttgccatcacggttacaggcttcccaagtaaagttgaaaagtaaaggacgagcaagttcctcaggaaatcaagaaagcagcggtcagagctgtattattctcctctttgatgtaataaagtcagctattagatatgagaaaaccatttcagaagcctggattaaggcaattgaaaacactgcctcagtatctgaacacaaggtgtttgacctggtgatgcttttcatcatctatagcaccaatactcagacaaagaagtacattgacagggtgctaagaaataagattcgatcaggctgcattcaagaacagctgctccagagtacattctctgttcattacttagttcttaaggatatgtgttcatccattctgtcgctggctcagagtttgcttcactctctagaccagagtataatttcatttggcagtctcctatacaaatatgcatttaagttttttgacacgtactgccagcaggaagtggttggtgccttagtgacccatatctgcagtgggaatgaagctgaagttgatactgccttagatgtccttctagagttggtagtgttaaacccatctgctatgatgatgaatgctgtctttgtaaagggcattttagattatctggataacatatcccctcagcaaatacgaaaactcttctatgttctcagcacactggcatttagcaaacagaatgaagccagcagccacatccaggatgacatgcacttggtgataagaaagcagctctctagcaccgtattcaagtacaagctcattgggattattggtgctgtgaccatggctggcatcatggcggcagacagaagtgaatcacctagtttgacccaagagagagccaacctgagcgatgagcagtgcacacaggtgacctccttgttgcagttggttcattcctgcagtgagcagtctcctcaggcctctgcactttactatgatgaatttgccaacctgatccaacatgaaaagctggatccaaaagccctggaatgggttgggcataccatctgtaatgatttccaggatgccttcgtagtggactcctgtgttgttccggaaggtgactttccatttcctgtgaaagcactgtacggactggaagaatacgacactcaggatgggattgccataaacctcctgccgctgctgttttctcaggactttgcaaaagatgggggtccggtgacctcacaggaatcaggccaaaaattggtgtctccgctgtgcctggctccgtatttccggttactgagactttgtgtggagagacagcataacggaaacttggaggagattgatggtctactagattgtcctatattcctaactgacctggagcctggagagaagttggagtccatgtctgctaaagagcgttcattcatgtgttctctcatatttcttactctcaactggttccgagagattgtaaatgccttctgccaggaaacatcacctgagatgaaggggaaggtgctcactcggttaaagcacattgtagaattgcaaataatcctggaaaagtacttggcagtcaccccagactatgtccctcctcttggaaactttgatgtggaaactttagatataacacctcatactgttactgctatttcagcaaaaatcagaaagaaaggaaaaatagaaaggaaacaaaaaacagatggcagcaagacatcctcctctgacacactttcagaagagaaaaattcagaatgtgaccctacgccatctcatagaggccagctaaacaaggagttcacagggaaggaagaaaagacatcattgttactacataattcccatgcttttttccgagagctggacattgaggtcttctctattctacattgtggacttgtgacgaagttcatcttagatactgaaatgcacactgaagctacagaagttgtgcaacttgggccccctgagctgcttttcttgctggaagatctctcccagaagctggagagtatgctgacacctcctattgccaggagagtcccctttctcaagaacaaaggaagccggaatattggattctcacatctccaacagagatctgcccaagaaattgttcattgtgtttttcaactgctgaccccaatgtgtaaccacctggagaacattcacaactattttcagtgtttagctgctgagaatcacggtgtagttgatggaccaggagtgaaagttcaggagtaccacataatgtcttcctgctatcagaggctgctgcagatttttcatgggctttttgcttggagtggattttctcaacctgaaaatcagaatttactgtattcagccctccatgtccttagtagccgactgaaacagggagaacacagccagcctttggaggaactactcagccagagcgtccattacttgcagaatttccatcaaagcattcccagtttccagtgtgctctttatctcatcagacttttgatggttattttggagaaatcaacagcttctgctcagaacaaagaaaaaattgcttcccttgccagacaattcctctgtcgggtgtggccaagtggggataaagagaagagcaacatctctaatgaccagctccatgctctgctctgtatctacctggagcacacagagagcattctgaaggccatagaggagattgctggtgttggtgtcccagaactgatcaactctcctaaagatgcatcttcctccacattccctacactgaccaggcatacttttgttgttttcttccgtgtgatgatggctgaactagagaagacggtgaaaaaaattgagcctggcacagcagcagactcgcagcagattcatgaagagaaactcctctactggaacatggctgttcgagacttcagtatcctcatcaacttgataaaggtatttgatagtcatcctgttctgcatgtatgtttgaagtatgggcgtctctttgtggaagcatttctgaagcaatgtatgccgctcctagacttcagttttagaaaacaccgggaagatgttctgagcttactggaaaccttccagttggacacaaggctgcttcatcacctgtgtgggcattccaagattcaccaggacacgagactcacccaacatgtgcctctgctcaaaaagaccctggaacttttagtttgcagagtcaaagctatgctcactctcaacaattgtagagaggctttctggctgggcaatctaaaaaaccgggacttgcagggtgaagagattaagtcccaaaattcccaggagagcacagcagatgagagtgaggatgacatgtcatcccaggcctccaagagcaaagccactgaggatggtgaagaagacgaagtaagtgctggagaaaaggagcaagatagtgatgagagttatgatgactctgattagaccccagataaattgttgcctgcttctgtgtctctgccagcctgtgatcattttgtgttagagtttgaaatccgctgtttgcctttcttactggtaggatccttttttgttcctctttttttttttttttttttttttttaaagacggggactcgctgtgtttcccaggctggagtgcagtgctgcaatcttggctcactgcaacctccatctcctaggttcaagcgattctcctgcctcagcctcctgagtagctgggacgacaggcacatgccaccatgcccagctaatttttgtatttttagtagatacggggttttaccatgtcggccagatggtctcaatctcctgaactcatgatccacctgcctcagcctcccaaagtgctgggattacaggcatgagccaccgctcccagccatattttgttcttaaagtggggtctttattaacttgtggacatcatggattgtctaacaccatcacagtccctggctcaggattctaatgtagcattatttattggtttggataaacccagctgtgctacactgcagagtaaaatctctgagtcatgattctggactttgggagctagttttgaaactctgatttattgtagaacttaggcttgtaccaattttacaaataaattctgttctaagttc

SEQ ID NO: 133114 - DNA, 2450 bp, Homo sapiens
  Payload ID: 6012
  Gene Symbol: FANCD2
  Gene Name: Fanconi anemia, complementation group D2
  Uniprot ID: Q9BXW9
  ENST ID: ENST00000431693
  CDS Start-End: 39-764
tctaggaagtaatttaagtgcacaagacattggtcaaaatggtttccaaaagaagactgtcaaaatctgaggataaagagagcctgacagaagatgcctccaaaaccaggaagcaaccactttccaaaaagacaaagaaatctcatattgctaatgaagttgaagaaaatgacagcatctttgtaaagcttcttaagatatcaggaattattcttaaaacgggagagagtcagaatcaactagctgtggatcaaatagctttccaaaagaagctctttcagaccctgaggagacacccttcctatcccaaaataatagaagaatttgttagtggcctggagtcttacattgaggatgaagacagtttcaggaactgccttttgtcttgtgagcgtctgcaggatgaggaagccagtatgggtgcatcttattctaagagtctcatcaaactgcttctggggattgacatactgcagcctgccattatcaaaaccttatttgagaagttgccagaatatttttttgaaaacaagaacagtgatgaaatcaacatacctcgactcattgtcagtcaactaaaatggcttgacagagttgtggatggcaaggacctcaccaccaagatcatgcagctgatcagtattgctccagagaacctgcagcatgacatcatcaccagcctacctgagatcctaggggattcccagcacgctgatgtggggaaagaactcaggtggataaaccctctgtcatcatctaagtgaggctcagctatgggggttctatcactgcagtatgcaaagagcagtagtaatatggtctcttctatctaaaaagaggatgataccccccttcatgagtagggtatgggatttgacttaaaaaaaaaaggtatatatttgaatagatccacatactttctttttttttttttttttttctgagacagtcttgctctgtcgcccaggctggagtgcagtggtgcgatctcagctcactgcaacctccgcctcctgggttcaccccattctcctgcctcagcctcccaagtagctgggactagaggcacctgctaccatgcccgactaatttttttggtatttttagtagagacggggtttcaccatgttagccaggatggtctcgatctcctgaccttgtgatccgccctcctcggcctcccagagtgctgggattacaggcatgagccaccgtgcctggccccatgtactttcttttaaatggtatacctgttatgagcgtgaagtctggcttaggattagatatctaaatttggccagtggagaagttgaccatgatcccttaagtttcattaacttgttcttcagggggtccttaaccctggctgcacattaaaatcatttgtggagcctattaaacatctaccttctttgggttcctaggtgattcattctaatgcacagtcctgcatcagaccgcttgcggagacccattgcttactgtcattcatttgaaaaatagtaattggtagggaagtattgaagaaggggagaacaatatccctaggtaataaagtttccatcttaatgcaactttttattgtactagaagtattttttttaaattcagtttgtaatacttccttttgtatagttgtctgcaaagctacctccaaaacatccagtgatttcttgccctcatccttttgggcaggatgctccttctgggcaaagtactacgccatccactttacctgcctgatgccagctcatctccttttgtatagtctttttttttttttagcatctgtcaccgtctgttgggcgcagtggctcatgcctttaatcccagcatgttgggcggctgaagtgggtgggtcacttgagcccaggagtttgagaccagcctggacaacatggtgaaaagccgtctttcaaaaacatacaaaaattaggtgggcgtggtggtacgcacttataattctagctactcaggaggctgagatgggaggatcaattgagcgtggaaggtcgaagctacagtgagctgtgatgacaccactgtaactgtactcaagcctgggcatcagagtaagaccctgtctcaaaaaacaaacaaacaaaaaaaaaagcaatctatcactgtccttctcactatgttgtgctcctgtagcaccacctacatgtgtctctcatacttatcagatttcattgtaaatgttttgggttttctttttcctttttgcggggaaggatacataccaaactaaatagtggtgttctctgggtagtggggattgtgatggaaggcttcttgtttctacttttattatttgaatttttataatgagcatgtattattttttgcagtcaaaacaatttttaaagaaacatactataaacggtaacttaatggcaactaagtatgtcctttattttcatactctaataaatgattttctcaagtca

SEQ ID NO: 133115 - DNA, 567 bp, Homo sapiens
  Payload ID: 6012
  Gene Symbol: FANCD2
  Gene Name: Fanconi anemia, complementation group D2
  ENST ID: ENST00000435522
  CDS Start-End: 193-309
ttctcggtgagtaagtggagcaatggtcgtagtctctcgaggccccgctcccctgcggcctaatctctaagtccgggccgcggtcggcgttctcctctggggctccgcgccccgaaccttggcttcctcatctgccctgagatgggataatccccacaggaagtaatttaagtgcacaagacattggtcaaaatggtttccaaaagaagactgtcaaaatctgaggataaagagagcctgacagaagatgcctccaagatggggatttcactctgtcacccaggctggagtgcagtggtaatatcatagctcactatagcctcaacctcctgggctcaagttattcttccgccttagcctccgaagtagctgggactacagaaaccaggaagcaaccactttccaaaaagacaaagaaatctcatattgctaatgaagttgaagaaaatgacagcatctttgtaaagcttcttaagatatcaggaattattcttaaaacgggagagagtcagaatcaactagctgtggatcaaatagctttccaaaagaagctctttcagaccctga

SEQ ID NO: 133116 - DNA, 117 bp, Homo sapiens
  Payload ID: 6012
  Gene Symbol: FANCD2
  Gene Name: Fanconi anemia, complementation group D2
  ENST ID: ENST00000625535
  CDS Start-End: 1-117
atggtttccaaaagaagactgtcaaaatctgaggataaagagagcctgacagaagatgcctccaagatggggatttcactctgtcacccaggctggagtgcagtggtaatatcatag

SEQ ID NO: 133117 - DNA, 2554 bp, Homo sapiens
  Payload ID: 6013
  Gene Symbol: FANCE
  Gene Name: Fanconi anemia, complementation group E
  Uniprot ID: Q9HB96
  ENST ID: ENST00000229769
  CDS Start-End: 186-1796
aacggctgcggcttcgggcggccgggtttctccggtctcccaacgccgaggagagcttgtaacaggcgctggagctggcccgccaccgccgcgtcagggacggcgctggagtcctccgttcccctcagcctctgagctgaggccccacaccagagtagggggcggcgcggcacccgtgccccggcatggcgacaccggacgcggggctccctggggctgagggcgtggagccggcgccctgggcgcagctggaggcccccgcccgcctcctgctgcaggcgctgcaggcggggcctgagggggcgcggcgcggcctgggggtgctccgggcgctgggcagccgcggctgggagcccttcgactggggtcgcttgctcgaggccctgtgccgggaggagccggtcgtgcaggggcctgacggccgtctggagctgaaaccactgttgctgcgattgccccggatatgccagaggaacctgatgtccctgctgatggccgttcggccatcgctgccggaaagtgggctcctctctgtgctgcagattgcccagcaggacctagcccctgacccagatgcctggctccgtgccctgggggaattgctgcgaagggatttgggggtggggacctccatggagggagcttctccactgtctgaaagatgccagagacagctccaaagtctatgtagggggctgggcctggggggcaggaggttgaaatccccccaggctccagaccctgaagaagaggagaacagggactcccagcagcctgggaaacgcagaaaggactcagaggaagaggctgccagtcctgaggggaagagggtccccaaaagattacggtgttgggaagaggaagaagatcatgagaaggagagacccgaacataagtcactggaatccctggcagatggaggaagtgcatctcctattaaggaccagcctgtcatggcagttaagactggcgaggacggttcgaatctggatgatgctaaaggtctggctgagagtttggagttgcccaaagctatccaggaccagcttcccaggctgcagcagctgctgaagaccttggaggaggggttagagggattggaggatgcccccccagttgagctacagcttcttcacgaatgtagtcccagccagatggacttgctgtgtgcccagctgcagctccctcagctctcagacctcggtctcctgcggctctgcacctggctgctggccctttcacctgatctcagcctcagcaatgctactgtgctgaccagaagcctctttcttggacggatcctctccttgacttcctcagcctcccgcctgcttacaactgccctgacctccttctgtgccaaatatacataccctgtctgcagcgccctccttgaccctgtgctccaggccccaggcacaggtcctgctcaaacagagttactgtgttgccttgtgaagatggagtccctggagccagatgcacaggttctaatgctgggacagatcttggagctgccctggaaggaggaaactttcttggtgttgcagtcactcctagagcggcaggtggagatgacccctgagaagttcagtgtcttaatggagaagctctgtaaaaaggggctggcagccaccacctccatggcctatgccaagctcatgctgacagtgatgaccaagtatcaggctaacatcactgagacccagaggctgggcctggctatggccctagaacctaacaccaccttcctgaggaagtccctgaaggccgccttgaaacatttgggcccctgaccatccaccaagggaccaccctcttggtgctccatcaccagcttcctgaagggcatttctttcttcaccaccttgtcttgagccctagcctgaggataaaggctgagcctggccatcccagattgcaactgcctccctgttacaggctgcatagggaatattggcttcccagccagcagggaggctcctgggctaagggagctcagctatattttctttttcatttcttttgtttttgagagaaggtattgctctgtcatccaggctggagtgcagtgatgcgattgatcatggctcactgtaacctctgcctcccaggctcgatcctcccatgtcagcctcccaagtagctgggactacatgcacatgacactatgcccagctaattttttattttgtagataatatgctggtcagggctggtcttgaactcctgagctcaagtgatcttcctgccttggcacccaaagtgttgagatttacaggtgtgagccaccacaccaggccagagctatatttccaaaggctgctggccccaggcacactcctcatcaattctcaggctgcagggacaaactttccgatagggctcagtaggatcaagccgacccagagtgggcatgggatgctccaggaggtctggggtaccagtgggctcagatgaagctcttgtgctcatgtatattatgaccttctgtgtttttgtttctgacttgaataatttatcaatggtgttgaataaaagcaagttcaataat

SEQ ID NO: 133118 - DNA, 4269 bp, Homo sapiens
  Payload ID: 6014
  Gene Symbol: FANCF
  Gene Name: Fanconi anemia, complementation group F
  Uniprot ID: Q9NPI8
  ENST ID: ENST00000327470
  CDS Start-End: 978-2102
ctttttgttaaagtacaaaacaaaacaccttcccccacttttcgaatagttttggctgtgtctttaggactggaaggaaattcagctcaaatgaattactatattatgaacttaagtaagaattgttgtgcattttgtacagaatgcaactcctaggagttgacaaatgtttgttaagtgcatcagtgagcgacataggaccttctcctccctactctcttgtcacggtttttatttaatcaaacatttattattgttcgatgctcttaaatgccatttccttcagctgattatttgtatgacagaagagtcaattaagctattttgtcctaaaaattacgaaaacgaaatgtacaattgtgaagtaaaattttgttcctttgcaaattttaataaattattgaagtttattttttgtttcaaataatctgggcttcagttctaataatggaaggacaatgtgaaggcccagaattcagcatagcgcctggcattaataggaggtcagtacatttttagtacatgtttctcaaatagatcttaaaatttcatttaagagcgtttcctcacgtcacagtatgtctctggcgttacttaattttgaaaaacctcaacacagattctagttttaggcaaagctcagaaaatttctacttaaggatatttccaaagcgaaaggaagcgcggagacgttcatgactggcatcatctcgcacgtggttccggaaattctcggtaggatgccctacatctgctctccctccactaagaagaacctctttgtgtggcgaaagtaaaagtattagggcttttaagttgcccagagtcaaggaacacggataaagacgctgggagattgacatgcatttcgaccaatagcattgcagagaggcgtatcatttcgcggatgttccaatcagtacgcagagagtcgccgtctccaaggtgaaagcggaagtagggccttcgcgcacctcatggaatcccttctgcagcacctggatcgcttttccgagcttctggcggtctcaagcactacctacgtcagcacctgggaccccgccaccgtgcgccgggccttgcagtgggcgcgctacctgcgccacatccatcggcgctttggtcggcatggccccattcgcacggctctggagcggcggctgcacaaccagtggaggcaagagggcggctttgggcggggtccagttccgggattagcgaacttccaggccctcggtcactgtgacgtcctgctctctctgcgcctgctggagaaccgggccctcggggatgcagctcgttaccacctggtgcagcaactctttcccggcccgggcgtccgggacgccgatgaggagacactccaagagagcctggcccgccttgcccgccggcggtctgcggtgcacatgctgcgcttcaatggctatagagagaacccaaatctccaggaggactctctgatgaagacccaggcggagctgctgctggagcgtctgcaggaggtggggaaggccgaagcggagcgtcccgccaggtttctcagcagcctgtgggagcgcttgcctcagaacaacttcctgaaggtgatagcggtggcgctgttgcagccgcctttgtctcgtcggccccaagaagagttggaacccggcatccacaaatcacctggagaggggagccaagtgctagtccactggcttctggggaattcggaagtctttgctgccttttgtcgcgccctcccagccgggcttttgactttagtgactagccgccacccagcgctgtctcctgtctatctgggtctgctaacagactggggtcaacgtttgcactatgaccttcagaaaggcatttgggttggaactgagtcccaagatgtgccctgggaggagttgcacaataggtttcaaagcctctgtcaggcccctccacctctgaaagataaagttctaactgccctggagacctgtaaagcgcaggatggagattttgaagtacctggtcttagcatctggacagacctcttattagctcttcgtagtggtgcatttaggaaaagacaagttttgggtctcagcgcaggcctcagttctgtataggcaatgctgtgttattacttgaatatagaatatatagtttacaaaatgaaaattacaatgttctcaccaaatatatgccttcgtgtgtccaaagtataattattttagatgctaattttgaatagtttattaaacagttataaatatgcaaagtagctggcatgtagtgtcacggattttctggatagaggaagtgattggaagtactccacttaaagccatggaattagcaatagtttgctttttaatagaaggcccatttgtaagaatgttgaaaatatgtgtaccgtttaaagaaaaagcagctttaaagtgacaaacaaaataccctttttcttttagtatggtttatttttctaggttttctgtccctccctcagtagtgaagagttttctttattcctggcagtgtcaggaatattggtttgaaaagctgttggcctatctggagtttggccttgttaacctagtattctaaccagttaaccagccttagtatgcattaaaattgtattgttcagaaagtttgtttctcattttctgcaaattcttactttgaaaatgaatcaccacatagtatgtccctttaaagcattgacgcacagacaaatgtttaaagcacagtaaatacgaatatatgcctttggatattaaattaatgcttgatgataaaagaatcaaacttttttttttttgagatggagtctcgctctgtcacccagactggagtgcagtggtgtgatcactgctcagtgcaacctctgcctcccaggatcaagcaattctgactcagcctcccaagtagctgggattacaggcgcaggccaccatgcccggctaattttttgtatttttagtagagacggggtttcaccatgctggccaggctggtctcaaacacctgaccttgtgatccgtccgccttggcctcccaaagtgctgggattacaggcgtgagccaccgcgcctggccaaaacaacattttaagtagaagatccaggttttagtgcagcttctgccgttaactaggttaataaatcacaaccttggggccacagttgccttatatgtaaatgaagtgtttagaataaaatagttaaatttccttatttttcccttggtggctgccctgtggaaacagtttagaatatttgttttgtgtgtaggaacctagttgtgttagtttacctgggtgttccacagctgatagtgattgccttgaataaattcaagggcaatttattcatttttactagggagatagacctttacagcaatcaagatatttttgtccatatccaggttagctggtaagaggatttttttggagaaaaaaatgatatttagaaagttaatttctaattccggaatggaataaaaacaatatgagtagtgtaatcttgtagaaaaagagttgtataatcttgtagaatttctcattctgtggtacaacccaggggtaaactattattccagtagtcagtacacttttctagataaatcttgagtgaaaaccagcaatttctttttccttgtggtctgattcctttttctaatccatgaaggccatcttgtagattacatttatcattaatgcaagaataaagacaattcctcctgtcagttgcgtgaattttttttaagaaacaacccagtgaagagttctaccatagcaaggcctaatgttagctttagctttagaaaataacagtttgtgaacttacttccctatatttgcagctgtatctcacactatgatttacaataaaattgtaaagattgacaatagacttaagaaataacattttaaaatctattttatacttaccatttattattctgttattttagtctccatatgttcattacatacataatcttatttaatcttcacaccaaaactgtattcttatgaatatacgctaaaagattaagtaaaatgcccaagggtataaacaaaagcaacatgaaagtggaagccgtatctgtcatttattttatttccagaagcctagcacagtgtccagcatatggtagatacttgtagtgtttgaataaatgaaaccagcattagagctttatatactttctcttaaggacttgaaaagattaggaatctacgcatacactgagagagaaaaaagtgagaggaagactataaaaata

SEQ ID NO: 133119 - DNA, 2631 bp, Homo sapiens
  Payload ID: 6015
  Gene Symbol: FANCG
  Gene Name: Fanconi anemia, complementation group G
  Uniprot ID: O15287
  ENST ID: ENST00000378643
  CDS Start-End: 493-2361
aggaggacctgggggtgtggcagcgaggaagggccgagccacggactgtggggccgaaactcgctcccgcccaccctttctcgaggctgtggcctccgcgagagccgagcgggccgcaccgccggccgtgcgactgccccagtcagacacgaccccggcttctagcccgcctaagcctgtttggggttgctgactcgtttcctccccgagtttcccgcgggaactaactcttcaagaggaccaaccgcagcccagagcttcgcagacccggccaaccagaggcgaggttgagagcccggcgggccgcggggagagagcgtcccatctgtcctggaaagcctgggcgggtggattgggaccccgagagaagcaggggagctcggcggggtgcagaagtgcccaggcccctccccgctggggttgggagcttgggcaggccagcttcacccttcctaagtccgcttctggtctccgggcccagcctcggccaccatgtcccgccagaccacctctgtgggctccagctgcctggacctgtggagggaaaagaatgaccggctcgttcgacaggccaaggtggctcagaactccggtctgactctgaggcgacagcagttggctcaggatgcactggaagggctcagagggctcctccatagtctgcaagggctccctgcagctgttcctgttcttcccttggagctgactgtcacctgcaacttcattatcctgagggcaagcttggcccagggtttcacagaggatcaggcccaggatatccagcggagcctagagagagtgctggagacacaggagcagcaggggcccaggttggaacaggggctcagggagctgtgggactctgtccttcgtgcttcctgccttctgccggagctgctgtctgccctgcaccgcctggttggcctgcaggctgccctctggttgagtgctgaccgtcttggggacctggccttgttactagagaccctgaatggcagccagagtggagcctctaaggatctgctgttacttctgaaaacttggagtcccccagctgaggaattagatgctccattgaccctgcaggatgcccagggattgaaggatgtcctcctgacagcatttgcctaccgccaaggtctccaggagctgatcacagggaacccagacaaggcactaagcagccttcatgaagcggcctcaggcctgtgtccacggcctgtgttggtccaggtgtacacagcactggggtcctgtcaccgtaagatgggaaatccacagagagcactgttgtacttggttgcagccctgaaagagggatcagcctggggtcctccacttctggaggcctctaggctctatcagcaactgggggacacaacagcagagctggagagtctggagctgctagttgaggccttgaatgtcccatgcagttccaaagccccgcagtttctcattgaggtagaattactactgccaccacctgacctagcctcaccccttcattgtggcactcagagccagaccaagcacatactagcaagcaggtgcctacagacggggagggcaggagacgctgcagagcattacttggacctgctggccctgttgctggatagctcggagccaaggttctccccacccccctcccctccagggccctgtatgcctgaggtgtttttggaggcagcggtagcactgatccaggcaggcagagcccaagatgccttgactctatgtgaggagttgctcagccgcacatcatctctgctacccaagatgtcccggctgtgggaagatgccagaaaaggaaccaaggaactgccatactgcccactctgggtctctgccacccacctgcttcagggccaggcctgggttcaactgggtgcccaaaaagtggcaattagtgaatttagcaggtgcctcgagctgctcttccgggccacacctgaggaaaaagaacaaggggcagctttcaactgtgagcagggatgtaagtcagatgcggcactgcagcagcttcgggcagccgccctaattagtcgtggactggaatgggtagccagcggccaggataccaaagccttacaggacttcctcctcagtgtgcagatgtgcccaggtaatcgagacacttactttcacctgcttcagactctgaagaggctagatcggagggatgaggccactgcactctggtggaggctggaggcccaaactaaggggtcacatgaagatgctctgtggtctctccccctgtacctagaaagctatttgagctggatccgtccctctgatcgtgacgccttccttgaagaatttcggacatctctgccaaagtcttgtgacctgtagctgccacgttttgaagagcttgagctgggtccccagtgggctgtctctctgtggggagggctttctgcttcaccatcattaggaatgtgaccattcctatataattcctggactggtgagattggtggtaggcctgtgaaatttgccctagttactaccattctcgttttggaggaaacaatctctgccaccaccaagtcattgactttgctcgaggcaccttttttcctgtttctccttttctgttgtcgagtaaaatttcatatttat

SEQ ID NO: 133120 - DNA, 868 bp, Homo sapiens
  Payload ID: 6015
  Gene Symbol: FANCG
  Gene Name: Fanconi anemia, complementation group G
  ENST ID: ENST00000448890
  CDS Start-End: 224-868
cctttctcgaggctgtggcctccgcgagagccgagcgggccgcaccgccggccgtgcgactgccccagtcagacacgaccccggcttctagcccgcctaagcctgtttggggttgctgactcgtttcctccccgagtttcccgcgggaactaactcttcaagaggaccaaccgcagcccagagcttcgcagacccggccaaccagaggcgagcctcggccaccatgtcccgccagaccacctctgtgggctccagctgcctggacctgtggagggaaaagaatgaccggctcgttcgacaggccaaggtggctcagaactccggtctgactctgaggcgacagcagttggctcaggatgcactggaagggctcagagggctcctccatagtctgcaagggctccctgcagctgttcctgttcttcccttggagctgactgtcacctgcaacttcattatcctgagggcaagcttggcccagggtttcacagaggatcaggcccaggatatccagcggagcctagagagagtgctggagacacaggagcagcaggggcccaggttggaacaggggctcagggagctgtgggactctgtccttcgtgcttcctgccttctgccggagctgctgtctgccctgcaccgcctggttggcctgcaggctgccctctggttgagtgctgaccgtcttggggacctggccttgttactagagaccctgaatggcagccagagtggagcctctaaggatctgctgttacttctgaaaacttggagtcccccagctgaggaattagatgctccattgaccctgcaggatgcccagggattgaaggatgtcctcctgacagcatttgcctaccgccaa

SEQ ID NO: 133121 - DNA, 2108 bp, Homo sapiens
  Payload ID: 6015
  Gene Symbol: FANCG
  Gene Name: Fanconi anemia, complementation group G
  ENST ID: ENST00000425676
  CDS Start-End: 170-490
atctgtcctggaaagcctgggcgggtggattgggaccccgagagaagcaggggagctcggcggggtgcagaagtgcccaggcccctccccgctggggttgggagcttgggcaggccagcttcacccttcctaagtccgcttctggtctccgggcccagcctcggccaccatgtcccgccagaccacctctgtgggctccagctgcctggacctgtggagggaaaagaatgaccggctcgttcgacaggccaaggtggctcagaactccggtctgactctgaggcgacagcagttggctcaggatgcactggaagggctcagagggctcctccatagtctgcaagggctccctgcagctgttcctgttcttcccttggagctgactgtcacctgcaacttcattatcctgagggcaagcttggcccagggtttcacagaggatcaggcccaggatatccagcggagcctagagagagagtggagcctctaaggatctgctgttacttctgaaaacttggagtcccccagctgaggaattagatgctccattgaccctgcaggatgcccagggattgaaggatgtcctcctgacagcatttgcctaccgccaaggtctccaggagctgatcacagggaacccagacaaggcactaagcagccttcatgaagcggcctcaggcctgtgtccacggcctgtgttggtccaggtgtacacagcactggggtcctgtcaccgtaagatgggaaatccacagagagcactgttgtacttggttgcagccctgaaagagggatcagcctggggtcctccacttctggaggcctctaggctctatcagcaactgggggacacaacagcagagctggagagtctggagctgctagttgaggccttgaatgtcccatgcagttccaaagccccgcagtttctcattgaggtagaattactactgccaccacctgacctagcctcaccccttcattgtggcactcagagccagaccaagcacatactagcaagcaggtgcctacagacggggagggcaggagacgctgcagagcattacttggacctgctggccctgttgctggatagctcggagccaaggttctccccacccccctcccctccagggccctgtatgcctgaggtgtttttggaggcagcggtagcactgatccaggcaggcagagcccaagatgccttgactctatgtgaggagttgctcagccgcacatcatctctgctacccaagatgtcccggctgtgggaagatgccagaaaaggaaccaaggaactgccatactgcccactctgggtctctgccacccacctgcttcagggccaggcctgggttcaactgggtgcccaaaaagtggcaattagtgaatttagcaggtgcctcgagctgctcttccgggccacacctgaggaaaaagaacaaggggcagctttcaactgtgagcagggatgtaagtcagatgcggcactgcagcagcttcgggcagccgccctaattagtcgtggactggaatgggtagccagcggccaggataccaaagccttacaggacttcctcctcagtgtgcagatgtgcccaggtaatcgagacacttactttcacctgcttcagactctgaagaggctagatcggagggatgaggccactgcactctggtggaggctggaggcccaaactaaggggtcacatgaagatgctctgtggtctctccccctgtacctagaaagctatttgagctggatccgtccctctgatcgtgacgccttccttgaagaatttcggacatctctgccaaagtcttgtgacctgtagctgccacgttttgaagagcttgagctgggtccccagtgggctgtctctctgtggggagggctttctgcttcaccatcattaggaatgtgaccattcctatataattcctggactggtgagattggtggtaggcctgtgaaatttgccctagttactaccattctcgttttggaggaaacaatctctgccaccaccaagtcattgactttgctcgaggcaccttttttcctgtttctccttttctgttgtcgagtaaaatttcatatttatctc

SEQ ID NO: 133122 - DNA, 4713 bp, Homo sapiens
  Payload ID: 6016
  Gene Symbol: FANCI
  Gene Name: Fanconi anemia, complementation group I
  Uniprot ID: Q9NVI1
  ENST ID: ENST00000300027
  CDS Start-End: 105-3911
gccgcgggggcggatcttgttgttacgggtaacggaagtgtggcggcgttgggttgagcgggctttttggaagtttgtggcggagttctgtgatatgagcaacaatggaccagaagattttatctctagcagcagaaaaaacagcagacaaactgcaagaatttcttcaaaccctgagagaaggtgatttgactaatctccttcagaatcaagcagtgaaaggaaaagttgctggagcactcctgagagccatcttcaaaggttccccctgctctgaggaagctggaacacttaggagacgtaagatatacacttgttgtatccagttggtggaatcgggggatttgcagaaagaaatagcgtctgagatcataggattactgatgctggaggctcaccattttccaggaccattattggttgaattagccaatgagtttattagtgctgtcagagaaggcagcctagtgaatggaaaatctttggagttactacctatcattctcactgccctggctacgaaaaaggaaaatctggcttatggaaaaggtgtactgagtggggaagaatgtaagaaacagttgattaacaccctgtgttctggcaggtgggatcagcaatatgtaatccaactcacctccatgttcaaggatgtccctctgactgcagaagaggtggaatttgtggtggaaaaagcattgagcatgttctccaagatgaatcttcaagaaataccacctttggtctatcagcttctggttctctcctccaagggaagcagaaagagtgttttggaaggaatcatagccttcttcagtgcactagataagcagcacaatgaggaacagagtggtgacgagctattggatgttgtcactgtgccatcaggtgaacttcgtcatgtggaaggcaccattattctacacattgtgtttgccatcaaattggactatgaactaggcagagaactcgtgaaacacttaaaggtaggacagcaaggagattccaataataacttaagtcccttcagcattgctcttcttctgtctgtaacaagaatacaaagatttcaggaccaggtgcttgatcttttaaagacttcggttgtaaagagctttaaggatcttcaactcctccaaggctcaaaatttcttcagaatctagttcctcatagatcttatgtttcaaccatgatcttggaagtagtgaagaatagcgttcatagctgggaccatgttactcagggcctcgtagaacttggtttcattttgatggattcatatgggccaaagaaggttcttgatggaaaaactattgaaaccagcccaagtctttctagaatgccaaaccagcatgcatgtaagctcggagctaatatcctgttggaaacttttaagatccatgagatgatcagacaagaaattttggagcaggtcctcaacagggttgttaccagagcatcttctcccatcagtcatttcttagacctgctttcaaatatcgtcatgtatgcacccttagttcttcaaagttgttcttctaaagtcacagaagcttttgactatttgtcctttctgccccttcagactgtacaaaggctgcttaaggcagtgcagccccttctcaaagtcagcatgtcaatgagagactgcttgatacttgtccttcggaaagctatgtttgccaaccagcttgatgcccgaaaatctgcagttgctgggtttttgctgctcctgaagaactttaaagttttaggcagcctgtcatcctctcagtgcagtcagtctctcagtgtcagtcaggttcatgtggatgttcacagccattacaattctgtcgccaatgaaactttttgccttgagatcatggatagtttgaggagatgcttaagccagcaagctgatgttcgactcatgctttatgaggggttttatgatgttcttcgaaggaactctcagctggctaattcagtcatgcaaactctgctctcacagttaaaacagttctatgagccaaaacctgatctgctgcctcctctgaaattagaagcttgtattctgacccaaggagataagatctctctacaagaaccactggattatctgctgtgttgtattcagcattgtttggcctggtataagaatacagtcatacccttacagcagggagaggaggaagaggaggaggaagaggcattctacgaagacctagatgatatattggagtccattactaatagaatgattaagagtgagctggaagactttgaactggataaatcagcagatttttctcagagcaccagtattggcataaaaaataatatctgtgcttttcttgtgatgggagtttgtgaggttttaatagaatacaatttctccataagtagtttcagtaagaataggtttgaggacattctgagcttatttatgtgttacaaaaaactctctgacattcttaatgaaaaagcgggtaaagccaaaactaaaatggccaacaagacaagtgatagtcttttgtccatgaaatttgtgtccagtcttctcactgctcttttcagagtcttgctatggagatacacttcaattcctacttcagtggaagagtcgggaaagaaagagaaaggaaagagcatctcactgctgtgcttggagggtttacagaaaatattcagtgctgtgcaacagttctatcagcccaagattcagcagtttctcagagctctggatgtcacagataaggaaggagaagagagagaagatgcagatgtcagtgtcactcagagaacagcattccagatccggcaatttcagaggtccttgttgaatttacttagcagtcaagaggaagattttaatagcaaagaagccctcctgctagtcacggttcttaccagtttgtccaagttactggagccctcctctcctcagtttgtgcagatgttatcctggacatcaaagatttgcaaggaaaacagccgggaggatgccttgttttgcaagagcttgatgaacttgctcttcagcctgcatgtttcgtataagagtcctgtcattctgctgcgtgacttgtcccaggatatccacgggcatctgggagatatagaccaggatgtagaggtggagaaaacaaaccactttgcaatagtgaatttgagaacggctgcccccactgtctgtttacttgttctgagtcaggccgagaaggttctagaagaagtggactggctaatcaccaagcttaagggacaagtgagccaagaaaccttatcagaagaggcctcttctcaggcaaccctaccaaatcagcctgttgagaaagctatcatcatgcaactgggaactctgcttacatttttccacgagctggtgcagacagctctgccatcaggcagctgtgtggacaccttgttaaaggacttgtgcaaaatgtacaccacacttacagcccttgtcagatattatctccaggtgtgtcagagctccggaggaattccaaaaaatatggaaaagctggtgaagctgtctggttctcatctgacccccctgtgttattctttcatttcttacgtacagaataagagtaagagcctgaactatacgggagagaaaaaggagaaacctgctgccgttgccacagccatggccagagttcttcgggaaaccaagccaatccctaacctcatctttgccatagaacagtatgaaaaatttctcatccacctttctaagaagtccaaggtgaacctgatgcagcacatgaagctcagcacctcacgagacttcaagatcaaaggaaacatcctagacatggttcttcgagaggatggtgaagatgaaaatgaagagggcactgcatcagagcatgggggacagaacaaagaaccagccaagaagaaaaggaaaaaataaatgaaatgcctgagttaatgtgaactttggggcttctgcttcatttttacccaacaagcaacaatgccccttgtcctgtagtccacaccgatgttggcatcttggttctgaacccactgaattcaactgcaccttcagttagaaggaatcttcttggcaggtcctgctactgaaaaatggctggccttaggcaagcccttttgcaaaaagcacagctgaaagcctgagtttgggagcctgcaccaccccgatgaagctccacgggagcaaatacagagcctccaggcagtgctatggtccaggctggcttcgtttttccaaggagcctttggtgagttcaattatctggtaaatatccagcgcttcacctgaaagatagtgcaaattggttaggatgccacctcaagaactgtaactgagagctcagaagtgagcaaaggagcttaatgctaaggtcaaaaggagagtgaaaggttgagaacaattgccacgaacggtaatgttacatgttaggagggtctgttttctttttatataagtgtgtcttagatatattttaaatagaaaataagctttctgatttacttgtttggtatttaaagcacagtttgtttttctgtcacctatagagtgcaagaatgcactctatagaataaattatctttaaacatttcttctgtggttgaagtaggggacaggtacaggtagaatatttgaagctctgctgccttcatttctgaaacatcatatcacattcactctggacacagggcaccttataaactgaaattagcctagaata

SEQ ID NO: 133123 - DNA, 4743 bp, Homo sapiens
  Payload ID: 6016
  Gene Symbol: FANCI
  Gene Name: Fanconi anemia, complementation group I
  Uniprot ID: Q9NVI1
  ENST ID: ENST00000310775
  CDS Start-End: 87-4073
gttgttacgggtaacggaagtgtggcggcgttgggttgagcgggctttttggaagtttgtggcggagttctgtgatatgagcaacaatggaccagaagattttatctctagcagcagaaaaaacagcagacaaactgcaagaatttcttcaaaccctgagagaaggtgatttgactaatctccttcagaatcaagcagtgaaaggaaaagttgctggagcactcctgagagccatcttcaaaggttccccctgctctgaggaagctggaacacttaggagacgtaagatatacacttgttgtatccagttggtggaatcgggggatttgcagaaagaaatagcgtctgagatcataggattactgatgctggaggctcaccattttccaggaccattattggttgaattagccaatgagtttattagtgctgtcagagaaggcagcctagtgaatggaaaatctttggagttactacctatcattctcactgccctggctacgaaaaaggaaaatctggcttatggaaaaggtgtactgagtggggaagaatgtaagaaacagttgattaacaccctgtgttctggcaggtgggatcagcaatatgtaatccaactcacctccatgttcaaggatgtccctctgactgcagaagaggtggaatttgtggtggaaaaagcattgagcatgttctccaagatgaatcttcaagaaataccacctttggtctatcagcttctggttctctcctccaagggaagcagaaagagtgttttggaaggaatcatagccttcttcagtgcactagataagcagcacaatgaggaacagagtggtgacgagctattggatgttgtcactgtgccatcaggtgaacttcgtcatgtggaaggcaccattattctacacattgtgtttgccatcaaattggactatgaactaggcagagaactcgtgaaacacttaaaggtaggacagcaaggagattccaataataacttaagtcccttcagcattgctcttcttctgtctgtaacaagaatacaaagatttcaggaccaggtgcttgatcttttaaagacttcggttgtaaagagctttaaggatcttcaactcctccaaggctcaaaatttcttcagaatctagttcctcatagatcttatgtttcaaccatgatcttggaagtagtgaagaatagcgttcatagctgggaccatgttactcagggcctcgtagaacttggtttcattttgatggattcatatgggccaaagaaggttcttgatggaaaaactattgaaaccagcccaagtctttctagaatgccaaaccagcatgcatgtaagctcggagctaatatcctgttggaaacttttaagatccatgagatgatcagacaagaaattttggagcaggtcctcaacagggttgttaccagagcatcttctcccatcagtcatttcttagacctgctttcaaatatcgtcatgtatgcacccttagttcttcaaagttgttcttctaaagtcacagaagcttttgactatttgtcctttctgccccttcagactgtacaaaggctgcttaaggcagtgcagccccttctcaaagtcagcatgtcaatgagagactgcttgatacttgtccttcggaaagctatgtttgccaaccagcttgatgcccgaaaatctgcagttgctgggtttttgctgctcctgaagaactttaaagttttaggcagcctgtcatcctctcagtgcagtcagtctctcagtgtcagtcaggttcatgtggatgttcacagccattacaattctgtcgccaatgaaactttttgccttgagatcatggatagtttgaggagatgcttaagccagcaagctgatgttcgactcatgctttatgaggggttttatgatgttcttcgaaggaactctcagctggctaattcagtcatgcaaactctgctctcacagttaaaacagttctatgagccaaaacctgatctgctgcctcctctgaaattagaagcttgtattctgacccaaggagataagatctctctacaagaaccactggattatctgctgtgttgtattcagcattgtttggcctggtataagaatacagtcatacccttacagcagggagaggaggaagaggaggaggaagaggcattctacgaagacctagatgatatattggagtccattactaatagaatgattaagagtgagctggaagactttgaactggataaatcagcagatttttctcagagcaccagtattggcataaaaaataatatctgtgcttttcttgtgatgggagtttgtgaggttttaatagaatacaatttctccataagtagtttcagtaagaataggtttgaggacattctgagcttatttatgtgttacaaaaaactctctgacattcttaatgaaaaagcgggtaaagccaaaactaaaatggccaacaagacaagtgatagtcttttgtccatgaaatttgtgtccagtcttctcactgctcttttcagggatagtatccaaagccaccaagaaagcctttctgttctcaggtccagcaatgagtttatgcgctatgcagtgaatgtagctctgcagaaagtacagcagctaaaggaaacagggcatgtgagtggccctgatggccaaaacccagaaaagatctttcagaacctctgtgacataactcgagtcttgctatggagatacacttcaattcctacttcagtggaagagtcgggaaagaaagagaaaggaaagagcatctcactgctgtgcttggagggtttacagaaaatattcagtgctgtgcaacagttctatcagcccaagattcagcagtttctcagagctctggatgtcacagataaggaaggagaagagagagaagatgcagatgtcagtgtcactcagagaacagcattccagatccggcaatttcagaggtccttgttgaatttacttagcagtcaagaggaagattttaatagcaaagaagccctcctgctagtcacggttcttaccagtttgtccaagttactggagccctcctctcctcagtttgtgcagatgttatcctggacatcaaagatttgcaaggaaaacagccgggaggatgccttgttttgcaagagcttgatgaacttgctcttcagcctgcatgtttcgtataagagtcctgtcattctgctgcgtgacttgtcccaggatatccacgggcatctgggagatatagaccaggatgtagaggtggagaaaacaaaccactttgcaatagtgaatttgagaacggctgcccccactgtctgtttacttgttctgagtcaggccgagaaggttctagaagaagtggactggctaatcaccaagcttaagggacaagtgagccaagaaaccttatcagaagaggcctcttctcaggcaaccctaccaaatcagcctgttgagaaagctatcatcatgcaactgggaactctgcttacatttttccacgagctggtgcagacagctctgccatcaggcagctgtgtggacaccttgttaaaggacttgtgcaaaatgtacaccacacttacagcccttgtcagatattatctccaggtgtgtcagagctccggaggaattccaaaaaatatggaaaagctggtgaagctgtctggttctcatctgacccccctgtgttattctttcatttcttacgtacagaataagagtaagagcctgaactatacgggagagaaaaaggagaaacctgctgccgttgccacagccatggccagagttcttcgggaaaccaagccaatccctaacctcatctttgccatagaacagtatgaaaaatttctcatccacctttctaagaagtccaaggtgaacctgatgcagcacatgaagctcagcacctcacgagacttcaagatcaaaggaaacatcctagacatggttcttcgagaggatggtgaagatgaaaatgaagagggcactgcatcagagcatgggggacagaacaaagaaccagccaagaagaaaaggaaaaaataaatgaaatgcctgagttaatgtgaactttggggcttctgcttcatttttacccaacaagcaacaatgccccttgtcctgtagtccacaccgatgttggcatcttggttctgaacccactgaattcaactgcaccttcagttagaaggaatcttcttggcaggtcctgctactgaaaaatggctggccttaggcaagcccttttgcaaaaagcacagctgaaagcctgagtttgggagcctgcaccaccccgatgaagctccacgggagcaaatacagagcctccaggcagtgctatggtccaggctggcttcgtttttccaaggagcctttggtgagttcaattatctggtaaatatccagcgcttcacctgaaagatagtgcaaattggttaggatgccacctcaagaactgtaactgagagctcagaagtgagcaaaggagcttaatgctaaggtcaaaaggagagtgaaaggttgagaacaattgccacgaacggtaatgttacatgttaggagggtctgttttctttttatataagtgtgtcttagatatattttaaatagaaaataagctttctgatttacttgtttggtatttaaagcacagtttgtttttctgtcacctatagagtgcaagaatgcactctatagaataaattatctttaaaca

SEQ ID NO: 133124 - DNA, 3690 bp, Homo sapiens
  Payload ID: 6016
  Gene Symbol: FANCI
  Gene Name: Fanconi anemia, complementation group I
  ENST ID: ENST00000447611
  CDS Start-End: 50-3337
gagcgggctttttggaagtttgtggcggagttctgtgatatgagcaacaatggaccagaagattttatctctagcagcagaaaaaacagcagacaaactgcaagaatttcttcaaaccctgagagaaggtgatttgactaatctccttcagaatcaagcagtgaaaggaaaagttgctggagcactcctgagagccatcttcaaaggttccccctgctctgaggaagctggaacacttaggagacgtaagatatacacttgttgtatccagttggtggaatcgggggatttgcagaaagaaatagcgtctgagatcataggattactgatgctggaggctcaccattttccaggaccattattggttgaattagccaatgagtttattagtgctgtcagagaaggcagcctagtgaatggaaaatctttggagttactacctatcattctcactgccctggctacgaaaaaggaaaatctggcttatggaaaaggtgtactgagtggggaagaatgtaagaaacagttgattaacaccctgtgttctggcaggtgggatcagcaatatgtaatccaactcacctccatgttcaaggatgtccctctgactgcagaagaggtggaatttgtggtggaaaaagcattgagcatgttctccaagatgaatcttcaagaaataccacctttggtctatcagcttctggttctctcctccaagggaagcagaaagagtgttttggaaggaatcatagccttcttcagtgcactagataagcagcacaatgaggaacagagtggtgacgagctattggatgttgtcactgtgccatcaggtgaacttcgtcatgtggaaggcaccattattctacacattgtgtttgccatcaaattggactatgaactaggcagagaactcgtgaaacacttaaaggtaggacagcaaggagattccaataataacttaagtcccttcagcattgctcttcttctgtctgtaacaagaatacaaagatttcaggaccaggtgcttgatcttttaaagacttcggttgtaaagagctttaaggatcttcaactcctccaaggctcaaaatttcttcagaatctagttcctcatagatcttatgtttcaaccatgatcttggaagtagtgaagaatagcgttcatagctgggaccatgttactcagggcctcgtagaacttggtttcattttgatggattcatatgggccaaagaaggttcttgatggaaaaactattgaaaccagcccaagtctttctagaatgccaaaccagcatgcatgtaagctcggagctaatatcctgttggaaacttttaagatccatgagatgatcagacaagaaattttggagcaggtcctcaacagggttgttaccagagcatcttctcccatcagtcatttcttagacctgctttcaaatatcgtcatgtatgcacccttagttcttcaaagttgttcttctaaagtcacagaagcttttgactatttgtcctttctgccccttcagactgtacaaaggctgcttaaggcagtgcagccccttctcaaagtcagcatgtcaatgagagactgcttgatacttgtccttcggaaagctatgtttgccaaccagcttgatgcccgaaaatctgcagttgctgggtttttgctgctcctgaagaactttaaagttttaggcagcctgtcatcctctcagtgcagtcagtctctcagtgtcagtcaggttcatgtggatgttcacagccattacaattctgtcgccaatgaaactttttgccttgagatcatggatagtttgaggagatgcttaagccagcaagctgatgttcgactcatgctttatgaggggttttatgatgttcttcgaaggaactctcagctggctaattcagtcatgcaaactctgctctcacagttaaaacagttctatgagccaaaacctgatctgctgcctcctctgaaattagaagcttgtattctgacccaaggagataagatctctctacaagaaccactggattatctgctgtgttgtattcagcattgtttggcctggtataagaatacagtcatacccttacagcagggagaggaggaagaggaggaggaagaggcattctacgaagacctagatgatatattggagtccattactaatagaatgattaagagtgagctggaagactttgaactggataaatcagcagatttttctcagagcaccagtattggcataaaaaataatatctgtgcttttcttgtgatgggagtttgtgaggttttaatagaatacaatttctccataagtagtttcagtaagaataggtttgaggacattctgagcttatttatgtgttacaaaaaactctctgacattcttaatgaaaaagcgggtaaagccaaaactaaaatggccaacaagacaagtgatagtcttttgtccatgaaatttgtgtccagtcttctcactgctcttttcagagtcttgctatggagatacacttcaattcctacttcagtggaagagtcgggaaagaaagagaaaggaaagagcatctcactgctgtgcttggagggtttacagaaaatattcagtgctgtgcaacagttctatcagcccaagattcagcagtttctcagagctctggatgtcacagataaggaaggagaagagagagaagatgcagatgtcagtgtcactcagagaacagcattccagatccggcaatttcagaggtccttgttgaatttacttagcagtcaagaggaagattttaatagcaaagaagccctcctgctagtcacggttcttaccagtttgtccaagttactggagccctcctctcctcagtttgtgcagatgttatcctggacatcaaagatttgcaaggaaaacagccgggaggatgccttgttttgcaagagcttgatgaacttgctcttcagcctgcatgtttcgtataagagtcctgtcattctgctgcgtgacttgtcccaggatatccacgggcatctgggagatatagaccaggatgtagaggtggagaaaacaaaccactttgcaatagtgaatttgagaacggctgcccccactgtctgtttacttgttctgagtcaggccgagaaggttctagaagaagtggactggctaatcaccaagcttaagggacaagtgagccaagaaaccttatcagtatctccaggtgtgtcagagctccggaggaattccaaaaaatatggaaaagctggtgaagctgtctggttctcatctgacccccctgtgttattctttcatttcttacgtacagaataagagtaagagcctgaactatacgggagagaaaaaggagaaacctgctgccgttgccacagccatggccagagttcttcgggaaaccaagccaatccctaacctcatctttgccatagaacagtatgaaaaatttctcatccacctttctaagaagtccaaggtgaacctgatgcagcacatgaagctcagcacctcacgagacttcaagatcaaaggaaacatcctagacatggttcttcgagaggatggtgaagatgaaaatgaagagggcactgcatcagagcatgggggacagaacaaagaaccagccaagaagaaaaggaaaaaataaatgaaatgcctgagttaatgtg

SEQ ID NO: 133125 - DNA, 754 bp, Homo sapiens
  Payload ID: 6016
  Gene Symbol: FANCI
  Gene Name: Fanconi anemia, complementation group I
  ENST ID: ENST00000565255
  CDS Start-End: 75-754
ggcggcgttgggttgagcgggctttttggaagtttgtggcggaggtgaggccgagttctgtgatatgagcaacaatggaccagaagattttatctctagcagcagaaaaaacagcagacaaactgcaagaatttcttcaaaccctgagagaaggtgatttgactaatctccttcagaatcaagcagtgaaaggaaaagttgctggagcactcctgagagccatcttcaaaggttccccctgctctgaggaagctggaacacttaggagacgtaagatatacacttgttgtatccagttggtggaatcgggggatttgcagaaagaaatagcgtctgagatcataggattactgatgctggaggctcaccattttccaggaccattattggttgaattagccaatgagtttattagtgctgtcagagaaggcagcctagtgaatggaaaatctttggagttactacctatcattctcactgccctggctacgaaaaaggaaaatctggcttatggaaaaggtgtactgagtggggaagaatgtaagaaacagttgattaacaccctgtgttctggcaggtgggatcagcaatatgtaatccaactcacctccatgttcaaggatgtccctctgactgcagaagaggtggaatttgtggtggaaaaagcattgagcatgttctccaagatgaatcttcaagaaataccacctttggtctatcagcttctggttctctcctccaaggtacaaatgga

SEQ ID NO: 133126 - DNA, 526 bp, Homo sapiens
  Payload ID: 6016
  Gene Symbol: FANCI
  Gene Name: Fanconi anemia, complementation group I
  ENST ID: ENST00000570225
  CDS Start-End: 1-438
gaatgtaagaaacagttgattaacaccctgtgttctggcaggtgggatcagcaatatgtaatccaactcacctccatgttcaaggatgtccctctgactgcagaagaggtggaatttgtggtggaaaaagcattgagcatgttctccaagatgaatcttcaagaaataccacctttggtctatcagcttctggttctctcctccaagggaagcagaaagagtgttttggaaggaatcatagccttcttcagtgcactagataagcagcacaatgaggaacagagtggtgacgagctattggatgttgtcactgtgccatcaggtgaacttcgtcatgtggaaggcaccattattctacacattgtgtttgccatcaaattggactatgaactaggcagagaactcgtgaaacacttaaaggtagcatcaaacttgtaaggtgatctgggtctcttttgaatgaaagtgtttgaacttaagccactgttatgccagttaatgacaggaaataaatactgtaaaatga

SEQ ID NO: 133127 - DNA, 3268 bp, Homo sapiens
  Payload ID: 6016
  Gene Symbol: FANCI
  Gene Name: Fanconi anemia, complementation group I
  ENST ID: ENST00000561894
  CDS Start-End: 1-3268
aatccaactcacctccatgttcaaggatgtccctctgactgcagaagaggtggaatttgtggtggaaaaagcattgagcatgttctccaagatgaatcttcaagaaataccacctttggtctatcagcttctggttctctcctccaagggaagcagaaagagtgttttggaaggaatcatagccttcttcagtgcactagataagcagcacaatgaggaacagagtggtgacgagctattggatgttgtcactgtgccatcaggtgaacttcgtcatgtggaaggcaccattattctacacattgtgtttgccatcaaattggactatgaactaggcagagaactcgtgaaacacttaaaggtaggacagcaaggagattccaataataacttaagtcccttcagcattgctcttcttctgtctgtaacaagaatacaaagatttcaggaccaggtgcttgatcttttaaagacttcggttgtaaagagctttaaggatcttcaactcctccaaggctcaaaatttcttcagaatctagttcctcatagatcttatgtttcaaccatgatcttggaagtagtgaagaatagcgttcatagctgggaccatgttactcagggcctcgtagaacttggtttcattttgatggattcatatgggccaaagaaggttcttgatggaaaaactattgaaaccagcccaagtctttctagaatgccaaaccagcatgcatgtaagctcggagctaatatcctgttggaaacttttaagatccatgagatgatcagacaagaaattttggagcaggtcctcaacagggttgttaccagagcatcttctcccatcagtcatttcttagacctgctttcaaatatcgtcatgtatgcacccttagttcttcaaagttgttcttctaaagtcacagaagcttttgactatttgtcctttctgccccttcagactgtacaaaggctgcttaaggcagtgcagccccttctcaaagtcagcatgtcaatgagagactgcttgatacttgtccttcggaaagctatgtttgccaaccagcttgatgcccgaaaatctgcagttgctgggtttttgctgctcctgaagaactttaaagttttaggcagcctgtcatcctctcagtgcagtcagtctctcagtgtcagtcaggttcatgtggatgttcacagccattacaattctgtcgccaatgaaactttttgccttgagatcatggatagtttgaggagatgcttaagccagcaagctgatgttcgactcatgctttatgaggggttttatgatgttcttcgaaggaactctcagctggctaattcagtcatgcaaactctgctctcacagttaaaacagttctatgagccaaaacctgatctgctgcctcctctgaaattagaagcttgtattctgacccaaggagataagatctctctacaagaaccactggattatctgctgtgttgtattcagcattgtttggcctggtataagaatacagtcatacccttacagcagggagaggaggaagaggaggaggaagaggcattctacgaagacctagatgatatattggagtccattactaatagaatgattaagagtgagctggaagactttgaactggataaatcagcagatttttctcagagcaccagtattggcataaaaaataatatctgtgcttttcttgtgatgggagtttgtgaggttttaatagaatacaatttctccataagtagtttcagtaagaataggtttgaggacattctgagcttatttatgtgttacaaaaaactctctgacattcttaatgaaaaagcgggtaaagccaaaactaaaatggccaacaagacaagtgatagtcttttgtccatgaaatttgtgtccagtcttctcactgctcttttcagagtcttgctatggagatacacttcaattcctacttcagtggaagagtcgggaaagaaagagaaaggaaagagcatctcactgctgtgcttggagggtttacagaaaatattcagtgctgtgcaacagttctatcagcccaagattcagcagtttctcagagctctggatgtcacagataaggaaggagaagagagagaagatgcagatgtcagtgtcactcagagaacagcattccagatccggcaatttcagaggtccttgttgaatttacttagcagtcaagaggaagattttaatagcaaagaagccctcctgctagtcacggttcttaccagtttgtccaagttactggagccctcctctcctcagtttgtgcagatgttatcctggacatcaaagatttgcaaggaaaacagccgggaggatgccttgttttgcaagagcttgatgaacttgctcttcagcctgcatgtttcgtataagagtcctgtcattctgctgcgtgacttgtcccaggatatccacgggcatctgggagatatagaccaggatgtagaggtggagaaaacaaaccactttgcaatagtgaatttgagaacggctgcccccactgtctgtttacttgttctgagtcaggccgagaaggttctagaagaagtggactggctaatcaccaagcttaagggacaagtgagccaagaaaccttatcagaggcctcttctcaggcaaccctaccaaatcagcctgttgagaaagctatcatcatgcaactgggaactctgcttacatttttccacgagctggtgcagacagctctgccatcaggcagctgtgtggacaccttgttaaaggacttgtgcaaaatgtacaccacacttacagcccttgtcagatattatctccaggtgtgtcagagctccggaggaattccaaaaaatatggaaaagctggtgaagctgtctggttctcatctgacccccctgtgttattctttcatttcttacgtacagaataagagtaagagcctgaactatacgggagagaaaaaggagaaacctgctgccgttgccacagccatggccagagttcttcgggaaaccaagccaatccctaacctcatctttgccatagaacagtatgaaaaatttctcatccacctttctaagaagtccaaggtgaacctgatgcagcacatgaagctcagcacctcacgagacttcaagatcaaaggaaacatcctagacatggttcttcgagaggatggtgaagatgaaaatgaagagggcactgcatcagagcatgggggacagaacaaagaaccagccaagaag

SEQ ID NO: 133128 - DNA, 584 bp, Homo sapiens
  Payload ID: 6016
  Gene Symbol: FANCI
  Gene Name: Fanconi anemia, complementation group I
  ENST ID: ENST00000567891
  CDS Start-End: 113-584
gggtaacggaagtgtggcggcgttgggttgagcgggctttttggaagtttgtggcggaggtgaggccgaggtgactgcagagcggctcgcgagttctgtgatatgagcaacaatggaccagaagattttatctctagcagcagaaaaaacagcagacaaactgcaagaatttcttcaaaccctgagagaaggtgatttgactaatctccttcagaatcaagcagtgaaaggaaaagttgctggagcactcctgagagccatcttcaaaggttccccctgctctgaggaagctggaacacttaggagacgtaagatatacacttgttgtatccagttggtggaatcgggggatttgcagaaagaaatagcgtctgagatcataggattactgatgctggaggctcaccattttccaggaccattattggttgaattagccaatgagtttattagtgctgtcagagaaggcagcctagtgaatggaaaatctttggagttactacctatcattctcactgccctggctacgaaaaaggaaaatctggcttatggaaaaggtgtactgagtggggaagaatgtaaga

SEQ ID NO: 133129 - DNA, 562 bp, Homo sapiens
  Payload ID: 6016
  Gene Symbol: FANCI
  Gene Name: Fanconi anemia, complementation group I
  ENST ID: ENST00000564920
  CDS Start-End: 186-562
ggcggcgttgggttgagcgggctttttggaagtttgtggcggaggtgagagtctccctctgttgccaggctggagtgcagtggcgcgatctcggctcactgcaacctccgcctcctgagttcaagtgattctcctgcctcagcctcacaagtagctgggactacagttctgtgatatgagcaacaatggaccagaagattttatctctagcagcagaaaaaacagcagacaaactgcaagaatttcttcaaaccctgagagaaggtgatttgactaatctccttcagaatcaagcagtgaaaggaaaagttgctggagcactcctgagagccatcttcaaaggttccccctgctctgaggaagctggaacacttaggagacgtaagatatacacttgttgtatccagttggtggaatcgggggatttgcagaaagaaatagcgtctgagatcataggattactgatgctggaggctcaccattttccaggaccattattggttgaattagccaatgagtttattagtgctgtcagagaaggcagcctagtgaatggaaaatc

SEQ ID NO: 133130 - DNA, 700 bp, Homo sapiens
  Payload ID: 6016
  Gene Symbol: FANCI
  Gene Name: Fanconi anemia, complementation group I
  ENST ID: ENST00000563250
  CDS Start-End: 54-700
gtgaggccgaggtgactgcagagcggctcgcgagttctgtgatatgagcaacaatggaccagaagattttatctctagcagcagaaaaaacagcagacaaactgcaagaatttcttcaaaccctgagagaaggtgatttgactaatctccttcagaatcaagcagtgaaaggaaaagttgctggagcactcctgagagccatcttcaaaggttccccctgctctgaggaagctggaacacttaggagacgtaagatatacacttgttgtatccagttggtggaatcgggggatttgcagaaagaaatagcgtctgagatcataggattactgatgctggaggctcaccattttccaggaccattattggttgaattagccaatgagtttattagtgctgtcagagaaggcagcctagtgaatggaaaatctttggagttactacctatcattctcactgccctggctacgaaaaaggaaaatctggcttatggaaaaggtgtactgagtggggaagaatgtaagaaacagttgattaacaccctgtgttctggcaggtgggatcagcaatatgtaatccaactcacctccatgttcaaggatgtccctctgactgcagaagaggtggaatttgtggtggaaaaagcattgagcatgttctccaagatgaatcttcaagaaataccacctttggtctatca

SEQ ID NO: 133131 - DNA, 1070 bp, Homo sapiens
  Payload ID: 6016
  Gene Symbol: FANCI
  Gene Name: Fanconi anemia, complementation group I
  Uniprot ID: Q9NVI1
  ENST ID: ENST00000567996
  CDS Start-End: 272-1030
ggaagtttgtggcggaggtgaggccgaggtgactgcagagcggctcgcgagagtctccctctgttgccaggctggagtgcagtggcgcgatctcggctcactgcaacctccgcctcctgagttcaagtgattctcctgcctcagcctcacaagtagctgggactacagggttttggactgataaagcaatggaagccactgaagagctttaagatgaggatggcatggagggaagataagtcacataatcagttctgtgatatgagcaacaatggaccagaagattttatctctagcagcagaaaaaacagcagacaaactgcaagaatttcttcaaaccctgagagaaggtgatttgactaatctccttcagaatcaagcagtgaaaggaaaagttgctggagcactcctgagagccatcttcaaaggttccccctgctctgaggaagctggaacacttaggagacgtaagatatacacttgttgtatccagttggtggaatcgggggatttgcagaaagaaatagcgtctgagatcataggattactgatgctggaggctcaccattttccaggaccattattggttgaattagccaatgagtttattagtgctgtcagagaaggcagcctagtgaatggaaaatctttggagttactacctatcattctcactgccctggctacgaaaaaggaaaatctggcttatggaaaaggtgtactgagtggggaagaatgtaagaaacagttgattaacaccctgtgttctggcaggtgggatcagcaatatgtaatccaactcacctccatgttcaaggatgtccctctgactgcagaagaggtggaatttgtggtggaaaaagcattgagcatgttctccaagatgaatcttcaagaaataccacctttggtctatcagcttctggttctctcctccaagggaagcagaaagagtgttttggaaggaatcatagccttcttcagtgcactagataagcagcacaatgaggaacagagtggtgacgagtgagtaatatagtgtagaaataaagatcatttttacaaattca

SEQ ID NO: 133132 - DNA, 1683 bp, Homo sapiens
  Payload ID: 6017
  Gene Symbol: FANCL
  Gene Name: Fanconi anemia, complementation group L
  Uniprot ID: Q9NW38
  ENST ID: ENST00000233741
  CDS Start-End: 38-1165
gtctagagcttttctgtgtttctccggacttcgagccatggcggtgacggaagcgagcctgttgcgccagtgccccctgcttctgccccagaaccggtcgaaaaccgtgtatgagggattcatctcggctcagggaagagacttccaccttaggatagtgttgcctgaagatttacaactgaagaatgcaagattattatgtagttggcagctgagaacaatacttagtggataccatcgaatagtacaacagagaatgcagcactctcctgatctaatgagctttatgatggagttgaagatgcttttggaagttgccttaaagaatagacaagagctgtatgcactacctcctcctccccagttctactcaagccttattgaagagataggaactcttggttgggataaacttgtgtatgcggatacctgcttcagtaccatcaagttaaaagcagaagatgcttctggtagagagcatttaatcactctcaagttgaaggcaaagtatcctgcagaatcaccagattattttgtggattttcctgttccattttgtgcctcctggacacctcagagctccttaataagcatttatagtcagtttttggcagcaatagaatcactaaaggcattctgggatgttatggatgaaatcgatgagaagacctgggtacttgagccagaaaaacctccacggagtgcaacagcacgcagaattgcattaggtaataatgtttccataaatatagaggtagaccccaggcatcctactatgcttcctgagtgcttctttcttggagctgaccatgtggtaaaacccctgggaattaagctgagcaggaacatacatttgtgggatccagaaaatagtgtgttacaaaatttgaaagatgttttagaaattgattttccagctcgtgctatcctggaaaaatctgattttactatggattgtggaatttgttatgcttatcaacttgacggtaccattcctgatcaagtgtgtgataattctcagtgtggacaacctttccatcaaatatgcttatatgagtggctgagaggactactaactagtagacagagttttaacatcatatttggtgaatgtccatattgtagtaagccaattaccttaaaaatgtctggaaggaaacactgaaataagaatacaacatttcggtgaagagctggaaacttaaaaaattatcaaaaggaattttggtatcatcttcagagaaaaaataaagcaagaaatactaacatcaaaaggacaggtatgatgatgcgataataataaacatctgcgtttgtctcttcactaagagtaaactgggaaattgtaggccaaagtccagttgaactttctaagtctgtgatccccgtgctgactgtggaagtgtatttataccaagatggagatcttgacttcttgaatatatctggactggtaaaatcttgatgaggctcataaaatgagtttgggaattgtgtatagctgattttttgtgggaaactgtttacttcattcaaaggttcttgagactcttgatatttctgtcttctccttgtgctttcctatggaaaaaatacatatatagtttagtttgttagacgtgagttatccaagtatttattttgtgtagtgtgtaagaatgctaaataaaatgttatacaaga

SEQ ID NO: 133133 - DNA, 849 bp, Homo sapiens
  Payload ID: 6017
  Gene Symbol: FANCL
  Gene Name: Fanconi anemia, complementation group L
  ENST ID: ENST00000403676
  CDS Start-End: 63-839
ggaagcgagcctgttgcgccagtgccccctgcttctgccccagaaccggtcgaaaaccgtgtatgagggattcatctcggctcagacttgtgtatgcggatacctgcttcagtaccatcaagttaaaagcagaagatgcttctggtagagagcatttaatcactctcaagttgaaggcaaagtatcctgcagaatcaccagattattttgtggattttcctgttccattttgtgcctcctggacacctcagagctccttaataagcatttatagtcagtttttggcagcaatagaatcactaaaggcattctgggatgttatggatgaaatcgatgagaagacctgggtacttgagccagaaaaacctccacggagtgcaacagcacgcagaattgcattaggtaataatgtttccataaatatagaggtagaccccaggcatcctactatgcttcctgagtgcttctttcttggagctgaccatgtggtaaaacccctgggaattaagctgagcaggaacatacatttgtgggatccagaaaatagtgtgttacaaaatttgaaagatgttttagaaattgattttccagctcgtgctatcctggaaaaatctgattttactatggattgtggaatttgttatgcttatcaacttgacggtaccattcctgatcaagtgtgtgataattctcagtgtggacaacctttccatcaaatatgcttatatgagtggctgagaggactactaactagtagacagagttttaacatcatatttggtgaatgtccatattgtagtaagccaattaccttaaaaatgtctggaaggaaacactgaaataagaata

SEQ ID NO: 133134 - DNA, 1698 bp, Homo sapiens
  Payload ID: 6017
  Gene Symbol: FANCL
  Gene Name: Fanconi anemia, complementation group L
  Uniprot ID: Q9NW38
  ENST ID: ENST00000402135
  CDS Start-End: 38-1180
gtctagagcttttctgtgtttctccggacttcgagccatggcggtgacggaagcgagcctgttgcgccagtgccccctgcttctgccccagaaccggtcgaaaaccgtgtatgagggattcatctcggctcagggaagagacttccaccttaggatagtgttgcctgaagatttacaactgaagaatgcaagattattatgtagttggcagctgagaacaatacttagtggataccatcgaatagtacaacagagaatgcagcactctcctgatctaatgagctttatgatggagttgaagatgcttttggaagttgccttaaagaatagacaagagctgtatgcactacctcctcctccccagttctactcaagccttattgaagagataggaactcttggttgggataaacttgtgtatgcggatacctgcttcagtaccatcaagttaaaagcagaagatgcttctggtagagagcatttaatcactctcaagttgaaggcaaagtatcctgcagaatcaccagattattttgtggattttcctgttccattttgtgcctcctggacacctcaggtaaattctcctcagagctccttaataagcatttatagtcagtttttggcagcaatagaatcactaaaggcattctgggatgttatggatgaaatcgatgagaagacctgggtacttgagccagaaaaacctccacggagtgcaacagcacgcagaattgcattaggtaataatgtttccataaatatagaggtagaccccaggcatcctactatgcttcctgagtgcttctttcttggagctgaccatgtggtaaaacccctgggaattaagctgagcaggaacatacatttgtgggatccagaaaatagtgtgttacaaaatttgaaagatgttttagaaattgattttccagctcgtgctatcctggaaaaatctgattttactatggattgtggaatttgttatgcttatcaacttgacggtaccattcctgatcaagtgtgtgataattctcagtgtggacaacctttccatcaaatatgcttatatgagtggctgagaggactactaactagtagacagagttttaacatcatatttggtgaatgtccatattgtagtaagccaattaccttaaaaatgtctggaaggaaacactgaaataagaatacaacatttcggtgaagagctggaaacttaaaaaattatcaaaaggaattttggtatcatcttcagagaaaaaataaagcaagaaatactaacatcaaaaggacaggtatgatgatgcgataataataaacatctgcgtttgtctcttcactaagagtaaactgggaaattgtaggccaaagtccagttgaactttctaagtctgtgatccccgtgctgactgtggaagtgtatttataccaagatggagatcttgacttcttgaatatatctggactggtaaaatcttgatgaggctcataaaatgagtttgggaattgtgtatagctgattttttgtgggaaactgtttacttcattcaaaggttcttgagactcttgatatttctgtcttctccttgtgctttcctatggaaaaaatacatatatagtttagtttgttagacgtgagttatccaagtatttattttgtgtagtgtgtaagaatgctaaataaaatgttatacaaga

SEQ ID NO: 133135 - DNA, 1576 bp, Homo sapiens
  Payload ID: 6017
  Gene Symbol: FANCL
  Gene Name: Fanconi anemia, complementation group L
  ENST ID: ENST00000403295
  CDS Start-End: 11-1054
acttcgagccatggcggtgacggaagcgagcctgttgcgccagtgccccctgcttctgccccagaaccggtcgaaaaccgtgtatgagggattcatctcggctcagggaagagacttccaccttaggatagtgttgcctgaagatttacaactgaagaatgcaagattattatgtagttggcagctgagaacaatacttagtggataccatcgaatagtacaacagagaatgcagcactctcctgatctaatgagctttatgatggagttgaagatgcttttggaagttgccttaaagaatagacaagagctgtatgcactacctcctcctccccagttctactcaagccttattgaagagataggaactcttggttgggataaacttgtgtatgcggatacctgcttcagtaccatcaagttaaaagcagaagatgcttctggtagagagcatttaatcactctcaagttgaaggcaaagtatcctgcagaatcaccagattattttgtggattttcctgttccattttgtgcctcctggacacctcagagctccttaataagcatttatagtcagtttttggcagcaatagaatcactaaaggcattctgggatgttatggatgaaatcgatgagaagacctgggtacttgagccagaaaaacctccacggagtgcaacagcacgcagaattgcattagtggtaaaacccctgggaattaagctgagcaggaacatacatttgtgggatccagaaaatagtgtgttacaaaatttgaaagatgttttagaaattgattttccagctcgtgctatcctggaaaaatctgattttactatggattgtggaatttgttatgcttatcaacttgacggtaccattcctgatcaagtgtgtgataattctcagtgtggacaacctttccatcaaatatgcttatatgagtggctgagaggactactaactagtagacagagttttaacatcatatttggtgaatgtccatattgtagtaagccaattaccttaaaaatgtctggaaggaaacactgaaataagaatacaacatttcggtgaagagctggaaacttaaaaaattatcaaaaggaattttggtatcatcttcagagaaaaaataaagcaagaaatactaacatcaaaaggacaggtatgatgatgcgataataataaacatctgcgtttgtctcttcactaagagtaaactgggaaattgtaggccaaagtccagttgaactttctaagtctgtgatccccgtgctgactgtggaagtgtatttataccaagatggagatcttgacttcttgaatatatctggactggtaaaatcttgatgaggctcataaaatgagtttgggaattgtgtatagctgattttttgtgggaaactgtttacttcattcaaaggttcttgagactcttgatatttctgtcttctccttgtgctttcctatggaaaaaatacatatatagtttagtttgttagacgtgagttatccaagtatttattttgtgtagtgtgtaagaatgctaaataaaatgttatacaagatcaa

SEQ ID NO: 133136 - DNA, 545 bp, Homo sapiens
  Payload ID: 6017
  Gene Symbol: FANCL
  Gene Name: Fanconi anemia, complementation group L
  ENST ID: ENST00000417361
  CDS Start-End: 109-545
ctagagcttttctgtgtttctccggacttcgagccatggcggtgacggaagcgagcctgttgcgccagtgccccctgcttctgccccagaaccggtcgaaaaccgtgtatgagggattcatctcggctcagacttgtgtatgcggatacctgcttcagtaccatcaagttaaaagcagaagatgcttctggtagagagcatttaatcactctcaagttgaaggcaaagtatcctgcagaatcaccagattattttgtggattttcctgttccattttgtgcctcctggacacctcaggtaaattctcctcagagctccttaataagcatttatagtcagtttttggcagcaatagaatcactaaaggcattctgggatgttatggatgaaatcgatgagaagacctgggtacttgagccagaaaaacctccacggagtgcaacagcacgcagaattgcattaggtaataatgtttccataaatatagaggtagaccccaggcatcctactatgcttcctgagtgcttctttcttggagctgacca

SEQ ID NO: 133137 - DNA, 487 bp, Homo sapiens
  Payload ID: 6017
  Gene Symbol: FANCL
  Gene Name: Fanconi anemia, complementation group L
  ENST ID: ENST00000446381
  CDS Start-End: 13-487
ggacttcgagccatggcggtgacggaagcgagcctgttgcgccagtgccccctgcttctgccccagaaccggtcgaaaaccgtgtatgagggattcatctcggctcagagctccttaataagcatttatagtcagtttttggcagcaatagaatcactaaaggcattctgggatgttatggatgaaatcgatgagaagacctgggtacttgagccagaaaaacctccacggagtgcaacagcacgcagaattgcattaggtaataatgtttccataaatatagaggtagaccccaggcatcctactatgcttcctgagtgcttctttcttggagctgaccatgtggtaaaacccctgggaattaagctgagcaggaacatacatttgtgggatccagaaaatagtgtgttacaaaatttgaaagatgttttagaaattgattttccagctcgtgctatcctggaaaaatctgattttactatggatt

SEQ ID NO: 133138 - DNA, 864 bp, Homo sapiens
  Payload ID: 6017
  Gene Symbol: FANCL
  Gene Name: Fanconi anemia, complementation group L
  ENST ID: ENST00000427708
  CDS Start-End: 1-864
ggcggtgacggaagcgagcctgttgcgccagtgccccctgcttctgccccagaaccggtcgaaaaccgtgtatgagggattcatctcggctcagggaagagacttccaccttaggatagtgttgcctgaagatttacaactgaagaatgcaagattattatgtagttggcagctgagaacaatacttagtggataccatcgaatagtacaacagagaatgcagcactctcctgatctaatgagctttatgatggagttgaagatgcttttggaagttgccttaaagaatagacaagagctgtatgcactacctcctcctccccagttctactcaagccttattgaagagataggaactcttggttgggataaacttgtgtatgcggatacctgcttcagtaccatcaagttaaaagcagaagatgcttctggtagagagcatttaatcactctcaagttgaaggcaaagtatcctgcagaatcaccagattattttgtggattttcctgttccattttgtgcctcctggacacctcaggtcactgatcaagcaaaaatggatgtgaaaattgcggttttgcctagctccttaataagcatttatagtcagtttttggcagcaatagaatcactaaaggcattctgggatgttatggatgaaatcgatgagaagacctgggtacttgagccagaaaaacctccacggagtgcaacagcacgcagaattgcattaggtaataatgtttccataaatatagaggtagaccccaggcatcctactatgcttcctgagtgcttctttcttggagctgaccatgtggtaaaacccctgggaattaagctgagcaggaacatacatttgtg

SEQ ID NO: 133139 - DNA, 964 bp, Homo sapiens
  Payload ID: 6017
  Gene Symbol: FANCL
  Gene Name: Fanconi anemia, complementation group L
  ENST ID: ENST00000449070
  CDS Start-End: 60-964
gcgcatgtgcaggacccagcaggtctagagcttttctgtgtttctccggacttcgagccatggcggtgacggaagcgagcctgttgcgccagtgccccctgcttctgccccagaaccggtcgaaaaccgtgtatgagggattcatctcggctcaggaagttgccttaaagaatagacaagagctgtatgcactacctcctcctccccagttctactcaagccttattgaagagataggaactcttggttgggataaacttgtgtatgcggatacctgcttcagtaccatcaagttaaaagcagaagatgcttctggtagagagcatttaatcactctcaagttgaaggcaaagtatcctgcagaatcaccagattattttgtggattttcctgttccattttgtgcctcctggacacctcagagctccttaataagcatttatagtcagtttttggcagcaatagaatcactaaaggcattctgggatgttatggatgaaatcgatgagaagacctgggtacttgagccagaaaaacctccacggagtgcaacagcacgcagaattgcattaggtaataatgtttccataaatatagaggtagaccccaggcatcctactatgcttcctgagtgcttctttcttggagctgaccatgtggtaaaacccctgggaattaagctgagcaggaacatacatttgtgggatccagaaaatagtgtgttacaaaatttgaaagatgttttagaaattgattttccagctcgtgctatcctggaaaaatctgattttactatggattgtggaatttgttatgcttatcaacttgacggtaccattcctgatcaagtgtgtgataattctcagtgtggacaacctttccatcaaatatgcttatatgagtggctgagaggactactaactagtagacagagttttaacatcatatttggtgaatgtccata

SEQ ID NO: 133140 - DNA, 522 bp, Homo sapiens
  Payload ID: 6017
  Gene Symbol: FANCL
  Gene Name: Fanconi anemia, complementation group L
  ENST ID: ENST00000481670
  CDS Start-End: 1-375
aaccggtcgaaaaccgtgtatgagggattcatctcggctcagggaagagacttccaccttaggatagtgttgcctgaagatttacaactgaagaatgcaagattattatgtagttggcagctgagaacaatacttagtggataccatcgaatagtacaacagagaatgcagcactctcctgatctaatgagctttatgatggagttgaagatgcttttggaagttgccttaaagaatagacaagagctgtatgcactacctcctcctccccagttctactcaagccttattgaagagataggaactcttggttgggataaagacaaggttttgctgtattgcccaggcgagtctcacactcctgggctgaaatgattctcctgcctcagcctcccaaaatgctgggattaacaggtgttcgctgccatgcctggcctaggatgaataaatgactttcgatttagctgctgttacttaatcatttgttttatactgtttaaaaataaagaatgttttagcaga

SEQ ID NO: 133141 - DNA, 7111 bp, Homo sapiens
  Payload ID: 6018
  Gene Symbol: FANCM
  Gene Name: Fanconi anemia, complementation group M
  Uniprot ID: Q8IYD8
  ENST ID: ENST00000267430
  CDS Start-End: 86-6232
ggaaaccgatggggatcggaaccgtagcggttgagctgctgctgctacggatatctgacagaagccttcggtggttgtcggcctaatgagcggacggcaaagaacgctttttcagacgtggggctcaagtatctcccgatcatctgggactccgggttgcagctccggaactgagcgacctcagagccctggcagctccaaggcgcctttgccagcagcagcggaggctcagctggagtcggacgatgatgtgttgcttgtcgcggcgtacgaggctgagcggcagttgtgtctagagaatggcgggttctgcacctccgcgggcgccctgtggatttaccctaccaattgcccagtgcgggactaccagctgcacatttcccgggctgctctgttttgcaatacgctggtgtgtctgcctaccggactgggaaagacctttattgccgccgtggtcatgtacaatttctaccgctggttcccttcaggaaaggtggtcttcatggccccaacgaaacccttggtgacacagcagatcgaggcttgctaccaggtgatgggtatcccgcaatcccacatggccgaaatgacagggtctacacaagcttccaccaggaaggaaatatggtgcagtaagagagtgctttttcttacacctcaggtcatggtaaatgacctttctagaggagcttgtcccgctgctgaaataaagtgtttagttattgatgaagctcataaagctctcggaaactatgcttattgccaggttgtaagagaactagtcaaatatacaaatcactttagaatcttggctctaagtgccacaccaggtagtgatataaaggctgtgcaacaagttattactaacctgctaattgggcagatagagcttcgttctgaagattctccagatattttgacatattctcatgaaagaaaagttgaaaagcttattgttccgcttggtgaagaacttgcagccatccaaaagacctatatccagattttggaatcatttgctcgttctttgattcagaggaatgttttgatgagaagggatatcccaaatctaacaaaatatcagataattctggcaagagatcagtttaggaaaaacccatctccgaatattgtgggaatacaacaaggcataatcgagggagagtttgctatttgtattagtttatatcatggttatgaattattgcagcaaatgggaatgagatcattatatttcttcctttgtggaattatggatggaactaaagggatgacacggtcaaaaaatgaacttggccgaaatgaagacttcatgaaactctataatcatctagagtgtatgtttgcacgtacacgtagtacttcagcaaatggtatttctgctatccaacaaggagataaaaataaaaaatttgtttatagtcatccaaagttaaagaaattagaagaagttgtaattgaacacttcaagtcatggaatgctgaaaacactactgaaaagaaacgtgatgagacccgagttatgatcttctcttcatttcgagatagtgttcaagaaattgcagaaatgctttcacagcatcagccaattattagagtaatgacttttgtcggccatgcctcagggaaaagcacgaagggttttacccagaaggagcaactggaggtagtgaaacagtttcgtgacggtggttacaacacgctggtttctacctgtgtgggtgaagaaggtttggatataggagaagttgatcttataatatgttttgattcccagaagagcccaattcgtcttgtacaacgaatgggtagaactggccgtaaacgtcaaggcaggatagttattatcctttctgaaggacgagaggaacgtatttataatcagagtcagtccaacaaaagaagtatatataaagctatttcaagtaacaggcaggtccttcatttttaccaaagaagtccacgaatggttcctgatggaatcaacccaaaattacacaaaatgttcatcacacatggtgtctatgaaccagagaagccttctcggaacttgcagcgaaagtcatctatcttttcctatagggatggaatgaggcaaagtagcctaaagaaagattggttcttatcagaagaagaatttaaattatggaacagactttatagattaagggacagtgatgaaattaaagagataacattgcctcaagttcagttttcttctttacaaaatgaggaaaacaaaccagctcaagaatcaaccactggaattcatcaactctctctctctgaatggagactgtggcaagatcatcctttgcctacacatcaagttgatcactcagatcgatgccgccattttataggccttatgcaaatgatagagggaatgagacacgaagagggagaatgcagctatgaattggaagttgaatcttatttacaaatggaagatgttacctcaacatttattgctcccaggaatgaatctaataatcttgccagtgacacctttatcactcacaagaaatcgtcatttataaagaacataaatcaaggcagttcatcctcagtgatagaatctgatgaagaatgtgctgaaattgttaaacaaactcatatcaaacctactaaaattgtttctttaaagaaaaaagtgtctaaagaaataaaaaaagatcagcttaaaaaagaaaataatcacggtattatagattctgtagataatgacagaaattccactgttgaaaatatttttcaagaagacctaccaaatgataaaaggacatcagatacagatgaaattgctgccacatgtactattaatgaaaatgttattaaagaaccgtgtgtgttattaacagagtgtcagtttacaaataaatccactagttcacttgctggaaatgttttagattctggttataacagtttcaatgatgaaaaatctgtttcatctaacttatttcttccattcgaagaagagctttatattgttagaacagatgaccaattttataattgtcactcattgacaaaagaggtactagctaatgtagagagatttttatcttattctcctccgcctctcagtggactctcagacttggaatatgaaattgctaagggtactgcacttgagaatttgcttttcttaccctgtgcagagcatttacgaagtgataaatgcacctgtttgctgtcacattcagctgtgaattctcaacagaatttagaattgaattcacttaaatgtataaattatccatctgaaaaaagttgcctttatgatatacctaatgataatatttctgatgagccaagtctctgtgactgtgatgtacataaacataatcaaaatgaaaatttagtacctaacaatcgtgttcaaatacacagaagccctgcacagaatttagttggagagaacaatcatgatgttgataacagtgacctcccagtattgtccactgatcaagatgaaagtttgctgttatttgaagatgttaatacagagttcgacgatgtgagtctttcacccttgaacagtaaaagcgaatctttacctgtgtcagacaaaactgctattagtgaaacgcctctggtctctcagttcttaatttctgatgaacttttgttggacaataattctgaactccaagatcaaatcacccgtgatgctaatagttttaaatctcgtgatcagagaggtgtacaggaagaaaaagtgaagaatcatgaggatatttttgattgctctagggatttattttctgttacctttgatttaggattctgtagtccagattctgatgatgaaatattggaacatacatcagatagcaatagacctctagatgatctatatggaaggtatttggaaattaaggagataagtgatgcaaattatgtttcgaatcaagcactaataccaagagatcatagtaaaaattttactagtggaactgttattatcccatcaaatgaagatatgcagaatccaaattatgtacatttgccactgagtgcagcaaaaaatgaagaattgttatctcctggttattctcagttttctttaccagtgcaaaaaaaagttatgagtacaccactctctaaatcaaacacattgaactcattttctaagataagaaaggaaatacttaagacaccagattctagtaaggaaaaagtaaacctacaaagattcaaagaagcattgaattcaacttttgattattcagaattttctctagaaaagtctaaaagcagtggtccaatgtatctgcataaatcctgtcattctgttgaagatggacaattattaacaagtaacgaaagtgaagatgacgagattttccgaagaaaagttaaaagagcaaaaggaaatgttttaaactctcctgaggatcagaaaaatagtgaagttgattctccacttcatgctgtcaaaaagcgcagatttcctataaacagatcagaattatcatctagtgatgagagtgagaattttcccaaaccatgttcacaattagaagacttcaaggtttgtaacgggaatgccagaagaggcatcaaagtcccaaagagacagagtcacttaaagcatgtagctaggaagtttttagatgatgaagcagaactttctgaagaagatgcagaatatgtttcatcagatgaaaatgatgagtcagaaaatgaacaagattcctcattacttgactttttaaatgatgaaactcaactttcacaggctataaatgattctgaaatgagagctatttacatgaaatctttgcgtagtccaatgatgaacaataagtacaaaatgattcataagacacataaaaacataaacattttctcgcagattcctgaacaagatgaaacctatttagaggatagtttttgtgttgatgaagaggagtcttgcaaaggccaatcaagtgaagaagaagtttgtgttgattttaacttaataactgatgattgctttgcaaatagtaaaaagtataaaactcgacgtgcagtaatgctaaaagaaatgatggaacaaaattgtgcacattcaaaaaagaaattatccagaattattttaccagatgattcaagtgaggaggagaacaatgtaaatgataaaagagaatctaatattgcggttaacccaagcactgttaagaagaacaaacaacaggaccattgtttaaattcagtgccttctggatcttctgcgcagtccaaggtgcgttctactccaagagttaatccattagcaaagcagagcaaacagacatcgctgaatttaaaggatacaatttccgaagtctcagacttcaaacctcagaatcataatgaagtccagtctaccacaccacccttcactactgttgattcacagaaagactgtagaaaatttccagttccacagaaggatggtagtgctttggaggattctagcacttcaggggcatcctgttccaagtcaagaccacatttagctgggacacatacttctcttagacttccgcaggaaggaaaaggaacctgtattcttgtaggtggtcatgaaatcacttctggattagaagtaatttcttccctaagagcaattcatgggttgcaagtagaagtttgtcctcttaatggctgtgattacatcgtgagtaatcgcatggtggtggaaaggaggtctcaatctgagatgttaaatagtgtcaataagaacaagttcattgagcagatccagcacctgcagagtatgtttgaaagaatatgtgtgattgtggaaaaggacagagaaaaaacaggagacacatcaaggatgtttaggagaacaaagagctatgacagcctgctgactaccttaattggcgctggaatccgaattcttttcagttcctgccaagaagaaaccgcagatttgctaaaggaactgtctttagtggaacaaagaaagaatgttggtattcatgttccaacagtggtgaatagtaataaaagtgaggcactccagttttatttaagtattcccaatataagttatataactgcattaaatatgtgtcaccagttttcatctgtgaaaaggatggctaacagctcacttcaagaaatctccatgtatgcacaagtaactcatcagaaggctgaggagatctatagatatattcactatgtatttgacatacaaatgttaccaaatgatcttaaccaagatagactgaaatctgatatataatcaagctgctcaagatggggttttcaaagacctctcacaatattaaatgcacttcaataatcattgctgttttatgtttatttgtaaataagagaatattttatttaaatattttatattgtatacatttttatttatagattatagaaattattaaaaaagaaaaatctgatgttcagtgatcattttgactagattataaaactaatttttcttattaaataaaacaaggtttattaaaagtgttactaaggatagtttaagaaagtaaaagctaagctagagatatactttggaatgtttcccaaaattaaagttgtactgttgtgataaatagtaaagttgacatgtctatgactacagccaacttgtcgattttccctatgtgtagatagtatacttttaagtgtactgattctaaatacatgtacttggtaaggtgtgggtgatgggtgggttgtgagataaatgacccagtaactaggaaagtagaaaacttaactgaatgtttatctgaccaaaggtgtgtcccagttaagtactgtcaaatctattaatatgaactctgatatggtttggctgtgtccccaaccaaaatctcatcttgacttgtaatctgaattataatcccaatatattggggagggacctcctggaacgtgattagctcatgggggcggttcccccatgctgttctagtgatagttctcagaggatctgatggttttataagcttttcctctgttcactctgcagttctcttgcctactgccatgtggaaaaggaaacgtttgcttcccctccaccatgattgtaagttcccgaggcctccccagccatgcaggactgtgagtcaattaaacatcttttccttataaa

SEQ ID NO: 133142 - DNA, 6167 bp, Homo sapiens
  Payload ID: 6018
  Gene Symbol: FANCM
  Gene Name: Fanconi anemia, complementation group M
  Uniprot ID: Q8IYD8
  ENST ID: ENST00000542564
  CDS Start-End: 79-6147
gatggggatcggaaccgtagcggttgagctgctgctgctacggatatctgacagaagccttcggtggttgtcggcctaatgagcggacggcaaagaacgctttttcagacgtggggctcaagtatctcccgatcatctgggactccgggttgcagctccggaactgagcgacctcagagccctggcagctccaaggcgcctttgccagcagcagcggaggctcagctggagtcggacgatgatgtgttgcttgtcgcggcgtacgaggctgagcggcagttgtgtctagagaatggcgggttctgcacctccgcgggcgccctgtggatttaccctaccaattgcccagtgcgggactaccagctgcacatttcccgggctgctctgttttgcaatacgctggtgtgtctgcctaccggactgggaaagacctttattgccgccgtggtcatgtacaatttctaccgctggttcccttcaggaaaggtggtcttcatggccccaacgaaacccttggtgacacagcagatcgaggcttgctaccaggtgatgggtatcccgcaatcccacatggccgaaatgacagggtctacacaagcttccaccaggaaggaaatatggtgcagtaagagagtgctttttcttacacctcaggtcatggtaaatgacctttctagaggagcttgtcccgctgctgaaataaagtgtttagttattgatgaagctcataaagctctcggaaactatgcttattgccaggctgtgcaacaagttattactaacctgctaattgggcagatagagcttcgttctgaagattctccagatattttgacatattctcatgaaagaaaagttgaaaagcttattgttccgcttggtgaagaacttgcagccatccaaaagacctatatccagattttggaatcatttgctcgttctttgattcagaggaatgttttgatgagaagggatatcccaaatctaacaaaatatcagataattctggcaagagatcagtttaggaaaaacccatctccgaatattgtgggaatacaacaaggcataatcgagggagagtttgctatttgtattagtttatatcatggttatgaattattgcagcaaatgggaatgagatcattatatttcttcctttgtggaattatggatggaactaaagggatgacacggtcaaaaaatgaacttggccgaaatgaagacttcatgaaactctataatcatctagagtgtatgtttgcacgtacacgtagtacttcagcaaatggtatttctgctatccaacaaggagataaaaataaaaaatttgtttatagtcatccaaagttaaagaaattagaagaagttgtaattgaacacttcaagtcatggaatgctgaaaacactactgaaaagaaacgtgatgagacccgagttatgatcttctcttcatttcgagatagtgttcaagaaattgcagaaatgctttcacagcatcagccaattattagagtaatgacttttgtcggccatgcctcagggaaaagcacgaagggttttacccagaaggagcaactggaggtagtgaaacagtttcgtgacggtggttacaacacgctggtttctacctgtgtgggtgaagaaggtttggatataggagaagttgatcttataatatgttttgattcccagaagagcccaattcgtcttgtacaacgaatgggtagaactggccgtaaacgtcaaggcaggatagttattatcctttctgaaggacgagaggaacgtatttataatcagagtcagtccaacaaaagaagtatatataaagctatttcaagtaacaggcaggtccttcatttttaccaaagaagtccacgaatggttcctgatggaatcaacccaaaattacacaaaatgttcatcacacatggtgtctatgaaccagagaagccttctcggaacttgcagcgaaagtcatctatcttttcctatagggatggaatgaggcaaagtagcctaaagaaagattggttcttatcagaagaagaatttaaattatggaacagactttatagattaagggacagtgatgaaattaaagagataacattgcctcaagttcagttttcttctttacaaaatgaggaaaacaaaccagctcaagaatcaaccactggaattcatcaactctctctctctgaatggagactgtggcaagatcatcctttgcctacacatcaagttgatcactcagatcgatgccgccattttataggccttatgcaaatgatagagggaatgagacacgaagagggagaatgcagctatgaattggaagttgaatcttatttacaaatggaagatgttacctcaacatttattgctcccaggaatgaatctaataatcttgccagtgacacctttatcactcacaagaaatcgtcatttataaagaacataaatcaaggcagttcatcctcagtgatagaatctgatgaagaatgtgctgaaattgttaaacaaactcatatcaaacctactaaaattgtttctttaaagaaaaaagtgtctaaagaaataaaaaaagatcagcttaaaaaagaaaataatcacggtattatagattctgtagataatgacagaaattccactgttgaaaatatttttcaagaagacctaccaaatgataaaaggacatcagatacagatgaaattgctgccacatgtactattaatgaaaatgttattaaagaaccgtgtgtgttattaacagagtgtcagtttacaaataaatccactagttcacttgctggaaatgttttagattctggttataacagtttcaatgatgaaaaatctgtttcatctaacttatttcttccattcgaagaagagctttatattgttagaacagatgaccaattttataattgtcactcattgacaaaagaggtactagctaatgtagagagatttttatcttattctcctccgcctctcagtggactctcagacttggaatatgaaattgctaagggtactgcacttgagaatttgcttttcttaccctgtgcagagcatttacgaagtgataaatgcacctgtttgctgtcacattcagctgtgaattctcaacagaatttagaattgaattcacttaaatgtataaattatccatctgaaaaaagttgcctttatgatatacctaatgataatatttctgatgagccaagtctctgtgactgtgatgtacataaacataatcaaaatgaaaatttagtacctaacaatcgtgttcaaatacacagaagccctgcacagaatttagttggagagaacaatcatgatgttgataacagtgacctcccagtattgtccactgatcaagatgaaagtttgctgttatttgaagatgttaatacagagttcgacgatgtgagtctttcacccttgaacagtaaaagcgaatctttacctgtgtcagacaaaactgctattagtgaaacgcctctggtctctcagttcttaatttctgatgaacttttgttggacaataattctgaactccaagatcaaatcacccgtgatgctaatagttttaaatctcgtgatcagagaggtgtacaggaagaaaaagtgaagaatcatgaggatatttttgattgctctagggatttattttctgttacctttgatttaggattctgtagtccagattctgatgatgaaatattggaacatacatcagatagcaatagacctctagatgatctatatggaaggtatttggaaattaaggagataagtgatgcaaattatgtttcgaatcaagcactaataccaagagatcatagtaaaaattttactagtggaactgttattatcccatcaaatgaagatatgcagaatccaaattatgtacatttgccactgagtgcagcaaaaaatgaagaattgttatctcctggttattctcagttttctttaccagtgcaaaaaaaagttatgagtacaccactctctaaatcaaacacattgaactcattttctaagataagaaaggaaatacttaagacaccagattctagtaaggaaaaagtaaacctacaaagattcaaagaagcattgaattcaacttttgattattcagaattttctctagaaaagtctaaaagcagtggtccaatgtatctgcataaatcctgtcattctgttgaagatggacaattattaacaagtaacgaaagtgaagatgacgagattttccgaagaaaagttaaaagagcaaaaggaaatgttttaaactctcctgaggatcagaaaaatagtgaagttgattctccacttcatgctgtcaaaaagcgcagatttcctataaacagatcagaattatcatctagtgatgagagtgagaattttcccaaaccatgttcacaattagaagacttcaaggtttgtaacgggaatgccagaagaggcatcaaagtcccaaagagacagagtcacttaaagcatgtagctaggaagtttttagatgatgaagcagaactttctgaagaagatgcagaatatgtttcatcagatgaaaatgatgagtcagaaaatgaacaagattcctcattacttgactttttaaatgatgaaactcaactttcacaggctataaatgattctgaaatgagagctatttacatgaaatctttgcgtagtccaatgatgaacaataagtacaaaatgattcataagacacataaaaacataaacattttctcgcagattcctgaacaagatgaaacctatttagaggatagtttttgtgttgatgaagaggagtcttgcaaaggccaatcaagtgaagaagaagtttgtgttgattttaacttaataactgatgattgctttgcaaatagtaaaaagtataaaactcgacgtgcagtaatgctaaaagaaatgatggaacaaaattgtgcacattcaaaaaagaaattatccagaattattttaccagatgattcaagtgaggaggagaacaatgtaaatgataaaagagaatctaatattgcggttaacccaagcactgttaagaagaacaaacaacaggaccattgtttaaattcagtgccttctggatcttctgcgcagtccaaggtgcgttctactccaagagttaatccattagcaaagcagagcaaacagacatcgctgaatttaaaggatacaatttccgaagtctcagacttcaaacctcagaatcataatgaagtccagtctaccacaccacccttcactactgttgattcacagaaagactgtagaaaatttccagttccacagaaggatggtagtgctttggaggattctagcacttcaggggcatcctgttccaagtcaagaccacatttagctgggacacatacttctcttagacttccgcaggaaggaaaaggaacctgtattcttgtaggtggtcatgaaatcacttctggattagaagtaatttcttccctaagagcaattcatgggttgcaagtagaagtttgtcctcttaatggctgtgattacatcgtgagtaatcgcatggtggtggaaaggaggtctcaatctgagatgttaaatagtgtcaataagaacaagttcattgagcagatccagcacctgcagagtatgtttgaaagaatatgtgtgattgtggaaaaggacagagaaaaaacaggagacacatcaaggatgtttaggagaacaaagagctatgacagcctgctgactaccttaattggcgctggaatccgaattcttttcagttcctgccaagaagaaaccgcagatttgctaaaggaactgtctttagtggaacaaagaaagaatgttggtattcatgttccaacagtggtgaatagtaataaaagtgaggcactccagttttatttaagtattcccaatataagttatataactgcattaaatatgtgtcaccagttttcatctgtgaaaaggatggctaacagctcacttcaagaaatctccatgtatgcacaagtaactcatcagaaggctgaggagatctatagatatattcactatgtatttgacatacaaatgttaccaaatgatcttaaccaagatagactgaaatctgatatataatcaagctgctcaagatgggg

SEQ ID NO: 133143 - DNA, 2354 bp, Homo sapiens
  Payload ID: 6018
  Gene Symbol: FANCM
  Gene Name: Fanconi anemia, complementation group M
  Uniprot ID: Q8IYD8
  ENST ID: ENST00000556036
  CDS Start-End: 93-2102
gtgcgaaggaaaccgatggggatcggaaccgtagcggttgagctgctgctgctacggatatctgacagaagccttcggtggttgtcggcctaatgagcggacggcaaagaacgctttttcagacgtggggctcaagtatctcccgatcatctgggactccgggttgcagctccggaactgagcgacctcagagccctggcagctccaaggcgcctttgccagcagcagcggaggctcagctggagtcggacgatgatgtgttgcttgtcgcggcgtacgaggctgagcggcagttgtgtctagagaatggcgggttctgcacctccgcgggcgccctgtggatttaccctaccaattgcccagtgcgggactaccagctgcacatttcccgggctgctctgttttgcaatacgctggtgtgtctgcctaccggactgggaaagacctttattgccgccgtggtcatgtacaatttctaccgctggttcccttcaggaaaggtggtcttcatggccccaacgaaacccttggtgacacagcagatcgaggcttgctaccaggtgatgggtatcccgcaatcccacatggccgaaatgacagggtctacacaagcttccaccaggaaggaaatatggtgcagtaagagagtgctttttcttacacctcaggtcatggtaaatgacctttctagaggagcttgtcccgctgctgaaataaagtgtttagttattgatgaagctcataaagctctcggaaactatgcttattgccaggttgtaagagaactagtcaaatatacaaatcactttagaatcttggctctaagtgccacaccaggtagtgatataaaggctgtgcaacaagttattactaacctgctaattgggcagatagagcttcgttctgaagattctccagatattttgacatattctcatgaaagaaaagttgaaaagcttattgttccgcttggtgaagaacttgcagccatccaaaagacctatatccagattttggaatcatttgctcgttctttgattcagaggaatgttttgatgagaagggatatcccaaatctaacaaaatatcagataattctggcaagagatcagtttaggaaaaacccatctccgaatattgtgggaatacaacaaggcataatcgagggagagtttgctatttgtattagtttatatcatggttatgaattattgcagcaaatgggaatgagatcattatatttcttcctttgtggaattatggatggaactaaagggatgacacggtcaaaaaatgaacttggccgaaatgaagacttcatgaaactctataatcatctagagtgtatgtttgcacgtacacgtagtacttcagcaaatggtatttctgctatccaacaaggagataaaaataaaaaatttgtttatagtcatccaaagttaaagaaattagaagaagttgtaattgaacacttcaagtcatggaatgctgaaaacactactgaaaagaaacgtgatgagacccgagttatgatcttctcttcatttcgagatagtgttcaagaaattgcagaaatgctttcacagcatcagccaattattagagtaatgacttttgtcggccatgcctcagggaaaagcacgaagggttttacccagaaggagcaactggaggtagtgaaacagtttcgtgacggtggttacaacacgctggtttctacctgtgtgggtgaagaaggtttggatataggagaagttgatcttataatatgttttgattcccagaagagcccaattcgtcttgtacaacgaatgggtagaactggccgtaaacgtcaaggcaggatagttattatcctttctgaaggacgagaggaacgtatttataatcagagtcagtccaacaaaagaagtatatataaagctatttcaagtaacaggcaggtccttcatttttaccaaagaagtccacgaatggttcctgatggaatcaacccaaaattacacaaaatgttcatcacacatggtgtctatgaaccagagaagccttctcggaacttgcagcgaaagtcatctatcttttcctatagggatggtaaataaattttgcatttgacacatgcatttttcccctgttcttacttagcaggtcgtatcttgatataatatttcttgtttgaaaaactgaatatatgttctaattaatatattataggcattctctttggaaaggctgtacgagattattcatgtggcaaatggagagacactggtagtatagagtgacagaaactcagtgttggggaaaattaaacataccctaccaacccagagaatgttctccataaagtttag

SEQ ID NO: 133144 - DNA, 3112 bp, Homo sapiens
  Payload ID: 6018
  Gene Symbol: FANCM
  Gene Name: Fanconi anemia, complementation group M
  ENST ID: ENST00000554809
  CDS Start-End: 1-3049
tatacctaatgataatatttctgatgagccaagtctctgtgactgtgatgtacataaacataatcaaaatgaaaatttagtacctaacaatcgtgttcaaatacacagaagccctgcacagaatttagttggagagaacaatcatgatgttgataacagtgacctcccagtattgtccactgatcaagatgaaagtttgctgttatttgaagatgttaatacagagttcgacgatgtgagtctttcacccttgaacagtaaaagcgaatctttacctgtgtcagacaaaactgctattagtgaaacgcctctggtctctcagttcttaatttctgatgaacttttgttggacaataattctgaactccaagatcaaatcacccgtgatgctaatagttttaaatctcgtgatcagagaggtgtacaggaagaaaaagtgaagaatcatgaggatatttttgattgctctagggatttattttctgttacctttgatttaggattctgtagtccagattctgatgatgaaatattggaacatacatcagatagcaatagacctctagatgatctatatggaaggtatttggaaattaaggagataagtgatgcaaattatgtttcgaatcaagcactaataccaagagatcatagtaaaaattttactagtggaactgttattatcccatcaaatgaagatatgcagaatccaaattatgtacatttgccactgagtgcagcaaaaaatgaagaattgttatctcctggttattctcagttttctttaccagtgcaaaaaaaagttatgagtacaccactctctaaatcaaacacattgaactcattttctaagataagaaaggaaatacttaagacaccagattctagtaaggaaaaagtaaacctacaaagattcaaagaagcattgaattcaacttttgattattcagaattttctctagaaaagtctaaaagcagtggtccaatgtatctgcataaatcctgtcattctgttgaagatggacaattattaacaagtaacgaaagtgaagatgacgagattttccgaagaaaagttaaaagagcaaaaggaaatgttttaaactctcctgaggatcagaaaaatagtgaagttgattctccacttcatgctgtcaaaaagcgcagatttcctataaacagatcagaattatcatctagtgatgagagtgagaattttcccaaaccatgttcacaattagaagacttcaaggtttgtaacgggaatgccagaagaggcatcaaagtcccaaagagacagagtcacttaaagcatgtagctaggaagtttttagatgatgaagcagaactttctgaagaagatgcagaatatgtttcatcagatgaaaatgatgagtcagaaaatgaacaagattcctcattacttgactttttaaatgatgaaactcaactttcacaggctataaatgattctgaaatgagagctatttacatgaaatctttgcgtagtccaatgatgaacaataagtacaaaatgattcataagacacataaaaacataaacattttctcgcagattcctgaacaagatgaaacctatttagaggatagtttttgtgttgatgaagaggagtcttgcaaaggccaatcaagtgaagaagaagtttgtgttgattttaacttaataactgatgattgctttgcaaatagtaaaaagtataaaactcgacgtgcagtaatgctaaaagaaatgatggaacaaaattgtgcacattcaaaaaagaaattatccagaattattttaccagatgattcaagtgaggaggagaacaatgtaaatgataaaagagaatctaatattgcggttaacccaagcactgttaagaagaacaaacaacaggaccattgtttaaattcagtgccttctggatcttctgcgcagtccaaggtgcgttctactccaagagttaatccattagcaaagcagagcaaacagacatcgctgaatttaaaggatacaatttccgaagtctcagacttcaaacctcagaatcataatgaagtccagtctaccacaccacccttcactactgttgattcacagaaagactgtagaaaatttccagttccacagaagaggttcggacatctagcactaatgtttcccatgccctctgcctctgcaaaaagaggagctcatggtccacaggatttggcagattactttggaaaggaaagctgggatggtagtgctttggaggattctagcacttcaggggcatcctgttccaagtcaagaccacatttagctgggacacatacttctcttagacttccgcaggaaggaaaaggaacctgtattcttgtaggtggtcatgaaatcacttctggattagaagtaatttcttccctaagagcaattcatgggttgcaagtagaagtttgtcctcttaatggctgtgattacatcgtgagtaatcgcatggtggtggaaaggaggtctcaatctgagatgttaaatagtgtcaataagaacaagttcattgagcagatccagcacctgcagagtatgtttgaaagaatatgtgtgattgtggaaaaggacagagaaaaaacaggagacacatcaaggatgtttaggagaacaaagagctatgacagcctgctgactaccttaattggcgctggaatccgaattcttttcagttcctgccaagaagaaaccgcagatttgctaaaggaactgtctttagtggaacaaagaaagaatgttggtattcatgttccaacagtggtgaatagtaataaaagtgaggcactccagttttatttaagtattcccaatataagttatataactgcattaaatatgtgtcaccagttttcatctgtgaaaaggatggctaacagctcacttcaagaaatctccatgtatgcacaagtaactcatcagaaggctgaggagatctatagatatattcactatgtatttgacatacaaatgttaccaaatgatcttaaccaagatagactgaaatctgatatataatcaagctgctcaagatggggttttcaaagacctctcacaatattaaatgcacttcaataatca

SEQ ID NO: 133145 - DNA, 448 bp, Homo sapiens
  Payload ID: 6018
  Gene Symbol: FANCM
  Gene Name: Fanconi anemia, complementation group M
  ENST ID: ENST00000555484
  CDS Start-End: 1-321
gtcaataagaacaagttcattgagcagatccagcacctgcagagtatgtttgaaagaatatgtgtgattgtggaaaaggacagagaaaaaacaggagacacatcaaggatgtttaggagaacaaagagctatgacagcctgctgactaccttaattggcgctggaatccgaattcttttcagttcctgccaagaagaaaccgcagatttgctaaaggaactgtctttagtggaacaaagaaagaatgttggtattcatgttccaacagtggtgaatagtaataaaactcacttcaagaaatctccatgtatgcacaagtaactcatcagaaggctgaggagatctatagatatattcactatgtatttgacatacaaatgttaccaaatgatcttaaccaagatagactgaaatctgatatataatcaagctgctcaagatggggttt

SEQ ID NO: 133146 - DNA, 638 bp, Homo sapiens
  Payload ID: 6018
  Gene Symbol: FANCM
  Gene Name: Fanconi anemia, complementation group M
  ENST ID: ENST00000557110
  CDS Start-End: 1-408
gatggtagtgctttggaggattctagcacttcaggggcatcctgttccaagtcaagaccacatttagctgggacacatacttctcttagacttccgcaggaaggaaaaggaacctgtattcttgtaggtggtcatgaaatcacttctggattagaagtaatttcttccctaagagcaattcatgggttgcaagtagaagtttgtcctcttaatggctgtgattacatcgtgagtaatcgcatggtggtggaaaggaggtctcaatctgagatgttaaatagtgtcaataagaacaagttcattgagcagatccagcacctgcagagtatgtttgaaagaatatgtgtgattgtggaaaaggacagagaaaaaacagttcctgccaagaagaaaccgcagatttgctaaaggaactgtctttagtggaacaaagaaagaatgttggtattcatgttccaacagtggtgaatagtaataaaagtgaggcactccagttttatttaagtattcccaatataagttatataactgcattaaatatgtgtcaccagttttcatctgtgaaaaggatggctaacagctcacttcaagaaatctccatgtatgcacaagtaactcatcagaaggctgaggagatc

SEQ ID NO: 133147 - DNA, 5577 bp, Homo sapiens
  Payload ID: 6018
  Gene Symbol: FANCM
  Gene Name: Fanconi anemia, complementation group M
  ENST ID: ENST00000556250
  CDS Start-End: 1-4695
ctagagtgtatgtttgcacgtacacgtagtacttcagcaaatggtatttctgctatccaacaaggagataaaaataaaaaatttgtttatagtcatccaaagttaaagaaattagaagaagttgtaattgaacacttcaagtcatggaatgctgaaaacactactgaaaagaaacgtgatgagacccgagttatgatcttctcttcatttcgagatagtgttcaagaaattgcagaaatgctttcacagcatcagccaattattagagtaatgacttttgtcggccatgcctcagggaaaagcacgaagggttttacccagaaggagcaactggagatttataatcagagtcagtccaacaaaagaagtatatataaagctatttcaagtaacaggcaggtccttcatttttaccaaagaagtccacgaatggttcctgatggaatcaacccaaaattacacaaaatgttcatcacacatggtgtctatgaaccagagaagccttctcggaacttgcagcgaaagtcatctatcttttcctatagggatggaatgaggcaaagtagcctaaagaaagattggttcttatcagaagaagaatttaaattatggaacagactttatagattaagggacagtgatgaaattaaagagataacattgcctcaagttcagttttcttctttacaaaatgaggaaaacaaaccagctcaagaatcaaccactggaattcatcaactctctctctctgaatggagactgtggcaagatcatcctttgcctacacatcaagttgatcactcagatcgatgccgccattttataggccttatgcaaatgatagagggaatgagacacgaagagggagaatgcagctatgaattggaagttgaatcttatttacaaatggaagatgttacctcaacatttattgctcccaggaatgaatctaataatcttgccagtgacacctttatcactcacaagaaatcgtcatttataaagaacataaatcaaggcagttcatcctcagtgatagaatctgatgaagaatgtgctgaaattgttaaacaaactcatatcaaacctactaaaattgtttctttaaagaaaaaagtgtctaaagaaataaaaaaagatcagcttaaaaaagaaaataatcacggtattatagattctgtagataatgacagaaattccactgttgaaaatatttttcaagaagacctaccaaatgataaaaggacatcagatacagatgaaattgctgccacatgtactattaatgaaaatgttattaaagaaccgtgtgtgttattaacagagtgtcagtttacaaataaatccactagttcacttgctggaaatgttttagattctggttataacagtttcaatgatgaaaaatctgtttcatctaacttatttcttccattcgaagaagagctttatattgttagaacagatgaccaattttataattgtcactcattgacaaaagaggtactagctaatgtagagagatttttatcttattctcctccgcctctcagtggactctcagacttggaatatgaaattgctaagggtactgcacttgagaatttgcttttcttaccctgtgcagagcatttacgaagtgataaatgcacctgtttgctgtcacattcagctgtgaattctcaacagaatttagaattgaattcacttaaatgtataaattatccatctgaaaaaagttgcctttatgatatacctaatgataatatttctgatgagccaagtctctgtgactgtgatgtacataaacataatcaaaatgaaaatttagtacctaacaatcgtgttcaaatacacagaagccctgcacagaatttagttggagagaacaatcatgatgttgataacagtgacctcccagtattgtccactgatcaagatgaaagtttgctgttatttgaagatgttaatacagagttcgacgatgtgagtctttcacccttgaacagtaaaagcgaatctttacctgtgtcagacaaaactgctattagtgaaacgcctctggtctctcagttcttaatttctgatgaacttttgttggacaataattctgaactccaagatcaaatcacccgtgatgctaatagttttaaatctcgtgatcagagaggtgtacaggaagaaaaagtgaagaatcatgaggatatttttgattgctctagggatttattttctgttacctttgatttaggattctgtagtccagattctgatgatgaaatattggaacatacatcagatagcaatagacctctagatgatctatatggaaggtatttggaaattaaggagataagtgatgcaaattatgtttcgaatcaagcactaataccaagagatcatagtaaaaattttactagtggaactgttattatcccatcaaatgaagatatgcagaatccaaattatgtacatttgccactgagtgcagcaaaaaatgaagaattgttatctcctggttattctcagttttctttaccagtgcaaaaaaaagttatgagtacaccactctctaaatcaaacacattgaactcattttctaagataagaaaggaaatacttaagacaccagattctagtaaggaaaaagtaaacctacaaagattcaaagaagcattgaattcaacttttgattattcagaattttctctagaaaagtctaaaagcagtggtccaatgtatctgcataaatcctgtcattctgttgaagatggacaattattaacaagtaacgaaagtgaagatgacgagattttccgaagaaaagttaaaagagcaaaaggaaatgttttaaactctcctgaggatcagaaaaatagtgaagttgattctccacttcatgctgtcaaaaagcgcagatttcctataaacagatcagaattatcatctagtgatgagagtgagaattttcccaaaccatgttcacaattagaagacttcaaggtttgtaacgggaatgccagaagaggcatcaaagtcccaaagagacagagtcacttaaagcatgtagctaggaagtttttagatgatgaagcagaactttctgaagaagatgcagaatatgtttcatcagatgaaaatgatgagtcagaaaatgaacaagattcctcattacttgactttttaaatgatgaaactcaactttcacaggctataaatgattctgaaatgagagctatttacatgaaatctttgcgtagtccaatgatgaacaataagtacaaaatgattcataagacacataaaaacataaacattttctcgcagattcctgaacaagatgaaacctatttagaggatagtttttgtgttgatgaagaggagtcttgcaaaggccaatcaagtgaagaagaagtttgtgttgattttaacttaataactgatgattgctttgcaaatagtaaaaagtataaaactcgacgtgcagtaatgctaaaagaaatgatggaacaaaattgtgcacattcaaaaaagaaattatccagaattattttaccagatgattcaagtgaggaggagaacaatgtaaatgataaaagagaatctaatattgcggttaacccaagcactgttaagaagaacaaacaacaggaccattgtttaaattcagtgccttctggatcttctgcgcagtccaaggtgcgttctactccaagagttaatccattagcaaagcagagcaaacagacatcgctgaatttaaaggatacaatttccgaagtctcagacttcaaacctcagaatcataatgaagtccagtctaccacaccacccttcactactgttgattcacagaaagactgtagaaaatttccagttccacagaaggatggtagtgctttggaggattctagcacttcaggggcatcctgttccaagtcaagaccacatttagctgggacacatacttctcttagacttccgcaggaaggaaaaggaacctgtattcttgtaggtggtcatgaaatcacttctggattagaagtaatttcttccctaagagcaattcatgggttgcaagtagaagtttgtcctcttaatggctgtgattacatcgtgagtaatcgcatggtggtggaaaggaggtctcaatctgagatgttaaatagtgtcaataagaacaagttcattgagcagatccagcacctgcagagtatgtttgaaagaatatgtgtgattgtggaaaaggacagagaaaaaacaggagacacatcaaggatgtttaggagaacaaagagctatgacagcctgctgactaccttaattggcgctggaatccgaattcttttcagttcctgccaagaagaaaccgcagatttgctaaaggaactgtctttagtggaacaaagaaagaatgttggtattcatgttccaacagtggtgaatagtaataaaagtgaggcactccagttttatttaagtattcccaatataagttatataactgcattaaatatgtgtcaccagttttcatctgtgaaaaggatggctaacagctcacttcaagaaatctccatgtatgcacaagtaactcatcagaaggctgaggagatctatagatatattcactatgtatttgacatacaaatgttaccaaatgatcttaaccaagatagactgaaatctgatatataatcaagctgctcaagatggggttttcaaagacctctcacaatattaaatgcacttcaataatcattgctgttttatgtttatttgtaaataagagaatattttatttaaatattttatattgtatacatttttatttatagattatagaaattattaaaaaagaaaaatctgatgttcagtgatcattttgactagattataaaactaatttttcttattaaataaaacaaggtttattaaaagtgttactaaggatagtttaagaaagtaaaagctaagctagagatatactttggaatgtttcccaaaattaaagttgtactgttgtgataaatagtaaagttgacatgtctatgactacagccaacttgtcgattttccctatgtgtagatagtatacttttaagtgtactgattctaaatacatgtacttggtaaggtgtgggtgatgggtgggttgtgagataaatgacccagtaactaggaaagtagaaaacttaactgaatgtttatctgaccaaaggtgtgtcccagttaagtactgtcaaatctattaatatgaactctgatatggtttggctgtgtccccaaccaaaatctcatcttgacttgtaatctgaattataatcccaatatattggggagggacctcctggaacgtgattagctcatgggggcggttcccccatgctgttctagtgatagttctcagaggatctgatggttttataagcttttcctctgttcactctgcagttctcttgcctactgccatgtggaaaaggaaacgtttgcttcccctccaccatgattgtaagttcccgaggcctccccagccatgcaggactgtgagtcaattaaacatcttttccttataaatta

SEQ ID NO: 133148 - DNA, 2201 bp, Homo sapiens
  Payload ID: 6019
  Gene Symbol: FUBP1
  Gene Name: far upstream element (FUSE) binding protein 1
  Uniprot ID: Q96AE4
  ENST ID: ENST00000294623
  CDS Start-End: 84-2045
gacggccgccattttctttctttcttagctgttagctgagaggaagtctctgaacaggcggcagcggctcttatagtgcaaccatggcagactattcaacagtgcctcccccctcttctggctcagctggtggcggtggtggcggcggtggtggtggaggagttaacgacgctttcaaagatgcactgcagagagcccggcagattgcagcaaaaattggaggtgatgcagggacatcactgaattcaaatgactatggttatgggggacaaaaaagacctttagaagatggagatcaaccagatgctaagaaagttgctcctcaaaatgactcttttggaacacagttaccaccgatgcatcagcagcaaagatctgtaatgacagaagaatacaaagttccagatggaatggttggattcataattggcagaggaggtgaacagatctcacgcatacaacaggaatctggatgcaaaatacagatagctcctgacagtggtggccttccagaaaggtcctgtatgttaactggaacacctgaatctgtccagtcagcaaaacggttactggaccagattgttgaaaaaggaagaccagctcctggcttccatcatggcgatggaccgggaaatgcagttcaagaaatcatgattccagctagcaaggcaggattagtcattggaaaagggggagaaactattaaacagcttcaggaacgggctggagttaaaatggttatgattcaagacgggccgcagaacactggtgctgacaaacctcttaggattacaggagacccatataaagttcaacaagccaaggaaatggtgttagagttaattcgtgatcaaggcggtttcagagaagttcggaatgagtatgggtcaagaataggaggaaatgaagggatagatgtccccattccaagatttgctgttggcattgtaataggaagaaatggagagatgatcaaaaaaatacaaaatgatgctggtgttcgcattcagtttaagccagatgatgggacaacacccgaaaggatagcacaaataacaggacctccagaccgatgtcaacatgctgcagaaattattacagaccttcttcgaagtgttcaggctggtaatcctggtggacctggacctggtggtcgaggaagaggtagaggtcaaggcaactggaacatgggaccacctggtggactacaggaatttaattttattgtgccaactgggaaaactggattaataataggaaaaggaggtgaaaccataaaaagcataagccagcagtctggtgcaagaatagaacttcagagaaatcctccaccaaatgcagatcctaatatgaagttatttacaattcgtggcactccacaacagatagactatgctcggcaactcatagaagaaaagattggtggcccagtaaatcctttagggccacctgtaccccatgggccccatggtgtcccaggcccccatggacctcctgggcctccagggcctggaactccaatgggaccatacaaccctgcaccttataatcctggaccaccaggcccggctcctcatggtcctccagccccatatgctccccagggatggggaaatgcatatccacactggcagcagcaggctcctcctgatccagctaaggcaggaacggatccaaattcagcagcttgggctgcttattacgctcactattatcaacagcaagcacagccaccaccagcagcccctgcaggtgcaccaactacaactcaaactaatggacaaggagatcagcagaatccagccccagctggacaggttgattataccaaggcttgggaagagtactacaagaaaatgggtcaggcagttcctgctccgactggggctcctccaggtggtcagccagattatagtgcagcctgggctgagtattatagacaacaagcagcctattatgcccagacaagtccccagggaatgccacagcatcctccagcacctcagtgcaggtttgatccagccagtatagaactagctctgtaggggtgaggaggactgtgctgtgtatcatccttgattgtgttccttcaaggagcattgcacttgccttcccagaccttccaccttaggttctgctgcaaaaagcaccaggtaagcacaacctaaggacatatataaataaatatttcaatacattaa

SEQ ID NO: 133149 - DNA, 2524 bp, Homo sapiens
  Payload ID: 6019
  Gene Symbol: FUBP1
  Gene Name: far upstream element (FUSE) binding protein 1
  ENST ID: ENST00000370767
  CDS Start-End: 89-2056
gcttcgacggccgccattttctttctttcttagctgttagctgagaggaagtctctgaacaggcggcagcggctcttatagtgcaaccatggcagactattcaacagtgcctcccccctcttctggctcagctggtggcggtggtggcggcggtggtggtggaggagttaacgacgctttcaaagatgcactgcagagagcccggcagattgcagcaaaaattggaggtgatgcagggacatcactgaattcaaatgactatggttatgggggacaaaaaagacctttagaagatggagatcaaccagatgctaagaaagttgctcctcaaaatgactcttttggaacacagttaccaccgatgcatcagcagcaaagcagatctgtaatgacagaagaatacaaagttccagatggaatggttggattcataattggcagaggaggtgaacagatctcacgcatacaacaggaatctggatgcaaaatacagatagctcctgacagtggtggccttccagaaaggtcctgtatgttaactggaacacctgaatctgtccagtcagcaaaacggttactggaccagattgttgaaaaaggaagaccagctcctggcttccatcatggcgatggaccgggaaatgcagttcaagaaatcatgattccagctagcaaggcaggattagtcattggaaaagggggagaaactattaaacagcttcaggaacgggctggagttaaaatggttatgattcaagacgggccgcagaacactggtgctgacaaacctcttaggattacaggagacccatataaagttcaacaagccaaggaaatggtgttagagttaattcgtgatcaaggcggtttcagagaagttcggaatgagtatgggtcaagaataggaggaaatgaagggatagatgtccccattccaagatttgctgttggcattgtaataggaagaaatggagagatgatcaaaaaaatacaaaatgatgctggtgttcgcattcagtttaagccagatgatgggacaacacccgaaaggatagcacaaataacaggacctccagaccgatgtcaacatgctgcagaaattattacagaccttcttcgaagtgttcaggctggtaatcctggtggacctggacctggtggtcgaggaagaggtagaggtcaaggcaactggaacatgggaccacctggtggactacaggaatttaattttattgtgccaactgggaaaactggattaataataggaaaaggaggtgaaaccataaaaagcataagccagcagtctggtgcaagaatagaacttcagagaaatcctccaccaaatgcagatcctaatatgaagttatttacaattcgtggcactccacaacagatagactatgctcggcaactcatagaagaaaagattggtggcccagtaaatcctttagggccacctgtaccccatgggccccatggtgtcccaggcccccatggacctcctgggcctccagggcctggaactccaatgggaccatacaaccctgcaccttataatcctggaccaccaggcccggctcctcatggtcctccagccccatatgctccccagggatggggaaatgcatatccacactggcagcagcaggctcctcctgatccagctaaggcaggaacggatccaaattcagcagcttgggctgcttattacgctcactattatcaacagcaagcacagccaccaccagcagcccctgcaggtgcaccaactacaactcaaactaatggacaaggagatcagcagaatccagccccagctggacaggttgattataccaaggcttgggaagagtactacaagaaaatgggtcaggcagttcctgctccgactggggctcctccaggtggtcagccagattatagtgcagcctgggctgagtattatagacaacaagcagcctattatgcccagacaagtccccagggaatgccacagcatcctccagcacctcagggatttgcaaatcatgcaagaagccaccaccatttatattaaccactttttctttcttaaaggattcactcctgaattagctccatttcaaggattttctttaactttttgtgtatttcttatgtatctcttctgcacagggccaataataagaagtggacaatacagtatttgcttcattgtgtgggggaaaaaaacctttgttaaatatatggatgcagacgacttgatgaagatcttaattttgtttttggtttaaaatagtgtttccttttttttttttttttttgaaaatgtacaaaatatctatcactactgataggaggttaatatttctgtgtagaaatgaaaattggtttgtttttagtatttagtgtagatgtacacattccagcaaatgtatttgcaattatgtggttgatgctttgtgatataaatgtactttttcaatgtatactttcacttttaaaatgcctgttttgtgctttacaataaatgatatgaaacctc

SEQ ID NO: 133150 - DNA, 2378 bp, Homo sapiens
  Payload ID: 6019
  Gene Symbol: FUBP1
  Gene Name: far upstream element (FUSE) binding protein 1
  Uniprot ID: Q96AE4
  ENST ID: ENST00000370768
  CDS Start-End: 83-2017
acggccgccattttctttctttcttagctgttagctgagaggaagtctctgaacaggcggcagcggctcttatagtgcaaccatggcagactattcaacagtgcctcccccctcttctggctcagctggtggcggtggtggcggcggtggtggtggaggagttaacgacgctttcaaagatgcactgcagagagcccggcagattgcagcaaaaattggaggtgatgcagggacatcactgaattcaaatgactatggttatgggggacaaaaaagacctttagaagatggagatcaaccagatgctaagaaagttgctcctcaaaatgactcttttggaacacagttaccaccgatgcatcagcagcaaagcagatctgtaatgacagaagaatacaaagttccagatggaatggttggattcataattggcagaggaggtgaacagatctcacgcatacaacaggaatctggatgcaaaatacagatagctcctgacagtggtggccttccagaaaggtcctgtatgttaactggaacacctgaatctgtccagtcagcaaaacggttactggaccagattgttgaaaaaggaagaccagctcctggcttccatcatggcgatggaccgggaaatgcagttcaagaaatcatgattccagctagcaaggcaggattagtcattggaaaagggggagaaactattaaacagcttcaggaacgggctggagttaaaatggttatgattcaagacgggccgcagaacactggtgctgacaaacctcttaggattacaggagacccatataaagttcaacaagccaaggaaatggtgttagagttaattcgtgatcaaggcggtttcagagaagttcggaatgagtatgggtcaagaataggaggaaatgaagggatagatgtccccattccaagatttgctgttggcattgtaataggaagaaatggagagatgatcaaaaaaatacaaaatgatgctggtgttcgcattcagtttaagccagatgatgggacaacacccgaaaggatagcacaaataacaggacctccagaccgatgtcaacatgctgcagaaattattacagaccttcttcgaagtgttcaggctggtaatcctggtggacctggacctggtggtcgaggaagaggtagaggtcaaggcaactggaacatgggaccacctggtggactacaggaatttaattttattgtgccaactgggaaaactggattaataataggaaaaggaggtgaaaccataaaaagcataagccagcagtctggtgcaagaatagaacttcagagaaatcctccaccaaatgcagatcctaatatgaagttatttacaattcgtggcactccacaacagatagactatgctcggcaactcatagaagaaaagattggtggcccagtaaatcctttagggccacctgtaccccatgggccccatggtgtcccaggcccccatggacctcctgggcctccagggcctggaactccaatgggaccatacaaccctgcaccttataatcctggaccaccaggcccggctcctcatggtcctccagccccatatgctccccagggatggggaaatgcatatccacactggcagcagcaggctcctcctgatccagctaaggcaggaacggatccaaattcagcagcttgggctgcttattacgctcactattatcaacagcaagcacagccaccaccagcagcccctgcaggtgcaccaactacaactcaaactaatggacaaggagatcagcagaatccagccccagctggacaggttgattataccaaggcttgggaagagtactacaagaaaatgggtcaggcagttcctgctccgactggggctcctccaggtggtcagccagattatagtgcagcctgggctgagtattatagacaacaagcagcctattatgcccagacaagtccccagggaatgccacagcatcctccagcacctcagggccaataataagaagtggacaatacagtatttgcttcattgtgtgggggaaaaaaacctttgttaaatatatggatgcagacgacttgatgaagatcttaattttgtttttggtttaaaatagtgtttccttttttttttttttttttgaaaatgtacaaaatatctatcactactgataggaggttaatatttctgtgtagaaatgaaaattggtttgtttttagtatttagtgtagatgtacacattccagcaaatgtatttgcaattatgtggttgatgctttgtgatataaatgtactttttcaatgtatactttcacttttaaaatgcctgttttgtgctttacaataaatgatatgaaacctc

SEQ ID NO: 133151 - DNA, 802 bp, Homo sapiens
  Payload ID: 6019
  Gene Symbol: FUBP1
  Gene Name: far upstream element (FUSE) binding protein 1
  ENST ID: ENST00000421641
  CDS Start-End: 107-802
gcgcaagaatgtaatagagcttcgacggccgccattttctttctttcttagctgttagctgagaggaagtctctgaacaggcggcagcggctcttatagtgcaaccatggcagactattcaacagtgcctcccccctcttctggctcagctggtggcggtggtggcggcggtggtggtggaggagttaacgacgctttcaaagatgcactgcagagagcccggcagattgcagcaaaaattggaggtgatgcagggacatcactgaattcaaatgactatggttatgggggacaaaaaagacctttagaagatggagatggctcttggacaagtccgagcagtacaacacactgggagggaatgccctctccttttaaagatcaaccagatgctaagaaagttgctcctcaaaatgactcttttggaacacagttaccaccgatgcatcagcagcaaagatctgtaatgacagaagaatacaaagttccagatggaatggttggattcataattggcagaggaggtgaacagatctcacgcatacaacaggaatctggatgcaaaatacagatagctcctgacagtggtggccttccagaaaggtcctgtatgttaactggaacacctgaatctgtccagtcagcaaaacggttactggaccagattgttgaaaaaggaagaccagctcctggcttccatcatggcgatggaccgggaaatgcagttcaagaaatcatgattccagctagcaaggcaggattagtcattggaaaagggggagaaactattaaacagcttcag

SEQ ID NO: 133152 - DNA, 3124 bp, Homo sapiens
  Payload ID: 6020
  Gene Symbol: FUBP3
  Gene Name: far upstream element (FUSE) binding protein 3
  Uniprot ID: Q96I24
  ENST ID: ENST00000319725
  CDS Start-End: 76-1794
cgggaggccggaccggggagccgagcggcggcgtcggcggcgtcggcggcggcggcgacggcggcgggggcggtaatggcggagctggtgcaggggcagagcgctcctgtggggatgaaggccgagggcttcgtggatgccctgcaccgggtccggcagattgctgctaaaattgattcaattcctcacttgaataattccacacctctagtggacccctcagtatatggatacggagtacaaaaacggcccttggatgatggagtaggtaaccagttaggggccttggtacatcaaaggacggtaataacggaagaattcaaagtgcctgacaaaatggttggatttattatcggcaggggaggtgagcagatttcacggattcaagcagaatctggttgcaaaattcagattgcttcagagagttctgggattccagagaggccctgtgtacttaccggaaccccagaaagtattgaacaagccaaacggctcctgggacagattgtggaccgctgtcgaaatggacctggctttcataatgacatagacagcaacagcacaatccaggagattctcattcccgcatctaaagtgggtctggtcatcggcagaggaggggaaacaatcaagcagttgcaggagcggacaggggtgaagatggtcatgatccaggatggcccattgcccacgggagcagacaagcctcttcgtatcactggagatgcatttaaagtacagcaagcaagagaaatggtactagagattatccgagaaaaagaccaagctgactttcggggtgtacgcggcgatttcaactctcgaatgggaggaggcagtatagaggtatctgtgcctaggtttgctgtggggattgtaataggaagaaacggggaaatgatcaaaaagatccagaatgatgctggtgtgaggattcagtttaaaccagatgatgggattagtccagaaagagctgcccaggtcatgggccctccggatcggtgtcagcatgcagcgcatatcatcagcgagctgattcttacagcccaggaaagagacggctttggaggcctggcagcagccagaggaagaggtcgtggccgtggcgactggagcgtgggagcccctggtggcgtccaggagataacatacacggtgccagccgataagtgtggcctcgtcataggcaaagggggtgagaacatcaaaagcatcaaccagcagtcaggggcgcacgtggagcttcagaggaacccccctcccaacagcgaccccaacctgcggagattcaccatcaggggggttccccagcagatcgaggtggccaggcagctcatagatgagaaagttggcgggaccaatctcggagcacctggagccttcggacagagtccattcagccagccacctgccccacctcatcaaaatacctttcctccaaggagctccgggtgcttcccaaacatggctgccaaggtgaatgggaacccccacagcacccctgtgagtggtcctccggcctttctgacccagggctggggcagcacctaccaggcgtggcagcagcccacacagcaggtcccaagccagcagagccagccgcagagcagccagcccaactacagcaaggcctgggaagactattacaaaaaacagagtcacgccgccagcgctgctcctcaggccagctccccaccggactacacaatggcctgggcagaatattacagacagcaggtcgctttctacggacagacgttagggcaggcgcaggcccacagccaggagcagtaggacagcgtcctcgtggccaactctcccctcaaaatcattgtcaaagaaaacctatttgtaacagaggtttttacatttgcaaaccttttgatgaagaactgttgttttgttctgtgaaacactatatttagattaacggaatttttctaaaaatcaggaaaattagttactaaaaattgctgatcatttttgtttcattatttttgttatttcaaatgtataagctctgggattctttttggagcaatacctacaaagtcaggcaccagaatgtgcctcagagctgtgacatttcaacatgatggttttggtttggtttggttttgtgtcctttttatttgcagttttttctgttgcaacagaaagtggcttggaagtcttaggtggtatgtaacaaattctttttaaaaattttaaagcagtatttaagtattcttaaatgtgtaaattcatttaatgttttacttctaatttcttgtatcttggctgtctggttttattgcatttttaaaaaaactgaactattatgtattgtaatgaatgatgtgaattctgaactgagacagataattgtattgctgtccaacaggggttgggaggggcattttgtagggtttgtataatttctagagttcgaaaggggtaatataaaaatgtgctcgtgtgtttagcctacgtttttctcatgcctccattaccagttgcaattgtgtatctaagacctccaagcttgtttttaaaacaaaacaaaaaacctttctctattatctcagaaatataaatactgttatttttaatattaagaaattcaatataacttttaacacacactgtggaacattaaaccgtataaaaatgtagttataactatttttaattccaaggtgttgtttgcttttttcttttaaatattttcttaatattttgtcagattaactagatgaataaataaatctagtattaaccgcattatgaattaaataattttgatttaatgaaagggataatatgatttccagtgtttactgtagtgtatcttgtacagataacatgtatttttaaaggaaaaaaaacggaattgaagctattttttcttgcatttctaattgacctgagggacattccgtttgaaatgtactgaagttacagtttctggttttttctccttatttttcttataatgcttgaaatgtctaactattaaaaaagacaattggaaaatgttatgcatggggtttttaagaaaacaaagtgttctttttatttgactgacaattcattttacactctatataataaaatctccacaaggcatcttgtgggcaaagtc

SEQ ID NO: 133153 - DNA, 1478 bp, Homo sapiens
  Payload ID: 6021
  Gene Symbol: FDPS
  Gene Name: farnesyl diphosphate synthase
  Uniprot ID: P14324
  ENST ID: ENST00000356657
  CDS Start-End: 163-1422
gagtacccgccaacaagcgggaccgagcaggaatccgtatctgggaacaggtgagagaggatgtgtgctgggccttggaggaagggggccgagaccgggccttacttctgtaacgatactgtgaggcatcggaaggccagcctgttgtgtccgttttgaaggatgcccctgtcccgctggttgagatctgtgggggtcttcctgctgccagccccctactgggcaccccgggagaggtggctgggttccctacggcggccctccctggtgcacgggtacccagtcctggcctggcacagtgcccgctgctggtgccaagcgtggacagaggaacctcgagccctttgctcctccctcagaatgaacggagaccagaattcagatgtttatgcccaagaaaagcaggatttcgttcagcacttctcccagatcgttagggtgctgactgaggatgagatggggcacccagagataggagatgctattgcccggctcaaggaggtcctggagtacaatgccattggaggcaagtataaccggggtttgacggtggtagtagcattccgggagctggtggagccaaggaaacaggatgctgatagtctccagcgggcctggactgtgggctggtgtgtggaactgctgcaagctttcttcctggtggcagatgacatcatggattcatcccttacccgccggggacagatctgctggtatcagaagccgggcgtgggtttggatgccatcaatgatgctaacctcctggaagcatgtatctaccgcctgctgaagctctattgccgggagcagccctattacctgaacctgatcgagctcttcctgcagagttcctatcagactgagattgggcagaccctggacctcctcacagccccccagggcaatgtggatcttgtcagattcactgaaaagaggtacaaatctattgtcaagtacaagacagctttctactccttctaccttcctatagctgcagccatgtacatggcaggaattgatggcgagaaggagcacgccaatgccaagaagatcctgctggagatgggggagttctttcagattcaggatgattaccttgacctctttggggaccccagtgtgaccggcaaaattggcactgacatccaggacaacaaatgcagctggctggtggttcagtgtctgcaacgggccactccagaacagtaccagatcctgaaggaaaattacgggcagaaggaggctgagaaagtggcccgggtgaaggcgctatatgaggagctggatctgccagcagtgttcttgcaatatgaggaagacagttacagccacattatggctctcattgaacagtacgcagcacccctgcccccagccgtctttctggggcttgcgcgcaaaatctacaagcggagaaagtgacctagagattgcaagggcggggagaggaggctctcaataaataatcgtgtaacctt

SEQ ID NO: 133154 - DNA, 1431 bp, Homo sapiens
  Payload ID: 6021
  Gene Symbol: FDPS
  Gene Name: farnesyl diphosphate synthase
  Uniprot ID: P14324
  ENST ID: ENST00000368356
  CDS Start-End: 116-1375
agtgtggggagagcgggaactactcgacccacagagccgatcgcggagcggattctgcttttaggagtacccgccaacaagcgggaccgagcaggaatccgtatctgggaacaggatgcccctgtcccgctggttgagatctgtgggggtcttcctgctgccagccccctactgggcaccccgggagaggtggctgggttccctacggcggccctccctggtgcacgggtacccagtcctggcctggcacagtgcccgctgctggtgccaagcgtggacagaggaacctcgagccctttgctcctccctcagaatgaacggagaccagaattcagatgtttatgcccaagaaaagcaggatttcgttcagcacttctcccagatcgttagggtgctgactgaggatgagatggggcacccagagataggagatgctattgcccggctcaaggaggtcctggagtacaatgccattggaggcaagtataaccggggtttgacggtggtagtagcattccgggagctggtggagccaaggaaacaggatgctgatagtctccagcgggcctggactgtgggctggtgtgtggaactgctgcaagctttcttcctggtggcagatgacatcatggattcatcccttacccgccggggacagatctgctggtatcagaagccgggcgtgggtttggatgccatcaatgatgctaacctcctggaagcatgtatctaccgcctgctgaagctctattgccgggagcagccctattacctgaacctgatcgagctcttcctgcagagttcctatcagactgagattgggcagaccctggacctcctcacagccccccagggcaatgtggatcttgtcagattcactgaaaagaggtacaaatctattgtcaagtacaagacagctttctactccttctaccttcctatagctgcagccatgtacatggcaggaattgatggcgagaaggagcacgccaatgccaagaagatcctgctggagatgggggagttctttcagattcaggatgattaccttgacctctttggggaccccagtgtgaccggcaaaattggcactgacatccaggacaacaaatgcagctggctggtggttcagtgtctgcaacgggccactccagaacagtaccagatcctgaaggaaaattacgggcagaaggaggctgagaaagtggcccgggtgaaggcgctatatgaggagctggatctgccagcagtgttcttgcaatatgaggaagacagttacagccacattatggctctcattgaacagtacgcagcacccctgcccccagccgtctttctggggcttgcgcgcaaaatctacaagcggagaaagtgacctagagattgcaagggcggggagaggaggctctcaataaataatcgtgtaacctt

SEQ ID NO: 133155 - DNA, 1256 bp, Homo sapiens
  Payload ID: 6021
  Gene Symbol: FDPS
  Gene Name: farnesyl diphosphate synthase
  Uniprot ID: P14324
  ENST ID: ENST00000447866
  CDS Start-End: 195-1256
atctgtccctcccgcgggcacattgggagttgtagtctaattatatatttccgcccttagtgtggggagagcgggaactactcgacccacagagccgatcgcggagcggattctgcttttaggagtacccgccaacaagcgggaccgagcaggaatccgtatctgggaacagagccctttgctcctccctcagaatgaacggagaccagaattcagatgtttatgcccaagaaaagcaggatttcgttcagcacttctcccagatcgttagggtgctgactgaggatgagatggggcacccagagataggagatgctattgcccggctcaaggaggtcctggagtacaatgccattggaggcaagtataaccggggtttgacggtggtagtagcattccgggagctggtggagccaaggaaacaggatgctgatagtctccagcgggcctggactgtgggctggtgtgtggaactgctgcaagctttcttcctggtggcagatgacatcatggattcatcccttacccgccggggacagatctgctggtatcagaagccgggcgtgggtttggatgccatcaatgatgctaacctcctggaagcatgtatctaccgcctgctgaagctctattgccgggagcagccctattacctgaacctgatcgagctcttcctgcagagttcctatcagactgagattgggcagaccctggacctcctcacagccccccagggcaatgtggatcttgtcagattcactgaaaagaggtacaaatctattgtcaagtacaagacagctttctactccttctaccttcctatagctgcagccatgtacatggcaggaattgatggcgagaaggagcacgccaatgccaagaagatcctgctggagatgggggagttctttcagattcaggatgattaccttgacctctttggggaccccagtgtgaccggcaaaattggcactgacatccaggacaacaaatgcagctggctggtggttcagtgtctgcaacgggccactccagaacagtaccagatcctgaaggaaaattacgggcagaaggaggctgagaaagtggcccgggtgaaggcgctatatgaggagctggatctgccagcagtgttcttgcaatatgaggaagacagttacagccacattatggctctcattgaacagtacgcagcacccctgcccccagccgtctttctggggcttgcgcgcaaaatctacaagcggagaaagtga

SEQ ID NO: 133156 - DNA, 713 bp, Homo sapiens
  Payload ID: 6021
  Gene Symbol: FDPS
  Gene Name: farnesyl diphosphate synthase
  ENST ID: ENST00000474345
  CDS Start-End: 114-356
tgtggggagagcgggaactactcgacccacagagccgatcgcggagcggattctgcttttaggagtacccgccaacaagcgggaccgagcaggaatccgtatctgggaacagaatgaacggagaccagaattcagatgtttatgcccaagaaaagcaggatttcgttcagcacttctcccagatcgttagggtgctgactgaggatgagatggggcacccagagataggagatgctattgcccggctcaaggagagccttgctctgtcacctgggctggagtgcgatggtgtgatctcggcttgctgcaacctccacctcctgggttcaagtgattctcctgcctcagccttctgagtagctgggattacaggtcctggagtacaatgccattggaggcaagtataaccggggtttgacggtggtagtagcattccgggagctggtggagccaaggaaacaggatgctgatagtctccagcgggcctggactgtgggctggtgtgtggaactgctgcaagctttcttcctggtggcagatgacatcatggattcatcccttacccgccggggacagatctgctggtatcagaagccgggcgtgggtttggatgccatcaatgatgctaacctcctggaagcatgtatctaccgcctgctgaagctctattgccgggagcagccctattacctgaacctgatcgagctcttcct

SEQ ID NO: 133157 - DNA, 1198 bp, Homo sapiens
  Payload ID: 6021
  Gene Symbol: FDPS
  Gene Name: farnesyl diphosphate synthase
  Uniprot ID: P14324
  ENST ID: ENST00000612683
  CDS Start-End: 109-1170
gagaggatgtgtgctgggccttggaggaagggggccgagaccgggccttacttctgtaacgatactgtgaggcatcggaaggccagcctgttgtgtccgttttgaagaatgaacggagaccagaattcagatgtttatgcccaagaaaagcaggatttcgttcagcacttctcccagatcgttagggtgctgactgaggatgagatggggcacccagagataggagatgctattgcccggctcaaggaggtcctggagtacaatgccattggaggcaagtataaccggggtttgacggtggtagtagcattccgggagctggtggagccaaggaaacaggatgctgatagtctccagcgggcctggactgtgggctggtgtgtggaactgctgcaagctttcttcctggtggcagatgacatcatggattcatcccttacccgccggggacagatctgctggtatcagaagccgggcgtgggtttggatgccatcaatgatgctaacctcctggaagcatgtatctaccgcctgctgaagctctattgccgggagcagccctattacctgaacctgatcgagctcttcctgcagagttcctatcagactgagattgggcagaccctggacctcctcacagccccccagggcaatgtggatcttgtcagattcactgaaaagaggtacaaatctattgtcaagtacaagacagctttctactccttctaccttcctatagctgcagccatgtacatggcaggaattgatggcgagaaggagcacgccaatgccaagaagatcctgctggagatgggggagttctttcagattcaggatgattaccttgacctctttggggaccccagtgtgaccggcaaaattggcactgacatccaggacaacaaatgcagctggctggtggttcagtgtctgcaacgggccactccagaacagtaccagatcctgaaggaaaattacgggcagaaggaggctgagaaagtggcccgggtgaaggcgctatatgaggagctggatctgccagcagtgttcttgcaatatgaggaagacagttacagccacattatggctctcattgaacagtacgcagcacccctgcccccagccgtctttctggggcttgcgcgcaaaatctacaagcggagaaagtgacctagagattgcaagggcggggagagga

SEQ ID NO: 133158 - DNA, 912 bp, Homo sapiens
  Payload ID: 6021
  Gene Symbol: FDPS
  Gene Name: farnesyl diphosphate synthase
  ENST ID: ENST00000491013
  CDS Start-End: 90-912
aggagtacccgccaacaagcgggaccgagcaggaatccgtatctgggaacagggagtgcttagtgccccctccctatgccactcccaggatgcccctgtcccgctggttgagatctgtgggggtcttcctgctgccagccccctactgggcaccccgggagaggtggctgggttccctacggcggccctccctggtgcacgggtacccagtcctggcctggcacagtgcccgctgctggtgccaagcgtggacagaggaacctcgagccctttgctcctccctcagaatgaacggagaccagaattcagatgtttatgcccaagaaaagcaggatttcgttcagcacttctcccagatcgttagggtgctgactgaggatgagatggggcacccagagataggagatgctattgcccggctcaaggaggtcctggagtacaatgccattggaggcaagtataaccggggtttgacggtggtagtagcattccgggagctggtggagccaaggaaacaggatgctgatagtctccagcgggcctggactgtgggctggtgtgtggaactgctgcaagctttcttcctggtggcagatgacatcatggattcatcccttacccgccggggacagatctgctggtatcagaagccgggcgtgggtttggatgccatcaatgatgctaacctcctggaagcatgtatctaccgcctgctgaagctctattgccgggagcagccctattacctgaacctgatcgagctcttcctgcagagttcctatcagactgagattgggcagaccctggacctcctcacagccccccagggcaatgtggatcttgtcagattcactgaaaagaggtacaaatctattgtcaagtacaagacagctttctactccttctaccttc

SEQ ID NO: 133159 - DNA, 1178 bp, Homo sapiens
  Payload ID: 6021
  Gene Symbol: FDPS
  Gene Name: farnesyl diphosphate synthase
  Uniprot ID: P14324
  ENST ID: ENST00000467076
  CDS Start-End: 79-1140
cgatcgcggagcggattctgcttttaggagtacccgccaacaagcgggaccgagcaggaatccgtatctgggaacagaatgaacggagaccagaattcagatgtttatgcccaagaaaagcaggatttcgttcagcacttctcccagatcgttagggtgctgactgaggatgagatggggcacccagagataggagatgctattgcccggctcaaggaggtcctggagtacaatgccattggaggcaagtataaccggggtttgacggtggtagtagcattccgggagctggtggagccaaggaaacaggatgctgatagtctccagcgggcctggactgtgggctggtgtgtggaactgctgcaagctttcttcctggtggcagatgacatcatggattcatcccttacccgccggggacagatctgctggtatcagaagccgggcgtgggtttggatgccatcaatgatgctaacctcctggaagcatgtatctaccgcctgctgaagctctattgccgggagcagccctattacctgaacctgatcgagctcttcctgcagagttcctatcagactgagattgggcagaccctggacctcctcacagccccccagggcaatgtggatcttgtcagattcactgaaaagaggtacaaatctattgtcaagtacaagacagctttctactccttctaccttcctatagctgcagccatgtacatggcaggaattgatggcgagaaggagcacgccaatgccaagaagatcctgctggagatgggggagttctttcagattcaggatgattaccttgacctctttggggaccccagtgtgaccggcaaaattggcactgacatccaggacaacaaatgcagctggctggtggttcagtgtctgcaacgggccactccagaacagtaccagatcctgaaggaaaattacgggcagaaggaggctgagaaagtggcccgggtgaaggcgctatatgaggagctggatctgccagcagtgttcttgcaatatgaggaagacagttacagccacattatggctctcattgaacagtacgcagcacccctgcccccagccgtctttctggggcttgcgcgcaaaatctacaagcggagaaagtgacctagagattgcaagggcggggagaggaggctctcaat

SEQ ID NO: 133160 - DNA, 1196 bp, Homo sapiens
  Payload ID: 6021
  Gene Symbol: FDPS
  Gene Name: farnesyl diphosphate synthase
  ENST ID: ENST00000611010
  CDS Start-End: 393-1139
tcagcgcggctcatcttcgcccagccaggacacgcaggatcgcgttatctgtccctcccgcgggcacattgggagttgtagtctaattatatatttccgcccttagtgtggggagagcgggaactactcgacccacagagccgatcgcggagcggattctgcttttaggagtacccgccaacaagcgggaccgagcaggaatccgtatctgggaacaggtcctggagtacaatgccattggaggcaagtataaccggggtttgacggtggtagtagcattccgggagctggtggagccaaggaaacaggatgctgatagtctccagcgggcctggactgtgggctggtgtgtggaactgctgcaagctttcttcctggtggcagatgacatcatggattcatcccttacccgccggggacagatctgctggtatcagaagccgggcgtgggtttggatgccatcaatgatgctaacctcctggaagcatgtatctaccgcctgctgaagctctattgccgggagcagccctattacctgaacctgatcgagctcttcctgcagagttcctatcagactgagattgggcagaccctggacctcctcacagccccccagggcaatgtggatcttgtcagattcactgaaaagaggtacaaatctattgtcaagtacaagacagctttctactccttctaccttcctatagctgcagccatgtacatggcaggaattgatggcgagaaggagcacgccaatgccaagaagatcctgctggagatgggggagttctttcagattcaggatgattaccttgacctctttggggaccccagtgtgaccggcaaaattggcactgacatccaggacaacaaatgcagctggctggtggttcagtgtctgcaacgggccactccagaacagtaccagatcctgaaggaaaattacgggcagaaggaggctgagaaagtggcccgggtgaaggcgctatatgaggagctggatctgccagcagtgttcttgcaatatgaggaagacagttacagccacattatggctctcattgaacagtacgcagcacccctgcccccagccgtctttctggggcttgcgcgcaaaatctacaagcggagaaagtgacctagagattgcaagggcggggagaggaggctctcaataaataatcgtgtaaccttc

SEQ ID NO: 133161 - DNA, 677 bp, Homo sapiens
  Payload ID: 6021
  Gene Symbol: FDPS
  Gene Name: farnesyl diphosphate synthase
  ENST ID: ENST00000465559
  CDS Start-End: 156-677
ggaacaggtgagagaggatgtgtgctgggccttggaggaagggggccgagaccgggccttacttctgtaacgatactgtgaggcatcggaaggccagcctgttgtgtccgttttgaagggagtgcttagtgccccctccctatgccactcccaggatgcccctgtcccgctggttgagatctgtgggggtcttcctgctgccagccccctactgggcaccccgggagaggtggctgggttccctacggcggccctccctggtgcacgggtacccagtcctggcctggcacagtgcccgctgctggtgccaagcgtggacagaggaacctcgagccctttgctcctccctcagaatgaacggagaccagaattcagatgtttatgcccaagaaaagcaggatttcgttcagcacttctcccagatcgttagggtgctgactgaggatgagatggggcacccagagataggagatgctattgcccggctcaaggaggtcctggagtacaatgccattggaggcaagtataaccggggtttgacggtggtagtagcattccgggagctggtggagccaaggaaacaggatgctgatagtctccagcgggcctggactgtgggctggtgtgtggaactgctgcaagctttcttcctggtggcagatgacatcatggattca

SEQ ID NO: 133162 - DNA, 2176 bp, Homo sapiens
  Payload ID: 6022
  Gene Symbol: FDFT1
  Gene Name: farnesyl-diphosphate farnesyltransferase 1
  Uniprot ID: P37268
  ENST ID: ENST00000220584
  CDS Start-End: 223-1476
aatcagcgcccgtcagcccaccccacgaggccgcagctagccccgctggcggccgaggccggttgaagtgggcggagcggcgggcggggcgtcgccgtactaggcctgccccctgtccggccagcccctcgaagcacctactccacaggtccagccggccggtgagcgcctggggaccgcagaggtgagagtcgcgcccgggagtccgccgcctgcgccaggatggagttcgtgaaatgccttggccaccccgaagagttctacaacctggtgcgcttccggatcgggggcaagcggaaggtgatgcccaagatggaccaggactcgctcagcagcagcctgaaaacttgctacaagtatctcaatcagaccagtcgcagtttcgcagctgttatccaggcgctggatggggaaatgcgcaacgcagtgtgcatattttatctggttctccgagctctggacacactggaagatgacatgaccatcagtgtggaaaagaaggtcccgctgttacacaactttcactctttcctttaccaaccagactggcggttcatggagagcaaggagaaggatcgccaggtgctggaggacttcccaacgatctcccttgagtttagaaatctggctgagaaataccaaacagtgattgccgacatttgccggagaatgggcattgggatggcagagtttttggataagcatgtgacctctgaacaggagtgggacaagtactgccactatgttgctgggctggtcggaattggcctttcccgtcttttctcagcctcagagtttgaagaccccttagttggtgaagatacagaacgtgccaactctatgggcctgtttttgcagaaaacaaacatcatccgtgactatctggaagaccagcaaggaggaagagagttctggcctcaagaggtttggagcaggtatgttaagaagttaggggattttgctaagccggagaatattgacttggccgtgcagtgcctgaatgaacttataaccaatgcactgcaccacatcccagatgtcatcacctacctttcgagactcagaaaccagagtgtgtttaacttctgtgctattccacaggtgatggccattgccactttggctgcctgttataataaccagcaggtgttcaaaggggcagtgaagattcggaaagggcaagcagtgaccctgatgatggatgccaccaatatgccagctgtcaaagccatcatatatcagtatatggaagagatttatcatagaatccccgactcagacccatcttctagcaaaacaaggcagatcatctccaccatccggacgcagaatcttcccaactgtcagctgatttcccgaagccactactcccccatctacctgtcgtttgtcatgcttttggctgccctgagctggcagtacctgaccactctctcccaggtaacagaagactatgttcagactggagaacactgatcccaaatttgtccatagctgaagtccaccataaagtggatttactttttttctttaaggatggatgttgtgttctctttatttttttcctactactttaatccctaaaagaacgctgtgtggctgggacctttaggaaagtgaaatgcaggtgagaagaacctaaacatgaaaggaaagggtgcctcatcccagcaacctgtccttgtgggtgatgatcactgtgctgcttgtggctcatggcagagcattcagtgccacggtttaggtgaagtcgctgcatatgtgactgtcatgagatcctacttagtatgatcctggctagaatgataattaaaagtatttaatttgaagcaccatttgaatgttcgtaatagtagaaaatgatgtgaattttctttctgttcggctcctatttttctcatcattttgttttctttaattgggttgaatggagtagatagaaatatttatggtttaggtaacagttagatgtttcctaagaatgcaaactgccttttccacacaaaggctgggaataaaattctgggtattctcgtattctcatttaaaggagtttagctttcagagagaaacagcaggattgcttttgaccttttagaagattggtctccagtaaaggtggacatttttgagatttttataataaagaatttaattgctctgcatttgtcaagta

SEQ ID NO: 133163 - DNA, 1393 bp, Homo sapiens
  Payload ID: 6022
  Gene Symbol: FDFT1
  Gene Name: farnesyl-diphosphate farnesyltransferase 1
  Uniprot ID: P37268
  ENST ID: ENST00000443614
  CDS Start-End: 95-1219
tcgaagcacctactccacaggtccagccggccggtgagcgcctggggaccgcagaggtgagagtcgcgcccgggagtccgccgcctgcgccaggatggagttcgtgaaatgccttggccaccccgaagagttctacaacctggtgcgcttccggatcgggggcaagcggaaggtgatgcccaagatggaccaggactcgctcagcagcagcctgaaaacttgctacaagtatctcaatcagaccagtcgcagtttcgcagctgttatccaggcgctggatggggaaatgcgcaacgcagtgtgcatattttatctggttctccgagctctggacacactggaagatgacatgaccatcagtgtggaaaagaaggtcccgctgttacacaactttcactctttcctttaccaaccagactggcggttcatggagagcaaggagaaggatcgccaggtgctggaggacttcccaacgtactgccactatgttgctgggctggtcggaattggcctttcccgtcttttctcagcctcagagtttgaagaccccttagttggtgaagatacagaacgtgccaactctatgggcctgtttttgcagaaaacaaacatcatccgtgactatctggaagaccagcaaggaggaagagagttctggcctcaagaggtttggagcaggtatgttaagaagttaggggattttgctaagccggagaatattgacttggccgtgcagtgcctgaatgaacttataaccaatgcactgcaccacatcccagatgtcatcacctacctttcgagactcagaaaccagagtgtgtttaacttctgtgctattccacaggtgatggccattgccactttggctgcctgttataataaccagcaggtgttcaaaggggcagtgaagattcggaaagggcaagcagtgaccctgatgatggatgccaccaatatgccagctgtcaaagccatcatatatcagtatatggaagagatttatcatagaatccccgactcagacccatcttctagcaaaacaaggcagatcatctccaccatccggacgcagaatcttcccaactgtcagctgatttcccgaagccactactcccccatctacctgtcgtttgtcatgcttttggctgccctgagctggcagtacctgaccactctctcccaggtaacagaagactatgttcagactggagaacactgatcccaaatttgtccatagctgaagtccaccataaagtggatttactttttttctttaaggatggatgttgtgttctctttatttttttcctactactttaatccctaaaagaacgctgtgtggctgggacctttaggaaagtgaaatgcaggtgagaagaacctaaacatgaaa

SEQ ID NO: 133164 - DNA, 1909 bp, Homo sapiens
  Payload ID: 6022
  Gene Symbol: FDFT1
  Gene Name: farnesyl-diphosphate farnesyltransferase 1
  Uniprot ID: P37268
  ENST ID: ENST00000528643
  CDS Start-End: 406-1404
cttggcagctgaacctgcctgtgagcaggtcgtgtatttctcggcttcccttatccaactttgcatttctatttctagcatattgggttgattcttttgaagctgcctctgtgcacattacacccatgaacttagaccagttgcctttatgtatgatcgtatttatactgagaagttactgtgttttttgactttcttttctatttgctacatattagttcggtctaaacgtttggtcttctggtctccatagttctacattggttaaatgcaactcacttctgggagtagtggtgacattcaactagtaggctttttaataaactacagaagttcattactctcatcaacgcagtgtgcatattttatctggttctccgagctctggacacactggaagatgacatgaccatcagtgtggaaaagaaggtcccgctgttacacaactttcactctttcctttaccaaccagactggcggttcatggagagcaaggagaaggatcgccaggtgctggaggacttcccaacgatctcccttgagtttagaaatctggctgagaaataccaaacagtgattgccgacatttgccggagaatgggcattgggatggcagagtttttggataagcatgtgacctctgaacaggagtgggacaagtactgccactatgttgctgggctggtcggaattggcctttcccgtcttttctcagcctcagagtttgaagaccccttagttggtgaagatacagaacgtgccaactctatgggcctgtttttgcagaaaacaaacatcatccgtgactatctggaagaccagcaaggaggaagagagttctggcctcaagaggtttggagcaggtatgttaagaagttaggggattttgctaagccggagaatattgacttggccgtgcagtgcctgaatgaacttataaccaatgcactgcaccacatcccagatgtcatcacctacctttcgagactcagaaaccagagtgtgtttaacttctgtgctattccacaggtgatggccattgccactttggctgcctgttataataaccagcaggtgttcaaaggggcagtgaagattcggaaagggcaagcagtgaccctgatgatggatgccaccaatatgccagctgtcaaagccatcatatatcagtatatggaagagatttatcatagaatccccgactcagacccatcttctagcaaaacaaggcagatcatctccaccatccggacgcagaatcttcccaactgtcagctgatttcccgaagccactactcccccatctacctgtcgtttgtcatgcttttggctgccctgagctggcagtacctgaccactctctcccaggtaacagaagactatgttcagactggagaacactgatcccaaatttgtccatagctgaagtccaccataaagtggatttactttttttctttaaggatggatgttgtgttctctttatttttttcctactactttaatccctaaaagaacgctgtgtggctgggacctttaggaaagtgaaatgcaggtgagaagaacctaaacatgaaaggaaagggtgcctcatcccagcaacctgtccttgtgggtgatgatcactgtgctgcttgtggctcatggcagagcattcagtgccacggtttaggtgaagtcgctgcatatgtgactgtcatgagatcctacttagtatgatcctggctagaatgataattaaaagtatttaatttgaagcaccatttgaatgttcgtaatagtagaaaatgatgtgaattttctttctgttcggctcctatttttctcatcattttgttttctttaattgggttgaatggagtagatagaaatatttatggtttaggtaacagttagatgtttcctaaga

SEQ ID NO: 133165 - DNA, 2013 bp, Homo sapiens
  Payload ID: 6022
  Gene Symbol: FDFT1
  Gene Name: farnesyl-diphosphate farnesyltransferase 1
  Uniprot ID: P37268
  ENST ID: ENST00000528812
  CDS Start-End: 601-1662
atctggggcaaggggcgcggcgagcagggccgacgcctgggtgttcccgtccccctttcctcgagccttccccctgtagggcccgggtggacgcggccgtcctggctgacctgtccctgcccccgcaagccgccctgggcatgagcgacttttgcgtggttcccggtggttgcgctccccgtttcgtcccctccgtgagcatcggcgcttaccggtattttaacccgagggttacacatctgaggcaatgtgggtgggttacgcgggagaggacgagtgagttttttggtaagcggaatgaactatgcagataacatcacatgaaggccgtttctggaatgaagtctgactcctccagtttcaccacctcttccggagctctccccgccttgctgccttccatcgcttcatcctcggtgcttcctgagttttaaaatcgcctatctacgcttccaagttccaatgagttatctaacgtctatggattagctaggtggttggtggaaggactcgctcagcagcagcctgaaaacttgctacaagtatctcaatcagaccagtcgcagtttcgcagctgttatccaggcgctggatggggaaatgcgcaacgcagtgtgcatattttatctggttctccgagctctggacacactggaagatgacatgaccatcagtgtggaaaagaaggtcccgctgttacacaactttcactctttcctttaccaaccagactggcggttcatggagagcaaggagaaggatcgccaggtgctggaggacttcccaacgatctcccttgagtttagaaatctggctgagaaataccaaacagtgattgccgacatttgccggagaatgggcattgggatggcagagtttttggataagcatgtgacctctgaacaggagtgggacaagtactgccactatgttgctgggctggtcggaattggcctttcccgtcttttctcagcctcagagtttgaagaccccttagttggtgaagatacagaacgtgccaactctatgggcctgtttttgcagaaaacaaacatcatccgtgactatctggaagaccagcaaggaggaagagagttctggcctcaagaggtttggagcaggtatgttaagaagttaggggattttgctaagccggagaatattgacttggccgtgcagtgcctgaatgaacttataaccaatgcactgcaccacatcccagatgtcatcacctacctttcgagactcagaaaccagagtgtgtttaacttctgtgctattccacaggtgatggccattgccactttggctgcctgttataataaccagcaggtgttcaaaggggcagtgaagattcggaaagggcaagcagtgaccctgatgatggatgccaccaatatgccagctgtcaaagccatcatatatcagtatatggaagagatttatcatagaatccccgactcagacccatcttctagcaaaacaaggcagatcatctccaccatccggacgcagaatcttcccaactgtcagctgatttcccgaagccactactcccccatctacctgtcgtttgtcatgcttttggctgccctgagctggcagtacctgaccactctctcccaggtaacagaagactatgttcagactggagaacactgatcccaaatttgtccatagctgaagtccaccataaagtggatttactttttttctttaaggatggatgttgtgttctctttatttttttcctactactttaatccctaaaagaacgctgtgtggctgggacctttaggaaagtgaaatgcaggtgagaagaacctaaacatgaaaggaaagggtgcctcatcccagcaacctgtccttgtgggtgatgatcactgtgctgcttgtggctcatggcagagcattcagtgccacggtttaggtgaagtcgctgcatatgtgactgtcatgagatcctacttagtatgatcctggctagaatgataattaaaagtatttaatttg

SEQ ID NO: 133166 - DNA, 741 bp, Homo sapiens
  Payload ID: 6022
  Gene Symbol: FDFT1
  Gene Name: farnesyl-diphosphate farnesyltransferase 1
  ENST ID: ENST00000530337
  CDS Start-End: 292-741
ggccttttcacggttttaggctctacagagagcggctgcagagctcacccggctggcaggagccaccgaggccggacacgtgggcgacttattgaccaagtggggaggaagcagccccgcactgctctcccgactgcggaccaccgttgggctcctgcgcatcctaagccccaccgcctcacctccagtccccacagcgttcgcgctcccagccggggtccagccggccggtgagcgcctggggaccgcagaggtgagagtcgcgcccgggagtccgccgcctgcgccaggatggagttcgtgaaatgccttggccaccccgaagagttctacaacctggtgcgcttccggatcgggggcaagcggaaggtgatgcccaagatggaccaggactcgctcagcagcagcctgaaaacttgctacaagtatctcaatcagaccagtcgcagtttcgcagctgttatccaggcgctggatggggaaatgcgcaacgcagtgtgcatattttatctggttctccgagctctggacacactggaagatgacatgaccatcagtgtggaaaagaaggtcccgctgttacacaactttcactctttcctttaccaaccagactggcggttcatggagagcaaggagaaggatcgccaggtgctggaggacttcccaacgatctcccttgagtttagaaatctggctgagaaataccaaacagtgattgccgacatttgccggagaatg

SEQ ID NO: 133167 - DNA, 1761 bp, Homo sapiens
  Payload ID: 6022
  Gene Symbol: FDFT1
  Gene Name: farnesyl-diphosphate farnesyltransferase 1
  Uniprot ID: P37268
  ENST ID: ENST00000530664
  CDS Start-End: 469-1530
aattgatggcgggggagccggatgtcagtggatggaaaattattacgaggaaacacaggggtgtgcattcttgctgaaggcaggccagagttatcagacatcacctgagggatggagggggatgtggaacctaatcggctgtctagggtgatcagatactgaagttgggggattctggtcaaatcaatttagcaggattcttggtaaaactgggcgatgcaaagacagatgcgttgagtacaaagtccaggccttattgggaagaggatttcagcggagcccgagtagagtttggtctagggagactctgtcactgggaggacgagcgagccgctcggaagtgcgctgggttcccttagcggccagtgggttctggactcgctcagcagcagcctgaaaacttgctacaagtatctcaatcagaccagtcgcagtttcgcagctgttatccaggcgctggatggggaaatgcgcaacgcagtgtgcatattttatctggttctccgagctctggacacactggaagatgacatgaccatcagtgtggaaaagaaggtcccgctgttacacaactttcactctttcctttaccaaccagactggcggttcatggagagcaaggagaaggatcgccaggtgctggaggacttcccaacgatctcccttgagtttagaaatctggctgagaaataccaaacagtgattgccgacatttgccggagaatgggcattgggatggcagagtttttggataagcatgtgacctctgaacaggagtgggacaagtactgccactatgttgctgggctggtcggaattggcctttcccgtcttttctcagcctcagagtttgaagaccccttagttggtgaagatacagaacgtgccaactctatgggcctgtttttgcagaaaacaaacatcatccgtgactatctggaagaccagcaaggaggaagagagttctggcctcaagaggtttggagcaggtatgttaagaagttaggggattttgctaagccggagaatattgacttggccgtgcagtgcctgaatgaacttataaccaatgcactgcaccacatcccagatgtcatcacctacctttcgagactcagaaaccagagtgtgtttaacttctgtgctattccacaggtgatggccattgccactttggctgcctgttataataaccagcaggtgttcaaaggggcagtgaagattcggaaagggcaagcagtgaccctgatgatggatgccaccaatatgccagctgtcaaagccatcatatatcagtatatggaagagatttatcatagaatccccgactcagacccatcttctagcaaaacaaggcagatcatctccaccatccggacgcagaatcttcccaactgtcagctgatttcccgaagccactactcccccatctacctgtcgtttgtcatgcttttggctgccctgagctggcagtacctgaccactctctcccaggtaacagaagactatgttcagactggagaacactgatcccaaatttgtccatagctgaagtccaccataaagtggatttactttttttctttaaggatggatgttgtgttctctttatttttttcctactactttaatccctaaaagaacgctgtgtggctgggacctttaggaaagtgaaatgcaggtgagaagaacctaaacatgaaaggaaagggtgcctcatcccagcaacctgtccttgtgggtgatgatcactgtgctgct

SEQ ID NO: 133168 - DNA, 1773 bp, Homo sapiens
  Payload ID: 6022
  Gene Symbol: FDFT1
  Gene Name: farnesyl-diphosphate farnesyltransferase 1
  ENST ID: ENST00000525607
  CDS Start-End: 93-230
gaagcacctactccacaggtccagccggccggtgagcgcctggggaccgcagaggtgagagtcgcgcccgggagtccgccgcctgcgccaggatggagttcgtgaaatgccttggccaccccgaagagttctacaacctggtgcgcttccggatcgggggcaagcggaaggtgatgcccaagatggaccagataacatcacatgaaggccgtttctggaatgaagtctgactcctccagtttcaccacctcttccggagctctccccgccttgctgccttccatcgcttcatcctcggtgcttcctgagttttaaaatcgcctatctacgcttccaagttccaatgagttatctaacgtctatggattagctaggtggttggtggaaggactcgctcagcagcagcctgaaaacttgctacaagtatctcaatcagaccagtcgcagtttcgcagctgttatccaggcgctggatggggaaatgcgcaacgcagtgtgcatattttatctggttctccgagctctggacacactggaagatgacatgaccatcagtgtggaaaagaaggtcccgctgttacacaactttcactctttcctttaccaaccagactggcggttcatggagagcaaggagaaggatcgccaggtgctggaggacttcccaacgatctcccttgagtttagaaatctggctgagaaataccaaacagtgattgccgacatttgccggagaatgggcattgggatggcagagtttttggataagcatgtgacctctgaacaggagtgggacaagtactgccactatgttgctgggctggtcggaattggcctttcccgtcttttctcagcctcagagtttgaagaccccttagttggtgaagatacagaacgtgccaactctatgggcctgtttttgcagaaaacaaacatcatccgtgactatctggaagaccagcaaggaggaagagagttctggcctcaagaggtttggagcaggtatgttaagaagttaggggattttgctaagccggagaatattgacttggccgtgcagtgcctgaatgaacttataaccaatgcactgcaccacatcccagatgtcatcacctacctttcgagactcagaaaccagagtgtgtttaacttctgtgctattccacaggtgatggccattgccactttggctgcctgttataataaccagcaggtgttcaaaggggcagtgaagattcggaaagggcaagcagtgaccctgatgatggatgccaccaatatgccagctgtcaaagccatcatatatcagtatatggaagagatttatcatagaatccccgactcagacccatcttctagcaaaacaaggcagatcatctccaccatccggacgcagaatcttcccaactgtcagctgatttcccgaagccactactcccccatctacctgtcgtttgtcatgcttttggctgccctgagctggcagtacctgaccactctctcccaggtaacagaagactatgttcagactggagaacactgatcccaaatttgtccatagctgaagtccaccataaagtggatttactttttttctttaaggatggatgttgtgttctctttatttttttcctactactttaatccctaaaagaacgctgtgtggctgggacctttaggaaagtgaaatgcaggtgagaagaacctaaacatgaaaggaaagggtgcctcatcccagcaacctgtccttgtgggtgatgatcactgtgctgc

SEQ ID NO: 133169 - DNA, 898 bp, Homo sapiens
  Payload ID: 6022
  Gene Symbol: FDFT1
  Gene Name: farnesyl-diphosphate farnesyltransferase 1
  ENST ID: ENST00000525283
  CDS Start-End: 93-296
gaagcacctactccacaggtccagccggccggtgagcgcctggggaccgcagaggtgagagtcgcgcccgggagtccgccgcctgcgccaggatggagttcgtgaaatgccttggccaccccgaagagttctacaacctggtgcgcttccggatcgggggcaagcggaaggtgatgcccaagatggaccagactggcggttcatggagagcaaggagaaggatcgccaggtgctggaggacttcccaacgatctcccttgagtttagaaatctggctgagaaataccaaacagtgattgccgacatttgccggagaatgggcattgggatggcagagtttttggataagcatgtgacctctgaacaggagtgggacaagtactgccactatgttgctgggctggtcggaattggcctttcccgtcttttctcagcctcagagtttgaagaccccttagttggtgaagatacagaacgtgccaactctatgggcctgtttttgcagaaaacaaacatcatccgtgactatctggaagaccagcaaggaggaagagagttctggcctcaagaggtttggagcaggtatgttaagaagttaggggattttgctaagccggagaatattgacttggccgtgcagtgcctgaatgaacttataaccaatgcactgcaccacatcccagatgtcatcacctacctttcgagactcagaaaccagagtgtgtttaacttctgtgctattccacaggtgatggccattgccactttggctgcctgttataataaccagcaggtgttcaaaggggcagtgaagattcggaaagggcaagcagtgaccctgatgatggatgccaccaatatgccagctgtcaaagccatcatatatcagtatatggaa

SEQ ID NO: 133170 - DNA, 1596 bp, Homo sapiens
  Payload ID: 6022
  Gene Symbol: FDFT1
  Gene Name: farnesyl-diphosphate farnesyltransferase 1
  ENST ID: ENST00000525900
  CDS Start-End: 68-1300
cggccggtgagcgcctggggaccgcagaggtgagagtcgcgcccgggagtccgccgcctgcgccaggatggagttcgtgaaatgccttggccaccccgaagagttctacaacctggtgcgcttccggatcgggggcaagcggaaggactcgctcagcagcagcctgaaaacttgctacaagtatctcaatcagaccagtcgcagtttcgcagctgttatccaggcgctggatggggaaatgcgcaacgcagtgtgcatattttatctggttctccgagctctggacacactggaagatgacatgaccatcagtgtggaaaagaaggtcccgctgttacacaactttcactctttcctttaccaaccagactggcggttcatggagagcaaggagaaggatcgccaggtgctggaggacttcccaacgatctcccttgagtttagaaatctggctgagaaataccaaacagtgattgccgacatttgccggagaatgggcattgggatggcagagtttttggataagcatgtgacctctgaacaggagtgggacaagtactgccactatgttgctgggctggtcggaattggcctttcccgtcttttctcagcctcagagtttgaagaccccttagttggtgaagatacagaacgtgccaactctatgggcctgtttttgcagaaaacaaacatcatccgtgactatctggaagaccagcaaggaggaagagagttctggcctcaagaggtttggagcaggtatgttaagaagttaggggattttgctaagccggagaatattgacttggccgtgcagtgcctgaatgaacttataaccaatgcactgcaccacatcccagatgtcatcacctacctttcgagactcagaaaccagagtgtgtttaacttctgtgctattccacaggtgatggccattgccactttggctgcctgttataataaccagcaggtgttcaaaggggcagtgaagattcggaaagggcaagcagtgaccctgatgatggatgccaccaatatgccagctgtcaaagccatcatatatcagtatatggaagagatttatcatagaatccccgactcagacccatcttctagcaaaacaaggcagatcatctccaccatccggacgcagaatcttcccaactgtcagctgatttcccgaagccactactcccccatctacctgtcgtttgtcatgcttttggctgccctgagctggcagtacctgaccactctctcccaggtaacagaagactatgttcagactggagaacactgatcccaaatttgtccatagctgaagtccaccataaagtggatttactttttttctttaaggatggatgttgtgttctctttatttttttcctactactttaatccctaaaagaacgctgtgtggctgggacctttaggaaagtgaaatgcaggtgagaagaacctaaacatgaaaggaaagggtgcctcatcccagcaacctgtccttgtgggtgatgatcactgtgctgcttgtggctcatggcagagcattcagtgccacggtttaggtgaagtcgctgcatatgtgactgtcat

SEQ ID NO: 133171 - DNA, 932 bp, Homo sapiens
  Payload ID: 6022
  Gene Symbol: FDFT1
  Gene Name: farnesyl-diphosphate farnesyltransferase 1
  ENST ID: ENST00000529464
  CDS Start-End: 88-243
acctactccacaggtccagccggccggtgagcgcctggggaccgcagaggtgagagtcgcgcccgggagtccgccgcctgcgccaggatggagttcgtgaaatgccttggccaccccgaagagttctacaacctggtgcgcttccggatcgggggcaagcggaaggtgatgcccaagatggaccagcaacgcagtgtgcatattttatctggttctccgagctctggacacactggaagatgacatgaccatcagtgtggaaaagaaggtcccgctgttacacaactttcactctttcctttaccaaccagactggcggttcatggagagcaaggagaaggatcgccaggtgctggaggacttcccaacgatctcccttgagtttagaaatctggctgagaaataccaaacagtgattgccgacatttgccggagaatgggcattgggatggcagagtttttggataagcatgtgacctctgaacaggagtgggacaagtactgccactatgttgctgggctggtcggaattggcctttcccgtcttttctcagcctcagagtttgaagaccccttagttggtgaagatacagaacgtgccaactctatgggcctgtttttgcagaaaacaaacatcatccgtgactatctggaagaccagcaaggaggaagagagttctggcctcaagaggtttggagcaggtatgttaagaagttaggggattttgctaagccggagaatattgacttggccgtgcagtgcctgaatgaacttataaccaatgcactgcaccacatcccagatgtcatcacctacctttcgagactcagaaaccagagtgtgtttaacttctgtgctattccacaggtgatggccattgccactttggctgcctgttataataaccagcaggtgttcaaaggggcagtga

SEQ ID NO: 133172 - DNA, 583 bp, Homo sapiens
  Payload ID: 6022
  Gene Symbol: FDFT1
  Gene Name: farnesyl-diphosphate farnesyltransferase 1
  ENST ID: ENST00000532266
  CDS Start-End: 97-438
caggactcgctcagcagcagcctgaaaacttgctacaagtatctcaatcagaccagtcgcagtttcgcagctgttatccaggcgctggatggggaaatgcgcaacgcagtgtgcatattttatctggttctccgagctctggacacactggaagatgacatgaccatcagtgtggaaaagaaggtcccgctgttacacaactttcactctttcctttaccaaccagactggcggttcatggagagcaaggagaaggatcgccaggtgctggaggacttcccaacgatctcccttgagtttagaaatctggctgagaaataccaaacagtgattgccgacatttgccggagaatgggcattgggatggcagagtttttggataagcatgtgacctctgaacaggagtgggacaagcctcagagtttgaagaccccttagttggtgaagatacagaacgtgccaactctatgggcctgtttttgcagaaaacaaacatcatccgtgactatctggaagaccagcaaggaggaagagagttctggcctcaagaggtttggagcaggtatgttaagaagttagggga

SEQ ID NO: 133173 - DNA, 1472 bp, Homo sapiens
  Payload ID: 6022
  Gene Symbol: FDFT1
  Gene Name: farnesyl-diphosphate farnesyltransferase 1
  Uniprot ID: P37268
  ENST ID: ENST00000525777
  CDS Start-End: 470-1468
gcacattacacccatgaacttagaccagttgcctttatgtatgatcgtatttatactgagaagttactgtgttttttgactttcttttctatttgctacatattagttcggtctaaacgtttggtcttctggtctccatagttctacattggttaaatgcaactcacttctgggagtagtggtgacattcaactagtaggctttttaataaactacagaagttcattactctcatgtaaggaaggaaaactaatgtaactttcgttaagtatgaaaagcgttggatatccttatagttctttagagttaagggtgagatgggtttagaaagtggccaggcacaagttattttaaaataaaaaatctttggctgtttgttccaatatattaatagttttcccttttttacagcaacgcagtgtgcatattttatctggttctccgagctctggacacactggaagatgacatgaccatcagtgtggaaaagaaggtcccgctgttacacaactttcactctttcctttaccaaccagactggcggttcatggagagcaaggagaaggatcgccaggtgctggaggacttcccaacgatctcccttgagtttagaaatctggctgagaaataccaaacagtgattgccgacatttgccggagaatgggcattgggatggcagagtttttggataagcatgtgacctctgaacaggagtgggacaagtactgccactatgttgctgggctggtcggaattggcctttcccgtcttttctcagcctcagagtttgaagaccccttagttggtgaagatacagaacgtgccaactctatgggcctgtttttgcagaaaacaaacatcatccgtgactatctggaagaccagcaaggaggaagagagttctggcctcaagaggtttggagcaggtatgttaagaagttaggggattttgctaagccggagaatattgacttggccgtgcagtgcctgaatgaacttataaccaatgcactgcaccacatcccagatgtcatcacctacctttcgagactcagaaaccagagtgtgtttaacttctgtgctattccacaggtgatggccattgccactttggctgcctgttataataaccagcaggtgttcaaaggggcagtgaagattcggaaagggcaagcagtgaccctgatgatggatgccaccaatatgccagctgtcaaagccatcatatatcagtatatggaagagatttatcatagaatccccgactcagacccatcttctagcaaaacaaggcagatcatctccaccatccggacgcagaatcttcccaactgtcagctgatttcccgaagccactactcccccatctacctgtcgtttgtcatgcttttggctgccctgagctggcagtacctgaccactctctcccaggtaacagaagactatgttcagactggagaacactgatccc

SEQ ID NO: 133174 - DNA, 2289 bp, Homo sapiens
  Payload ID: 6022
  Gene Symbol: FDFT1
  Gene Name: farnesyl-diphosphate farnesyltransferase 1
  Uniprot ID: P37268
  ENST ID: ENST00000538689
  CDS Start-End: 533-1594
aaaaacggtggcaacacgctgggtttgctttacaacgcttgggaagctttgttgtttgcaataaattttaatacttgtctgtttcggtctgcactgcctttatgagctgtaacactcacagggtaggtttgcagcttcactcctgaagccagtaagacaacgaacccactgggagaaacaaacaactccagacgcgccgacttaagagctgtaatactcgctgtgacggtctgcagcttcactcctgagccagcgagaccacgaacccaccagaaggaagaaactccgaacacatctgaacatcagaaggaacagactccggacacgccgcctttaagaactgtaacactcaccgcgagggtgggcggtttcattcctgaagtcagtgagaccaagaaccaaccaattccggacacacttggactcgacagactctaaggactcgctcagcagcagcctgaaaacttgctacaagtatctcaatcagaccagtcgcagtttcgcagctgttatccaggcgctggatggggaaatgcgcaacgcagtgtgcatattttatctggttctccgagctctggacacactggaagatgacatgaccatcagtgtggaaaagaaggtcccgctgttacacaactttcactctttcctttaccaaccagactggcggttcatggagagcaaggagaaggatcgccaggtgctggaggacttcccaacgatctcccttgagtttagaaatctggctgagaaataccaaacagtgattgccgacatttgccggagaatgggcattgggatggcagagtttttggataagcatgtgacctctgaacaggagtgggacaagtactgccactatgttgctgggctggtcggaattggcctttcccgtcttttctcagcctcagagtttgaagaccccttagttggtgaagatacagaacgtgccaactctatgggcctgtttttgcagaaaacaaacatcatccgtgactatctggaagaccagcaaggaggaagagagttctggcctcaagaggtttggagcaggtatgttaagaagttaggggattttgctaagccggagaatattgacttggccgtgcagtgcctgaatgaacttataaccaatgcactgcaccacatcccagatgtcatcacctacctttcgagactcagaaaccagagtgtgtttaacttctgtgctattccacaggtgatggccattgccactttggctgcctgttataataaccagcaggtgttcaaaggggcagtgaagattcggaaagggcaagcagtgaccctgatgatggatgccaccaatatgccagctgtcaaagccatcatatatcagtatatggaagagatttatcatagaatccccgactcagacccatcttctagcaaaacaaggcagatcatctccaccatccggacgcagaatcttcccaactgtcagctgatttcccgaagccactactcccccatctacctgtcgtttgtcatgcttttggctgccctgagctggcagtacctgaccactctctcccaggtaacagaagactatgttcagactggagaacactgatcccaaatttgtccatagctgaagtccaccataaagtggatttactttttttctttaaggatggatgttgtgttctctttatttttttcctactactttaatccctaaaagaacgctgtgtggctgggacctttaggaaagtgaaatgcaggtgagaagaacctaaacatgaaaggaaagggtgcctcatcccagcaacctgtccttgtgggtgatgatcactgtgctgcttgtggctcatggcagagcattcagtgccacggtttaggtgaagtcgctgcatatgtgactgtcatgagatcctacttagtatgatcctggctagaatgataattaaaagtatttaatttgaagcaccatttgaatgttcgtaatagtagaaaatgatgtgaattttctttctgttcggctcctatttttctcatcattttgttttctttaattgggttgaatggagtagatagaaatatttatggtttaggtaacagttagatgtttcctaagaatgcaaactgccttttccacacaaaggctgggaataaaattctgggtattctcgtattctcatttaaaggagtttagctttcagagagaaacagcaggattgcttttgaccttttagaagattggtctccagtaaaggtggacatttttgagatttttataataaagaatttaattgctctgcatttgtc

SEQ ID NO: 133175 - DNA, 2660 bp, Homo sapiens
  Payload ID: 6022
  Gene Symbol: FDFT1
  Gene Name: farnesyl-diphosphate farnesyltransferase 1
  Uniprot ID: P37268
  ENST ID: ENST00000618539
  CDS Start-End: 712-1965
aaaaacggtggcaacacgctgggtttgctttacaacgcttgggaagctttgttgtttgcaataaattttaatacttgtctgtttcggtctgcactgcctttatgagctgtaacactcacagggtaggtttgcagcttcactcctgaagccagtaagacaacgaacccactgggagaaacaaacaactccagacgcgccgacttaagagctgtaatactcgctgtgacggtctgcagcttcactcctgagccagcgagaccacgaacccaccagaaggaagaaactccgaacacatctgaacatcagaaggaacagactccggacacgccgcctttaagaactgtaacactcaccgcgagggtgggcggtttcattcctgaagtcagtgagaccaagaaccaaccaattccggacacacttggactcgacagactctaaggctctacagagagcggctgcagagctcacccggctggcaggagccaccgaggccggacacgtgggcgacttattgaccaagtggggaggaagcagccccgcactgctctcccgactgcggaccaccgttgggctcctgcgcatcctaagccccaccgcctcacctccagtccccacagcgttcgcgctcccagccggggtccagccggccggtgagcgcctggggaccgcagaggtgagagtcgcgcccgggagtccgccgcctgcgccaggatggagttcgtgaaatgccttggccaccccgaagagttctacaacctggtgcgcttccggatcgggggcaagcggaaggtgatgcccaagatggaccaggactcgctcagcagcagcctgaaaacttgctacaagtatctcaatcagaccagtcgcagtttcgcagctgttatccaggcgctggatggggaaatgcgcaacgcagtgtgcatattttatctggttctccgagctctggacacactggaagatgacatgaccatcagtgtggaaaagaaggtcccgctgttacacaactttcactctttcctttaccaaccagactggcggttcatggagagcaaggagaaggatcgccaggtgctggaggacttcccaacgatctcccttgagtttagaaatctggctgagaaataccaaacagtgattgccgacatttgccggagaatgggcattgggatggcagagtttttggataagcatgtgacctctgaacaggagtgggacaagtactgccactatgttgctgggctggtcggaattggcctttcccgtcttttctcagcctcagagtttgaagaccccttagttggtgaagatacagaacgtgccaactctatgggcctgtttttgcagaaaacaaacatcatccgtgactatctggaagaccagcaaggaggaagagagttctggcctcaagaggtttggagcaggtatgttaagaagttaggggattttgctaagccggagaatattgacttggccgtgcagtgcctgaatgaacttataaccaatgcactgcaccacatcccagatgtcatcacctacctttcgagactcagaaaccagagtgtgtttaacttctgtgctattccacaggtgatggccattgccactttggctgcctgttataataaccagcaggtgttcaaaggggcagtgaagattcggaaagggcaagcagtgaccctgatgatggatgccaccaatatgccagctgtcaaagccatcatatatcagtatatggaagagatttatcatagaatccccgactcagacccatcttctagcaaaacaaggcagatcatctccaccatccggacgcagaatcttcccaactgtcagctgatttcccgaagccactactcccccatctacctgtcgtttgtcatgcttttggctgccctgagctggcagtacctgaccactctctcccaggtaacagaagactatgttcagactggagaacactgatcccaaatttgtccatagctgaagtccaccataaagtggatttactttttttctttaaggatggatgttgtgttctctttatttttttcctactactttaatccctaaaagaacgctgtgtggctgggacctttaggaaagtgaaatgcaggtgagaagaacctaaacatgaaaggaaagggtgcctcatcccagcaacctgtccttgtgggtgatgatcactgtgctgcttgtggctcatggcagagcattcagtgccacggtttaggtgaagtcgctgcatatgtgactgtcatgagatcctacttagtatgatcctggctagaatgataattaaaagtatttaatttgaagcaccatttgaatgttcgtaatagtagaaaatgatgtgaattttctttctgttcggctcctatttttctcatcattttgttttctttaattgggttgaatggagtagatagaaatatttatggtttaggtaacagttagatgtttcctaagaatgcaaactgccttttccacacaaaggctgggaataaaattctgggtattctcgtattctcatttaaaggagtttagctttcagagagaaacagcaggattgcttttgaccttttagaagattggtctccagtaaaggtggacatttttgagatttttataataaagaatttaattgctctgcatttgtc

SEQ ID NO: 133176 - DNA, 2462 bp, Homo sapiens
  Payload ID: 6022
  Gene Symbol: FDFT1
  Gene Name: farnesyl-diphosphate farnesyltransferase 1
  Uniprot ID: P37268
  ENST ID: ENST00000615631
  CDS Start-End: 514-1767
aaaaacggtggcaacacgctgggtttgctttacaacgcttgggaagctttgttgtttgcaataaattttaatacttgtctgtttcggtctgcactgcctttatgagctgtaacactcacagggtaggtttgcagcttcactcctgaagccagtaagacaacgaacccactgggagaaacaaacaactccagacgcgccgacttaagagctgtaatactcgctgtgacggtctgcagcttcactcctgagccagcgagaccacgaacccaccagaaggaagaaactccgaacacatctgaacatcagaaggaacagactccggacacgccgcctttaagaactgtaacactcaccgcgagggtgggcggtttcattcctgaagtcagtgagaccaagaaccaaccaattccggacacacttggactcgacagactctaaggtccagccggccggtgagcgcctggggaccgcagaggtgagagtcgcgcccgggagtccgccgcctgcgccaggatggagttcgtgaaatgccttggccaccccgaagagttctacaacctggtgcgcttccggatcgggggcaagcggaaggtgatgcccaagatggaccaggactcgctcagcagcagcctgaaaacttgctacaagtatctcaatcagaccagtcgcagtttcgcagctgttatccaggcgctggatggggaaatgcgcaacgcagtgtgcatattttatctggttctccgagctctggacacactggaagatgacatgaccatcagtgtggaaaagaaggtcccgctgttacacaactttcactctttcctttaccaaccagactggcggttcatggagagcaaggagaaggatcgccaggtgctggaggacttcccaacgatctcccttgagtttagaaatctggctgagaaataccaaacagtgattgccgacatttgccggagaatgggcattgggatggcagagtttttggataagcatgtgacctctgaacaggagtgggacaagtactgccactatgttgctgggctggtcggaattggcctttcccgtcttttctcagcctcagagtttgaagaccccttagttggtgaagatacagaacgtgccaactctatgggcctgtttttgcagaaaacaaacatcatccgtgactatctggaagaccagcaaggaggaagagagttctggcctcaagaggtttggagcaggtatgttaagaagttaggggattttgctaagccggagaatattgacttggccgtgcagtgcctgaatgaacttataaccaatgcactgcaccacatcccagatgtcatcacctacctttcgagactcagaaaccagagtgtgtttaacttctgtgctattccacaggtgatggccattgccactttggctgcctgttataataaccagcaggtgttcaaaggggcagtgaagattcggaaagggcaagcagtgaccctgatgatggatgccaccaatatgccagctgtcaaagccatcatatatcagtatatggaagagatttatcatagaatccccgactcagacccatcttctagcaaaacaaggcagatcatctccaccatccggacgcagaatcttcccaactgtcagctgatttcccgaagccactactcccccatctacctgtcgtttgtcatgcttttggctgccctgagctggcagtacctgaccactctctcccaggtaacagaagactatgttcagactggagaacactgatcccaaatttgtccatagctgaagtccaccataaagtggatttactttttttctttaaggatggatgttgtgttctctttatttttttcctactactttaatccctaaaagaacgctgtgtggctgggacctttaggaaagtgaaatgcaggtgagaagaacctaaacatgaaaggaaagggtgcctcatcccagcaacctgtccttgtgggtgatgatcactgtgctgcttgtggctcatggcagagcattcagtgccacggtttaggtgaagtcgctgcatatgtgactgtcatgagatcctacttagtatgatcctggctagaatgataattaaaagtatttaatttgaagcaccatttgaatgttcgtaatagtagaaaatgatgtgaattttctttctgttcggctcctatttttctcatcattttgttttctttaattgggttgaatggagtagatagaaatatttatggtttaggtaacagttagatgtttcctaagaatgcaaactgccttttccacacaaaggctgggaataaaattctgggtattctcgtattctcatttaaaggagtttagctttcagagagaaacagcaggattgcttttgaccttttagaagattggtctccagtaaaggtggacatttttgagatttttataataaagaatttaattgctctgcatttgtc

SEQ ID NO: 133177 - DNA, 1987 bp, Homo sapiens
  Payload ID: 6022
  Gene Symbol: FDFT1
  Gene Name: farnesyl-diphosphate farnesyltransferase 1
  Uniprot ID: P37268
  ENST ID: ENST00000622850
  CDS Start-End: 231-1292
agggcccgggtggacgcggccgtcctggctgacctgtccctgcccccgcaagccgccctgggcatgagcgacttttgcgtggttcccggtggttgcgctccccgtttcgtcccctccgtgagcatcggcgcttaccggactcgctcagcagcagcctgaaaacttgctacaagtatctcaatcagaccagtcgcagtttcgcagctgttatccaggcgctggatggggaaatgcgcaacgcagtgtgcatattttatctggttctccgagctctggacacactggaagatgacatgaccatcagtgtggaaaagaaggtcccgctgttacacaactttcactctttcctttaccaaccagactggcggttcatggagagcaaggagaaggatcgccaggtgctggaggacttcccaacgatctcccttgagtttagaaatctggctgagaaataccaaacagtgattgccgacatttgccggagaatgggcattgggatggcagagtttttggataagcatgtgacctctgaacaggagtgggacaagtactgccactatgttgctgggctggtcggaattggcctttcccgtcttttctcagcctcagagtttgaagaccccttagttggtgaagatacagaacgtgccaactctatgggcctgtttttgcagaaaacaaacatcatccgtgactatctggaagaccagcaaggaggaagagagttctggcctcaagaggtttggagcaggtatgttaagaagttaggggattttgctaagccggagaatattgacttggccgtgcagtgcctgaatgaacttataaccaatgcactgcaccacatcccagatgtcatcacctacctttcgagactcagaaaccagagtgtgtttaacttctgtgctattccacaggtgatggccattgccactttggctgcctgttataataaccagcaggtgttcaaaggggcagtgaagattcggaaagggcaagcagtgaccctgatgatggatgccaccaatatgccagctgtcaaagccatcatatatcagtatatggaagagatttatcatagaatccccgactcagacccatcttctagcaaaacaaggcagatcatctccaccatccggacgcagaatcttcccaactgtcagctgatttcccgaagccactactcccccatctacctgtcgtttgtcatgcttttggctgccctgagctggcagtacctgaccactctctcccaggtaacagaagactatgttcagactggagaacactgatcccaaatttgtccatagctgaagtccaccataaagtggatttactttttttctttaaggatggatgttgtgttctctttatttttttcctactactttaatccctaaaagaacgctgtgtggctgggacctttaggaaagtgaaatgcaggtgagaagaacctaaacatgaaaggaaagggtgcctcatcccagcaacctgtccttgtgggtgatgatcactgtgctgcttgtggctcatggcagagcattcagtgccacggtttaggtgaagtcgctgcatatgtgactgtcatgagatcctacttagtatgatcctggctagaatgataattaaaagtatttaatttgaagcaccatttgaatgttcgtaatagtagaaaatgatgtgaattttctttctgttcggctcctatttttctcatcattttgttttctttaattgggttgaatggagtagatagaaatatttatggtttaggtaacagttagatgtttcctaagaatgcaaactgccttttccacacaaaggctgggaataaaattctgggtattctcgtattctcatttaaaggagtttagctttcagagagaaacagcaggattgcttttgaccttttagaagattggtctccagtaaaggtggacatttttgagatttttataataaagaatttaattgctctgcatttgtc

SEQ ID NO: 133178 - DNA, 2368 bp, Homo sapiens
  Payload ID: 6022
  Gene Symbol: FDFT1
  Gene Name: farnesyl-diphosphate farnesyltransferase 1
  Uniprot ID: P37268
  ENST ID: ENST00000623368
  CDS Start-End: 612-1673
aatcagcgcccgtcagcccaccccacgaggccgcagctagccccgctggcggccgaggccggttgaagtgggcggagcggcgggcggggcgtcgccgtactaggcctgccccctgtccggccagcccctcgaagcacctactccacaggtccagccggccggtgagcgcctggggaccgcagaggtgagagtcgcgcccgggagtccgccgcctgcgccaggatggagttcgtgaaatgccttggccaccccgaagagttctacaacctggtgcgcttccggatcgggggcaagcggaaggtgatgcccaagatggaccagataacatcacatgaaggccgtttctggaatgaagtctgactcctccagtttcaccacctcttccggagctctccccgccttgctgccttccatcgcttcatcctcggtgcttcctgagttttaaaatcgcctatctacgcttccaagttccaatgagttatctaacgtctatggattagctaggtggttggtggaaggactcgctcagcagcagcctgaaaacttgctacaagtatctcaatcagaccagtcgcagtttcgcagctgttatccaggcgctggatggggaaatgcgcaacgcagtgtgcatattttatctggttctccgagctctggacacactggaagatgacatgaccatcagtgtggaaaagaaggtcccgctgttacacaactttcactctttcctttaccaaccagactggcggttcatggagagcaaggagaaggatcgccaggtgctggaggacttcccaacgatctcccttgagtttagaaatctggctgagaaataccaaacagtgattgccgacatttgccggagaatgggcattgggatggcagagtttttggataagcatgtgacctctgaacaggagtgggacaagtactgccactatgttgctgggctggtcggaattggcctttcccgtcttttctcagcctcagagtttgaagaccccttagttggtgaagatacagaacgtgccaactctatgggcctgtttttgcagaaaacaaacatcatccgtgactatctggaagaccagcaaggaggaagagagttctggcctcaagaggtttggagcaggtatgttaagaagttaggggattttgctaagccggagaatattgacttggccgtgcagtgcctgaatgaacttataaccaatgcactgcaccacatcccagatgtcatcacctacctttcgagactcagaaaccagagtgtgtttaacttctgtgctattccacaggtgatggccattgccactttggctgcctgttataataaccagcaggtgttcaaaggggcagtgaagattcggaaagggcaagcagtgaccctgatgatggatgccaccaatatgccagctgtcaaagccatcatatatcagtatatggaagagatttatcatagaatccccgactcagacccatcttctagcaaaacaaggcagatcatctccaccatccggacgcagaatcttcccaactgtcagctgatttcccgaagccactactcccccatctacctgtcgtttgtcatgcttttggctgccctgagctggcagtacctgaccactctctcccaggtaacagaagactatgttcagactggagaacactgatcccaaatttgtccatagctgaagtccaccataaagtggatttactttttttctttaaggatggatgttgtgttctctttatttttttcctactactttaatccctaaaagaacgctgtgtggctgggacctttaggaaagtgaaatgcaggtgagaagaacctaaacatgaaaggaaagggtgcctcatcccagcaacctgtccttgtgggtgatgatcactgtgctgcttgtggctcatggcagagcattcagtgccacggtttaggtgaagtcgctgcatatgtgactgtcatgagatcctacttagtatgatcctggctagaatgataattaaaagtatttaatttgaagcaccatttgaatgttcgtaatagtagaaaatgatgtgaattttctttctgttcggctcctatttttctcatcattttgttttctttaattgggttgaatggagtagatagaaatatttatggtttaggtaacagttagatgtttcctaagaatgcaaactgccttttccacacaaaggctgggaataaaattctgggtattctcgtattctcatttaaaggagtttagctttcagagagaaacagcaggattgcttttgaccttttagaagattggtctccagtaaaggtggacatttttgagatttttataataaagaatttaattgctctgcatttgtc

SEQ ID NO: 133179 - DNA, 1840 bp, Homo sapiens
  Payload ID: 6023
  Gene Symbol: FNTA
  Gene Name: farnesyltransferase, CAAX box, alpha
  Uniprot ID: P49354
  ENST ID: ENST00000302279
  CDS Start-End: 195-1334
cgcgcaaactcgcggcggacgcagccagcacccgcagccagcacccgcacactcccacccataccccggcagcccgccaagactctctggcccgcacctctatggtaggaaacccagaaaacaggaagtggcctcgagagggggaagggaggggcggggcctccgccaccacctcagctgcggaccgaggcgagatggcggccaccgagggggtcggggaggctgcgcaagggggcgagcccgggcagccggcgcaacccccgccccagccgcacccaccgccgccccagcagcagcacaaggaagagatggcggccgaggctggggaagccgtggcgtcccccatggacgacgggtttgtgagcctggactcgccctcctatgtcctgtacagggacagagcagaatgggctgatatagatccggtgccgcagaatgatggccccaatcccgtggtccagatcatttatagtgacaaatttagagatgtttatgattacttccgagctgtcctgcagcgtgatgaaagaagtgaacgagcttttaagctaacccgggatgctattgagttaaatgcagccaattatacagtgtggcatttccggagagttcttttgaagtcacttcagaaggatctacatgaggaaatgaactacatcactgcaataattgaggagcagcccaaaaactatcaagtttggcatcataggcgagtattagtggaatggctaagagatccatctcaggagcttgaatttattgctgatattcttaatcaggatgcaaagaattatcatgcctggcagcatcgacaatgggttattcaggaatttaaactttgggataatgagctgcagtatgtggaccaacttctgaaagaggatgtgagaaataactctgtctggaaccaaagatacttcgttatttctaacaccactggctacaatgatcgtgctgtattggagagagaagtccaatacactctggaaatgattaaactagtaccacataatgaaagtgcatggaactatttgaaagggattttgcaggatcgtggtctttccaaatatcctaatctgttaaatcaattacttgatttacaaccaagtcatagttccccctacctaattgcctttcttgtggatatctatgaagacatgctagaaaatcagtgtgacaataaggaagacattcttaataaagcattagagttatgtgaaatcctagctaaagaaaaggacactataagaaaggaatattggagatacattggaagatcccttcaaagcaaacacagcacagaaaatgactcaccaacaaatgtacagcaataacaccatccagaagaacttgatggaatgcttttattttttattaagggaccctgcaggagtttcacacgagagtggtccttccctttgcctgtggtgtaaaagtgcatcacacaggtattgctttttaacaagaactgatgctccttgggtgctgctgctactcagactagctctaagtaatgtgattcttctaaagcaaagtcattggatgggaggaggaagaaaaagtcccataaaggaacttttgtagtcttatcaacatataatctaatcccttagcatcagctcctccctcagtggtacatgcgtcaagatttgtagcagtaataactgcaggtcacttgtatgtaatggatgtgaggtagccgaagtttggttcagtaagcagggaatacagtcgttccatcagagctggtctgcacactcacattatcttgctatcactgtaaccaactaatgccaaaagaacggttttgtaataaaattatagctgtatctaaaaacaa

SEQ ID NO: 133180 - DNA, 590 bp, Homo sapiens
  Payload ID: 6023
  Gene Symbol: FNTA
  Gene Name: farnesyltransferase, CAAX box, alpha
  ENST ID: ENST00000531266
  CDS Start-End: 1-590
ggggtcggggaggctgcgcaagggggcgagcccgggcagccggcgcaacccccgccccagccgcacccaccgccgccccagcagcagcacaaggaagagatggcggccgaggctggggaagccgtggcgtcccccatggacgacggggacagagcagaatgggctgatatagatccggtgccgcagaatgatggccccaatcccgtggtccagatcatttatagtgacaaatttagagatgtttatgattacttccgagctgtcctgcagcgtgatgaaagaagtgaacgagcttttaagctaacccgggatgctattgagttaaatgcagccaattatacagtgtggcatttccggagagttcttttgaagtcacttcagaaggatctacatgaggaaatgaactacatcactgcaataattgaggagcagcccaaaaactatcaagtttggcatcataggcgagtattagtggaatggctaagagatccatctcaggagcttgaatttattgctgatattcttaatcaggatgcaaagaattatcatgcctggcagcatcgacaatgggttattcaggaatttaaact

SEQ ID NO: 133181 - DNA, 581 bp, Homo sapiens
  Payload ID: 6023
  Gene Symbol: FNTA
  Gene Name: farnesyltransferase, CAAX box, alpha
  ENST ID: ENST00000533998
  CDS Start-End: 17-370
tgcggaccgaggcgagatggcggccaccgagggggtcggggaggctgcgcaagggggcgagcccgggcagccggcgcaacccccgccccagccgcacccaccgccgccccagcagcagcacaaggaagagatggcggccgaggctggggaagccgtggcgtcccccatggacgacgggtttgtgagcctggactcgccctcctatgtcctgtacaggcatttccggagagttcttttgaagtcacttcagaaggatctacatgaggaaatgaactacatcactgcaataattgaggagcagcccaaaaactatcaagtttggaatttaaactttgggataatgagctgcagtatgtggaccaacttctgaaagaggatgtgagaaataactctgtctggaaccaaagatacttcgttatttctaacaccactggctacaatgatcgtgctgtattggagagagaagtccaatacactctggaaatgattaaactagtaccacataatgaaagtgcatggaactatttgaaagggattttgcaggatcgtggtctttccaaatatcctaatctgttaaatca

SEQ ID NO: 133182 - DNA, 874 bp, Homo sapiens
  Payload ID: 6023
  Gene Symbol: FNTA
  Gene Name: farnesyltransferase, CAAX box, alpha
  ENST ID: ENST00000533336
  CDS Start-End: 127-874
gaatccaaccatgattacattatgagccctgtaagttattaatatcaatgtaactgtaattattgtcattttaaaaacactagagtcccttttcttctgtatttgaatgtaaccactggttggggaatgtctgttttcagggacagagcagaatgggctgatatagatccggtgccgcagaatgatggccccaatcccgtggtccagatcatttatagtgacaaatttagagatgtttatgattacttccgagctgtcctgcagcgtgatgaaagaagtgaacgagcttttaagctaacccgggatgctattgagttaaatgcagccaattatacagtgtggcatttccggagagttcttttgaagtcacttcagaaggatctacatgaggaaatgaactacatcactgcaataattgaggagcagcccaaaaactatcaagtttggcatcataggcgagtattagtggaatggctaagagatccatctcaggagcttgaatttattgctgatattcttaatcaggatgcaaagaattatcatgcctggcagcatcgacaatgggttattcaggaatttaaactttgggataatgagctgcagtatgtggaccaacttctgaaagaggatgtgagaaataactctgtctggaaccaaagatacttcgttatttctaacaccactggctacaatgatcgtgctgtattggagagagaagtccaatacactctggaaatgattaaactagtaccacataatgaaagtgcatggaactatttgaaagggattttgcaggatcgtggtctttccaaatatcctaatctgttaaatcaattacttgatttacaaccaagtcatagttccccctacctaa

SEQ ID NO: 133183 - DNA, 982 bp, Homo sapiens
  Payload ID: 6023
  Gene Symbol: FNTA
  Gene Name: farnesyltransferase, CAAX box, alpha
  ENST ID: ENST00000533383
  CDS Start-End: 18-221
ctgcggaccgaggcgagatggcggccaccgagggggtcggggaggctgcgcaagggggcgagcccgggcagccggcgcaacccccgccccagccgcacccaccgccgccccagcagcagcacaaggaagagatggcggccgaggctggggaagccgtggcgtcccccatggacgacgggtttgtgagcctggactcgccctcctatgtcctgtacagttagagatgtttatgattacttccgagctgtcctgcagcgtgatgaaagaagtgaacgagcttttaagctaacccgggatgctattgagttaaatgcagccaattatacagtgtggcatttccggagagttcttttgaagtcacttcagaaggatctacatgaggaaatgaactacatcactgcaataattgaggagcagcccaaaaactatcaagtttggcatcataggcgagtattagtggaatggctaagagatccatctcaggagcttgaatttattgctgatattcttaatcaggatgcaaagaattatcatgcctggcagcatcgacaatgggttattcaggaatttaaactttgggataatgagctgcagtatgtggaccaacttctgaaagaggatgtgagaaataactctgtctggaaccaaagatacttcgttatttctaacaccactggctacaatgatcgtgctgtattggagagagaagtccaatacactctggaaatgattaaactagtaccacataatgaaagtgcatggaactatttgaaagggattttgcaggatcgtggtctttccaaatatcctaatctgttaaatcaattacttgatttacaaccaagtcatagttccccctacctaattgcctttcttgtggatatctatgaagacatgctagaaaatcagtgtgacaataaggaagacattcttaataaagcattagagttatgtgaaatcctagctaaagaaaaggacacta

SEQ ID NO: 133184 - DNA, 516 bp, Homo sapiens
  Payload ID: 6023
  Gene Symbol: FNTA
  Gene Name: farnesyltransferase, CAAX box, alpha
  ENST ID: ENST00000525699
  CDS Start-End: 337-516
ccagcggccccaagacccgcggcgcgcgcttccggccccggcgcgccaggccgaagttcccgtggcgccgcgtgggccggtgcatggcgctgggcccgggcggctgccgggacgtcgccgcttcccagggcggcgccggcgcgagaccgcggggacgcgaagcagcgagttagagatgtttatgattacttccgagctgtcctgcagcgtgatgaaagaagtgaacgagcttttaagctaacccgggatgctattgagttaaatgcagccaattatacagtgtggcatttccggagagttcttttgaagtcacttcagaaggatctacatgaggaaatgaactacatcactgcaataattgaggagcagcccaaaaactatcaagtttggcatcataggcgagtattagtggaatggctaagagatccatctcaggagcttgaatttattgctgatattcttaatcaggatgcaaagaattatcatgcctggcagcatcgacaatgggttattcag

SEQ ID NO: 133185 - DNA, 4676 bp, Homo sapiens
  Payload ID: 6023
  Gene Symbol: FNTA
  Gene Name: farnesyltransferase, CAAX box, alpha
  ENST ID: ENST00000526755
  CDS Start-End: 40-243
ggggcctccgccaccacctcagctgcggaccgaggcgagatggcggccaccgagggggtcggggaggctgcgcaagggggcgagcccgggcagccggcgcaacccccgccccagccgcacccaccgccgccccagcagcagcacaaggaagagatggcggccgaggctggggaagccgtggcgtcccccatggacgacgggtttgtgagcctggactcgccctcctatgtcctgtacagttagagatgtttatgattacttccgagctgtcctgcagcgtgatgaaagaagtgaacgagcttttaagctaacccgggatgctattgagttaaatgcagccaattatacagtgtggcatttccggagagttcttttgaagtcacttcagaaggatctacatgaggaaatgaactacatcactgcaataattgaggagcagcccaaaaactatcaagtttggcatcataggcgagtattagtggaatggctaagagatccatctcaggagcttgaatttattgctgatattcttaatcaggatgcaaagaattatcatgcctggcagcatcgacaatgggttattcaggaatttaaactttgggataatgagctgcagtatgtggaccaacttctgaaagaggatgtgagaaataactctgtctggaaccaaagatacttcgttatttctaacaccactggctacaatgatcgtgctgtattggagagagaagtccagttagtaatctccttcacttgctcattcgttacaaacatgtttgcatgcctaccatatctcaggcactggggatacagcagatcaagatcctaccccatggaactaaaagaggacagagtactgagtggaacataggatgatagatttacaaataatgtagcatacttctacttcattgtatcttaagtttcttgaaatattgctactggagattggaaagaaatcttaatgttatggggtattgtctaagaagctttattttaaaaccatctcattaaattttgttgcattttagataatcgtccccagatgccatgttaccctagtgcagagtttggggctggataagtttttgttgtaggtggctatcctgtgttttgtagggtatttagcagcatcctggccttaaaacaaaaatgttttcagacattgccaaatgtcccccgagcggtaaagtcacccccaagttgagaaccgctctatacaaagagctgttattagagctagacatttctgaattggcatcaatttctatattgtatccataaacattagtagccacgatttttgtgaccttatttgtccattgtgtctgagtgtctgttttacaatttgaacaggcttgttgttttcagagcctgatgagatgggagtcataattttagtgtaaatgtgtttgaacaactgttgagtggagctgatttgtatagtgcatctcctctcttccaagctcttgattttgcctggatcgaggcagcttgctcttcttttatctgctctatacaggattctggtgacttaaaatttataaaaggctttaatccatgtctcaccttaacactctgctctgggcttttgtctggagcgtgcactacccctcaagcacacttcatgctttttttctagtgctctcctatataaagctgtacaggcatacctggttttttgagccttgtatatattatgttttttttttttgtttgttttttgttttttttaacaagttgaagcatcttgagcaatcttgagttgagcatgtcttcattgccattctttctaacagcatgtgctcacttgtgtctccgtgtcacattttggtactcctcagtatttcacattttttcataatcattatatctgttccagtgatttgtgatcagtcatctttgatcagtcatctattgtaattgtttgggggtgccactaactgcacccatataaaacagagaatatcactgttgcatgtgttccaccatctctctccctcacctcaggcctccctattccctgagacacaacaatattgaaattaagccaattaaccctacagtgtcctctgagtgttcaagtgaaaggaagagtcacagcctctcactttaaatcaaaagccagaagtgattaagcttagtgaggaacacatatcaaaagctgagataggtccaaagctaggcctcttgcaccaaacaccaaactcataagaaagagttcttgaaggaaattaaaagtgctgctccagtgaacacctggacaaaacagcattattgctggtatagagaaagtttgagtggcctggataaaagataaaaccagccacaacattcccttaagccaaagcctaatccagaggaagccctaattctctttaatttgatgaaggctgagagaagtgaggaagctgcagaagaaaacttggatgctagcagaggttggttcatgaggtataagaaagaagccatctccatagcatggaagtgcaaggtgaagcagcaagtgctgctggagaagctgcagtgagttttccagatcccgctcagatcactaatgaaggtggctgcatgtaaacagaagattttcagtgtagatgaaacagccttctattggaagaagatgccatctaagacttttcatagctagagagaaggcactgcttcaaagcttcacacagctggctgaatcttgttagggcccaatgcagctggtgacttgaagttgaaaccagtgttcggtgatgattctggaaatcttagggcccttaagaattatgctgaatctcctctgcctgtgctctataaatggaacaacaaagcctggatgacagcacatctgtttacagcatggtttactgaatattttaagccctctttgaggtctgttgttcagaaaaatttcttggaaaatatgattgttcatggacaacggacctcatcacccaagagctctaatggagatgtgcaaggagatgctgttttcatgcctgcgaacacaacatccattctgcagcccatggataaaggagtcattttgattttaaagtctcactatttaagaaataaattttgtaaggctatgagctaccatagatagtgattcctccaatgaatctgcagagtcaattgaaaaccttctgggaagaatttaccattctaggtgctattaggaatattcgtgattcataggaggaggtcagaataccaacattaacaggagtttggaagaagttgattccagccctcatggatgactttgaggggttcaagactttagaggaagaaggaactgctgctgtggtggaaacagcaaggaaactagaattagaagtggagcctgaagatgtgaccgaactgctgcatcaagacaatacttgatcagatgaggagtcgcttcttatggatgagcaaaagaagtggtttctcaagatggaatctaatcctggcaacgacgttgtgaaatgacattgttgaaatgacaacaaaggattttaaatattgtaaatattacctgaacttagttgataaagcagcaggatatatgagaggattgactccagttttgaaaagttttactgtgagtaaaatgctatcagacagcatcacatgctacagagaaatcttttattgttgtcttattttaagaaattgccacagccatctcatccttcagcacccagcaccctaccctgatcagtcagcagccatcaacatggaggccagaccctccaccagcagaaagattacgacttgctgaaggctcagatgatcattagcattttttagcaataaagtattttttaattgagatacactctggaaatgattaaactagtaccacataatgaaagtgcatggaactatttgaaagggattttgcaggatcgtggtctttccaaatatcctaatctgttaaatcaattacttgatttacaaccaagtcatagttccccctacctaattgcctttcttgtggatatctatgaagacatgctagaaaatcagtgtgacaataaggaagacattcttaataaagcattagagttatgtgaaatcctagctaaagaaaaggacactataagaaaggaatattggagatacattggaagatcccttcaaagcaaacacagcacagaaaatgactcaccaacaaatgtacagcaataacaccatccagaagaacttgatggaatgcttttattttttattaagggaccctgcaggagtttcacacgagagtggtccttccctttgcctgtggtgtaaaagtgcatcacacaggtattgctttttaacaagaactgatgctccttgggtgctgctgctactcagactagctctaagtaatgtgattcttctaaagcaaagtcattggatgggaggaggaagaaaaagtcccataaaggaacttttgtagtcttatcaacatataatctaatcccttagcatcagctcctccctcagtggtacatgcgtcaagatttgtagcagtaataactgcaggtcacttgtatgtaatggatgtgaggtagccgaagtttggttcagtaagcagggaatacagtcgttccatcagagctggtctgcacactcacattatcttgctatcactgtaaccaactaatgccaaaagaacggttttgtaataaaattatagctgtatctaaaaacaa

SEQ ID NO: 133186 - DNA, 1950 bp, Homo sapiens
  Payload ID: 6023
  Gene Symbol: FNTA
  Gene Name: farnesyltransferase, CAAX box, alpha
  ENST ID: ENST00000529687
  CDS Start-End: 889-1575
gcatggcgctgggcccgggcggctgccgggacgtcgccgcttcccagggcggcgccggcgcgagaccgcggggacgcgaagcagcgaggtctcggctttccgcctgctttaagccacgcggaaactgctgcacccttgactgcactcgttcagctgttcaggcgtcgcgattcgtaaatataagaaatttcccgctctcttccacggcttcccagaacgctgtgtcgctaacaaccagtgaagacccaagggctagggtgcagttctggtagccgggcaggaaaccagggccagatttgctcaccctaaaaacgaagtgtgagggcttccagtggctggctctgcttggagcccagagacattttcatccaatctgtattttagcgcctcgtatcagccaggctaaaggctgaaaagagatttgctactgaacctctcttaagtctccctgcatcgcctcgtacataatacaagtgaggtgtactggggactgcggtaactttcttgcctctgtcaccccgtctttgctgacacccagttccatcagttctttgctttcagatggtaatgttgattcctaattccctgtgaacctgcagagataatcgccttaggtcttacttctgtagttctagggacagagcagaatgggctgatatagatccggtgccgcagaatgatggccccaatcccgtggtccagatcatttatagtgacaaatttagagatgtttatgattacttccgagctgtcctgcagcgtgatgaaagaagtgaacgagcttttaagctaacccgggatgctattgagttaaatgcagccaattatacagtgtggcatttccggagagttcttttgaagtcacttcagaaggatctacatgaggaaatgaactacatcactgcaataattgaggagcagcccaaaaactatcaagtttggcatcataggcgagtattagtggaatggctaagagatccatctcaggagcttgaatttattgctgatattcttaatcaggatgcaaagaattatcatgcctggcagcatcgacaatgggttattcaggaatttaaactttgggataatgagctgcagtatgtggaccaacttctgaaagaggatgtgagaaataactctgtctggaaccaaagatacttcgttatttctaacaccactggctacaatgatcgtgctgtattggagagagaagtccaatacactctggaaatgattaaactagtaccacataatgaaagtgcatggaactatttgaaagggattttgcaggatcgtggtctttccaaatatcctaatctgttaaatcaattacttgatttacaaccaagtcatagttccccctacctaattgcctttcttgtggatatctatgaagacatgctagaaaatcagtgtgacaataaggaagacattcttaataaagcattagagttatgtgaaatcctagctaaagaaaaggacactataagaaaggaatattggagatacattggaagatcccttcaaagcaaacacagcacagaaaatgactcaccaacaaatgtacagcaataacaccatccagaagaacttgatggaatgcttttattttttattaagggaccctgcaggagtttcacacgagagtggtccttccctttgcctgtggtgtaaaagtgcatcacacaggtattgctttttaacaagaactgatgctccttgggtgctgctgctactcagactagctctaagtacatgcgtcaagatttgtagcagtaataactgcaggtcacttgtatgtaatggatgtgaggtagccgaagtttggttcagtaagcagggaatacagtcgttccatcagagctggtctgcacactcacattatcttgctatcactgtaaccaactaatgccaaaagaacggttttgtaataaaattatagctgtatct

SEQ ID NO: 133187 - DNA, 2834 bp, Homo sapiens
  Payload ID: 6024
  Gene Symbol: FNTB
  Gene Name: farnesyltransferase, CAAX box, beta
  Uniprot ID: P49356
  ENST ID: ENST00000246166
  CDS Start-End: 235-1548
gtagacacccttgcgcttcaggactctacgctcttgcagcagctcctctgcccaatggggggcggcagcatctcagtaactcactcgaaagacgggtaggcgggaggagacattcgcgttcaaaatctttttgcctctatccgctcgccgtagcgctttagcccgctcgagtttcaatgcgcgttgttgcttaacgaagcagagtcctacacactgtctgctgctctcctgatcatggcttctccgagttctttcacctactattgccctccatcttcctcccccgtctggtcagagccgctgtacagtctgaggcccgagcacgcgcgagagcggttgcaggacgactcggtggaaacagtcacgtccatagaacaggcaaaagtagaagaaaagatccaagaggtcttcagttcttacaagttcaaccaccttgtaccaaggcttgttttgcagagggagaagcacttccattatctgaaaagaggccttcgacaactgacagatgcctatgagtgtctggatgccagccgcccatggctctgctattggatcctgcacagcttggaactgctagatgaacccatcccccagatagtggctacagatgtgtgtcagttcctggagctgtgtcagagcccagaaggtggctttggaggaggacccggtcagtatccacaccttgcacccacatatgcagcagtcaatgcattgtgcatcattggcaccgaggaggcctatgacatcattaacagagagaagcttcttcagtatttgtactccctgaagcaacctgacggctcctttctcatgcatgtcggaggtgaggtggatgtgagaagcgcatactgtgctgcctccgtagcctcgctgaccaacatcatcactccagacctctttgagggcactgctgaatggatagcaaggtgtcagaactgggaaggtggcattggcggggtaccagggatggaagcccatggtggctataccttctgtggcctggccgcgctggtaatcctcaagagggaacgttccttgaacttgaagagcttattacaatgggtgacaagccggcagatgcgatttgaaggaggatttcagggccgctgcaacaagctggtggatggctgctactccttctggcaggcggggctcctgcccctgctccaccgcgcactgcacgcccaaggtgaccctgcccttagcatgagccactggatgttccatcagcaggccctgcaggagtacatcctgatgtgctgccagtgccctgcgggggggcttctggataaacctggcaagtcgcgtgatttctaccacacctgctactgcctgagcggcctgtccatagcccagcacttcggcagcggagccatgttgcatgatgtggtcctgggtgtgcccgaaaacgctctgcagcccactcacccagtgtacaacattggaccagacaaggtgatccaggccactacatactttctacagaagccagtcccaggttttgaggagcttaaggatgagacatcggcagagcctgcaaccgactagaggacctgggtcccggcagctctttgctcacccatctccccagtcagacaaggtttatacgtttcaatacatactgcattctgtgctacacaagccttagcctcagtggagctgtggttctcttggtactttcttgtcaaacaaaaccaatggctctgggtttggagaacacagtggctggttttaaaaattctttccacacctgtcaaaccaaaaatctatcagcccacgtggtgtggttggtgaacagtgcatgccaggaggaagcagtccctcctcaccagctctccagccaggacgatcacacagagatgaatggcatctgagtattacggcatccagagccactgctgactcccacttgcacgccaccattcagtcaccagactgggtgccctccgatgggtggaataagtctgcttcatgccaaggctgggctttgggtcccaccaagatgagttctctgtaagactgtggtggagttgcaccaggaggtgcctctgcctctcgacttgcaccctggtcatttgtaagggaaaagagctggaggtggggagagaaagatctccttcagttgggagtccttccacttcaacactggagaactgagccttgcatctctccagggtccaaggccacgcttggtgcacaggcaagacttgcttcagccccaggtgtggtgacttagacctaggaaaccaattatgagtggaaagtgaccctctagttcaactgtgccagaggaaacagccctccagtgcccacctgcctcactcctccctatcatgtaccgtgaaaaccccctctgatggcctcaaggcagtgcctgcaggccgaggcccttctgggggtttctatctttcttccaccagactccaagcccactctcctccaagactgtgttgtcttttctcaccaagagtattaacactactaagtctttcaccttaacttatgactcaggatttattcacgtcctgcccactctaggctcacaggaataaaatcaagtgctagacacactggctgctactaaggcactagcctctgtagctggtggtggcagcgtggggtgccgcccagcgtgctgggtcctggcagtgcctctgctgtgctgcacattgagccctttctcagtcagtggagtatcaagttgggccatctgtctactgacctggccttcatgtaagcagctgtgggctgcgggcagacaggagctcagagatgcagcatgaggcgcttagaaaaacctggccatttgctgcctctaattcccttttgctttg

SEQ ID NO: 133188 - DNA, 1643 bp, Homo sapiens
  Payload ID: 6025
  Gene Symbol: FAF1
  Gene Name: Fas (TNFRSF6) associated factor 1
  ENST ID: ENST00000371778
  CDS Start-End: 7-1479
cgggagatgatcctggcggattttcaggcatgtactggcattgaaaacattgacgaagctattacattgcttgaacaaaataattgggacttagtggcagctatcaatggtgtaataccacaggaaaatggcattctacaaagtgaatatggaggtgagaccataccaggacctgcatttaatccagcaagtcatccagcttcagctcctacttcctcttcttcttcagcgtttcgacctgtaatgccatccaggcagattgtagaaaggcaacctcggatgctggacttcagggttgaatacagagacagaaatgttgatgtggtacttgaagacacctgtactgttggagagattaaacagattctagaaaatgaacttcagatacctgtgtccaaaatgctgttaaaaggctggaagacgggagatgtggaagacagtacggtcctaaaatctctacacttgccaaaaaacaacagtctttatgtccttacaccagatttgccaccaccttcatcatctagtcatgctggtgccctgcaggagttttcttcaagatatggtgattgccatcctgtattttttattggctcattagaagctgcttttcaagaggccttctatgtgaaagcccgagatagaaagcttcttgctatctacctccaccatgatgaaagtgtgttaaccaacgtgttctgctcacaaatgctttgtgctgaatccattgtttcttatctgagtcaaaattttataacctgggcttgggatctgacaaaggactccaacagagcaagatttctcactatgtgcaatagacactttggcagtgttgtggcacaaaccattcggactcaaaaaacggatcagtttccgcttttcctgattattatgggaaagcgatcatctaatgaagtgttgaatgtgatacaagggaacacaacagtagatgagttaatgatgagactcatggctgcaatggagatcttcacagcccaacaacaggaagatataaaggacgaggatgaacgtgaagccagagaaaatgtgaagagagagcaagatgaggcctatcgcctttcacttgaggctgacagagcaaagagggaagctcacgagagagagatggcagaacagtttcgtttggagcagattcgcaaagaacaagaagaggaacgtgaggccatccggctgtccttagagcaagccctgcctcctgagccaaaggaagaaaatgctgagcctgtgagcaaactgcggatccggacccccagtggcgagttcttggagcggcgtttcctggccagcaacaagctccagattgtctttgattttgtagcttccaaaggatttccatgggatgagtacaagttactgagcacctttcctaggagagacgtaactcaactggacccaaataaatcattattggaggtaaagttgttccctcaagaaacccttttccttgaagcaaaagagtaaacacggcccagcggtggaaccagccattccttgacaagccagcagcctgcgtcaggagaagggctcctcgccaacccacccacacgctcgtctcactcaattcaatgtcacacttctgcctcttgcaaaattgctggaaaaagtaataataaatatagctactt

SEQ ID NO: 133189 - DNA, 6817 bp, Homo sapiens
  Payload ID: 6025
  Gene Symbol: FAF1
  Gene Name: Fas (TNFRSF6) associated factor 1
  Uniprot ID: Q9UNN5
  ENST ID: ENST00000396153
  CDS Start-End: 453-2405
aggggcggaggcggcggccagggaggaagcggaggaggcggaggcggccgcggcgttcgcccgcccgctcgctcgctcggtttccccgcccccgccgggcttaacgccgctgaaggtatccgggtgcgcgctgtcgcaacctgccctcatcctggcccgcgactgtaagaccggacccacatccagaccaatcttcctgtccgggctgctgcgacgcgggctccgcaggttgcaggcgggcggccggggcgcctgaaggttaccgagtgcatgagcgcctagcgcttcccgcgctgccccgcccgctggcccgccgacccgcccgccggctcgcccgccagcccctcggcgcccggcggcggcggcggcggtggcggcgacggtcgcaggaggtgccgtctgcctcccaggtgcgcgcttcgctcccggagccgcggaactcggcggccgccatggcgtccaacatggaccgggagatgatcctggcggattttcaggcatgtactggcattgaaaacattgacgaagctattacattgcttgaacaaaataattgggacttagtggcagctatcaatggtgtaataccacaggaaaatggcattctacaaagtgaatatggaggtgagaccataccaggacctgcatttaatccagcaagtcatccagcttcagctcctacttcctcttcttcttcagcgtttcgacctgtaatgccatccaggcagattgtagaaaggcaacctcggatgctggacttcagggttgaatacagagacagaaatgttgatgtggtacttgaagacacctgtactgttggagagattaaacagattctagaaaatgaacttcagatacctgtgtccaaaatgctgttaaaaggctggaagacgggagatgtggaagacagtacggtcctaaaatctctacacttgccaaaaaacaacagtctttatgtccttacaccagatttgccaccaccttcatcatctagtcatgctggtgccctgcaggagtcattaaatcaaaacttcatgctgatcatcacccaccgagaagtccagcgggagtacaacctgaacttctcaggaagcagtactattcaagaggtaaagagaaatgtgtatgaccttacaagtatccccgttcgccaccaattatgggagggctggccaacttctgctacagacgactcaatgtgtcttgctgaatcagggctctcttatccctgccatcgacttacagtgggaagaagatcttcacctgcacagacccgggaacagtcggaagaacaaatcaccgatgttcatatggttagtgatagcgatggagatgactttgaagatgctacagaatttggggtggatgatggagaagtatttggcatggcgtcatctgccttgagaaaatctccaatgatgccagaaaacgcagaaaatgaaggagatgccttattacaatttacagcagagttttcttcaagatatggtgattgccatcctgtattttttattggctcattagaagctgcttttcaagaggccttctatgtgaaagcccgagatagaaagcttcttgctatctacctccaccatgatgaaagtgtgttaaccaacgtgttctgctcacaaatgctttgtgctgaatccattgtttcttatctgagtcaaaattttataacctgggcttgggatctgacaaaggactccaacagagcaagatttctcactatgtgcaatagacactttggcagtgttgtggcacaaaccattcggactcaaaaaacggatcagtttccgcttttcctgattattatgggaaagcgatcatctaatgaagtgttgaatgtgatacaagggaacacaacagtagatgagttaatgatgagactcatggctgcaatggagatcttcacagcccaacaacaggaagatataaaggacgaggatgaacgtgaagccagagaaaatgtgaagagagagcaagatgaggcctatcgcctttcacttgaggctgacagagcaaagagggaagctcacgagagagagatggcagaacagtttcgtttggagcagattcgcaaagaacaagaagaggaacgtgaggccatccggctgtccttagagcaagccctgcctcctgagccaaaggaagaaaatgctgagcctgtgagcaaactgcggatccggacccccagtggcgagttcttggagcggcgtttcctggccagcaacaagctccagattgtctttgattttgtagcttccaaaggatttccatgggatgagtacaagttactgagcacctttcctaggagagacgtaactcaactggacccaaataaatcattattggaggtaaagttgttccctcaagaaacccttttccttgaagcaaaagagtaaacacggcccagcggtggaaccagccattccttgacaagccagcagcctgcgtcaggagaagggctcctcgccaacccacccacacgctcgtctcactcaattcaatgtcacacttctgcctcttgcaaaattgctggaaaaagtaataataaatatagctacttaagatttcccatccatgagtatatattcccaacccttattacagagaattacaactctgccaccctcccctaccccctgcacttcaccctccttcaatgacgaatgcattgttcaagtgtgagtgatcactaaatagaatttttacctctccagtgcccatcttttccccacagtgtctaggacagttctgtctgttctgtgacaccaggatgctgtatatttgatatatgtctttttattttcatgactgaatttctacttcatcacctaattttaaggggcagagggaaaaaaagtcaaatgagacattgtcggcatggagattaaacattgtaggaaaaaagtataccatttttgttagaactttctgatggctttactaagatgtcaggttttgtttgaggactgaatttgacatatatgcaagatatttatttactgctgctgccttgggtctccaggttctacctaggaggtatttgctgttccattgcagcatagggaaactgttcaagcacacaatgtgaatgttgagatcatgtgcagagaggccagtaccaaaacttcagtatctggcccaatggcaagaggctactgttaggtttgcatttgggcagttagaacctcacagataccagctcccaagttgctagtccatcagtgtaaactgaacacaattctctcttgctttctctctctctactccctcacacatttggaccttgtcacttggtgtttaagcaccttgcctatcaacaaaatctgatgagcagccccatggactctcctgtaataaggaacttgctctactattttattcttttaatgttttagtatttgatattggactcaaatgaaagggatctcattctgtggctgaaaaatcagacttcatatgttgaagagagcaaacttggggactcaactcagaagacatgtgttgcctgaaacctgcatataataatttttgatttgatttagtaagtgtggatttttcttaatctacagatttggggtttggggtttagatcatgagaacaccgtttataccttcacagccaatgatttatttttagtcttgaaatatttctccatatctgtttttgtgtcacctgtgggttttatcctaggggttgggatcctgattttaacattttgtacttgtccaaaaaagagttcaaatgctgggtttgttcccccagcctcggccaaggggttctcagaagattctaaccaaagctggagataggtctgctcattttccttctgcccagaagtggatgttggccaggaaaattacaccttgtgtcttctctgatgctccaaccagggacctctccagattactatctagcacagactagtgctacatctgcctaggtatgggctttctctggcagcaggggtctctctagggaggctgagagacccatgggtctcccttcaggggaagtgttcaggggagttcaaactgaacacttctctccagctctattcctatcttcctaatctaatggctctacaagatagtcatttccagtgctacagatgcaccagggcaccacctctttttttttctaggtagaccttgttctgtagctgctgtgaagaagctgcagccctgaactcaggtcatactcaggaacagcagcaggggtgtgggtggggtttgagggaaggtactctgaattcaccttcatgtttaacctgttccatctgacttgggtttcttcattatattgttccctcccactcaccttcacttctgtattacaacaatatagactttactctaaagccaatttcatggaagttattaaatgctacttgaatgtgtgtgaagttgatacaacctttttcaacctgccttagaaagttcttttggcctactcagccccatgatttcctatgctctaggcctcataactgggaaaggcctcagctaattgtcactgttcactcaggacatgatggtctactaagcttcagacaaaaggccaaagcaattttatccttttcatacaagcagagcattaaaatgacttcccatcaccacagaaatagcagtgtcctctgcagttcttcctcctaccattaggcttccttgggctttacatcccagcctccaggcccagtaagtgagtcagtctgaatatttgcttggcattcttatgcccaactgttgacagtgaagctccaggactctttgtcatcccccattccagtttactcccttgtgttcttggactgctggatgtgcagttgcagcattagtttgaaagttaaaggaagtgttgccaatttcccattgcctttaagaaggtgcagggatttttttggaggtttctgatttcggatgttgccattctctggcactactagttttatagcacacacagatgttcatctctggattgtaagcatccagaatcaaagatgaatgagagcatcttttatggaatctacctttttaacataagagagtaagatttatgcttttatagattttacttgctgctgacattagaaacatattagtcacataataacatctaagtgtgctggtcagtagaataggtttttaagaggtggagagctctggcaaatttcccccaaagtatagactttttcatttgaatgtgggagagggtcttaattctctccacaacagcatcactgattgacacatttctacccatccttttctgtcccttagccatccagtcctgggtccccacaagtggatgggacttggagtctttagttcagtccaggagtaactcatataggcattgcacattatagtctgtgtaaccctttcacctgtattttctcttttgatcctttttaaaattcttagaggaagagagatcttcacatacatataaccacagccacatacacacacattccagagacttcagtgtcttccaagttgaacctctcttctgccacttagtagctgcgtgaccttaaggtaagtaacctctctgaacctcagtgtccttacaacattctgatagcactttgcaattggacacacctttcacacatcataatagtctcccgctatgagggaagcagggcagagatgatgattccatttttgcacaaggggcttagaggatagtggcttgcctaaaatcacacagcatgtcagtagaagggtcaggacttaaagtgctaactctaattttccactgcttgtctacaaagaatctctaatttttttttttttttttttttttttttgagacagagtctcgctctgtcgctcaggctagagtgcagtggcacgatctcggctcactgcaacctccatctcctgggctcaagcagttctcctgcctcagcctctcaagtagctgggattacaggcatgtgccaccatgcccagctaatttttgtatttttagtagagacagggtttcaccatgttggccaggctggtctagaactcctgacctcaggtaatcggcccacctcagcctcccaaagtgccagggttacaggcgtgagccacggcgcccggccaagaatctctaaattttatattcaagaacggatcttggaatcctctacagttgtacataaaaagttaaacatcactttgggaggcaaaggcaggaggattgcttgaggccagaagttcaagaccagccctgaccacataccaagaccctgtctctaaaaaaataaataaataaaaaataaaacttttcattagccaggcatgctggtacttgcctgtagtcccagctactgttgaggctgaggcaaagtgatcacttgagcccaggagttcaaggctacagtgagccatgatagtgcgactgctactctggcctaggcatcagagtaagacctcatctctttaaaaaaaaaaaaaaaagaaaggttaaacatgtattttcctggaaagggaatctgtattcatcagattctcagtgggacctattgatcaaaaaattttaagaatcaccatttacgtcatcctatttggggagaagaatctgtccattctttttatcaatccgtatttttatctaaaagaaacctccagaggatgaaatacaatcactagactttcttgccttgaatatctctgcatttagtattttgtccttgtctcaaataatctgctttggaaggtgacacttaaccccaactggccacacagctcctcactgttgcattttgaaagtttggtctgaaagaaaatattaataaaagagacatgatctcca

SEQ ID NO: 133190 - DNA, 2127 bp, Homo sapiens
  Payload ID: 6025
  Gene Symbol: FAF1
  Gene Name: Fas (TNFRSF6) associated factor 1
  ENST ID: ENST00000494400
  CDS Start-End: 192-1586
agtgtgttctcttgcctttaggagctgaaaatatgataacattgggcccagacatgcctgtgtggaggttagggtactcctggggtttttgcagctagctgtaaagcaagctagaacttgttcatctctgagttccttgtttttctttcaaccctttcagtgccctgcaggagtcattaaatcaaaacttcatgctgatcatcacccaccgagaagtccagcgggagtacaacctgaacttctcaggaagcagtactattcaagaggtaaagagaaatgtgtatgaccttacaagtatccccgttcgccaccaattatgggagggctggccaacttctgctacagacgactcaatgtgtcttgctgaatcagggctctcttatccctgccatcgacttacagtgggaagaagatcttcacctgcacagacccgggaacagtcggaagaacaaatcaccgatgttcatatggttagtgatagcgatggagatgactttgaagatgctacagaatttggggtggatgatggagaagtatttggcatggcgtcatctgccttgagaaaatctccaatgatgccagaaaacgcagaaaatgaaggagatgccttattacaatttacagcagagttttcttcaagatatggtgattgccatcctgtattttttattggctcattagaagctgcttttcaagaggccttctatgtgaaagcccgagatagaaagcttcttgctatctacctccaccatgatgaaagtgtgttaaccaacgtgttctgctcacaaatgctttgtgctgaatccattgtttcttatctgagtcaaaattttataacctgggcttgggatctgacaaaggactccaacagagcaagatttctcactatgtgcaatagacactttggcagtgttgtggcacaaaccattcggactcaaaaaacggatcagtttccgcttttcctgattattatgggaaagcgatcatctaatgaagtgttgaatgtgatacaagggaacacaacagtagatgagttaatgatgagactcatggctgcaatggagatcttcacagcccaacaacaggaagatataaaggacgaggatgaacgtgaagccagagaaaatgtgaagagagagcaagatgaggcctatcgcctttcacttgaggctgacagagcaaagagggaagctcacgagagagagatggcagaacagtttcgtttggagcagattcgcaaagaacaagaagaggaacgtgaggccatccggctgtccttagagcaagccctgcctcctgagccaaaggaagaaaatgctgagcctgtgagcaaactgcggatccggacccccagtggcgagttcttggagcggcgtttcctggccagcaacaagctccagattgtctttgattttgtagcttccaaaggatttccatgggatgagtacaagttactgagcacctttcctaggagagacattccaggactttccaggatggggaaacatgcctgttctcgttctttgtatattcattttatgttctttattctcattctgaagacttggatcatctcctgtttttagactaagacggttttttcctccccattccattcttaatagaatcccctctgggccttccccacttatattgtcatttaatagtatagtgaccaaagccaccatcaaggataccactgcaaggagaaggttacagcttttgtttggtgcccagggtgtccccgacagtgtgccaagtttgagaccattttaacattataataccttagagctggtgtcttcactaaacagtccatctaaaggcataggctaggaatgaagaatccagatttgccatgaatgctgaataaacttgggtaactcaactggacccaaataaatcattattggaggtaaagttgttccctcaagaaacccttttccttgaagcaaaagagtaaacacggcccagcggtggaaccagccattccttgacaagccagcagcctgcgtcaggagaagggctcctcgccaacccacccacacgctcgtctcactcaattcaatgtcacacttctgcctcttgcaaaattgctggaaaaagtaataataaatatagctactt

SEQ ID NO: 133191 - DNA, 4156 bp, Homo sapiens
  Payload ID: 6026
  Gene Symbol: FBF1
  Gene Name: Fas (TNFRSF6) binding factor 1
  ENST ID: ENST00000319129
  CDS Start-End: 1-3277
gtccctcctgggtgatgatgtcttcagcaccatggcaggcctggaagaagctgatgctgaggtttcaggtatctcagaggcagacccacaggctctgctccaggccatgaaggacctggacggcatggatgctgatatcttaggtctgaagaaatctaattcagcccctagcaaaaaagctgcaaaggaccctgggaaaggagagctgcccaaccaccccaagcctgcagggggtgccattcccaccaagaagtcacttccgtctcccagcagctctgggcatcagaacaggaggttttcctctgaagacttggaagacccattgagaggacttctctcctatgatgaaggaggaatcaccaagcagccgcctgtgacacagagtaaaacagcttctgacaagagccccagcacagtgagagatcaaggtccctctattcctctaactcctggggacacccccatccgaaaaaaagaagaattgttgtttgatgatggggatgacatcatggccaccttggggtttggagacagccccaaagcagagaagaggcagataggagaccaggaagggcctcgccctgctcgctccacgctggatgagctgctgggtcgaggcatggccaccaaactcctggcccgcccgggcaccggggagcacagggagttcaagctagacaagaagtaccagaggccacaggacagtgaagatatgtggggtgacgaggacttcacctttggagcctatcagcccactgtggtctcctctgagggccggcagtcccgccggcagtctgtcaggttcttcgcagacagtggcgcagaccccaagggagaaccaggctccaaacagagccctccaatggcttccagccccatccagcccaggaagggaggagctgactggttgggcctcaaggacgaggacttggacctgttccctgcctcacccaccagagaggcccatcgggaaagttcagtgcctgtcacgccctcagtgcctcctcctgcgagccagcactccacgccagctgggctgcccccctccagggcaaagccaccaactgaaggtgcagggtcccctgccaaagccagccaggcttccaagctgcgagcctccaaggaggagaaagaggactggctgagccatgccctgtctcggaagaagtcccaaggcctggccagagagcagcatgctgggacctctgagggcctgcatttggcggggacagcgggccatcccccttctggcagccaacctctcaccagcacacaagggcttgagcacgcagctgctggagggagttctggaacaactgcacgagaaagaccgtgtgtcaggcctggtgtctcggggtcccctgtgactcagaaccatgccgcctcagcactccctacaggttccccaaagaggggaacagcccctggagacctctcagccactgagcctgccacgtgtttcccgagcacccagaaacccacagagccttccgtgcccgtccagcccctgctcccagagtccctggcccggagcctgctgccgagcacagaataccagaagcagctcctggcagcacaggtgcaacttcagtgcagccccgctgagctccaggccgagctgctgcatagccaggcccggctggcagagctggaggcccaggtgcggaagctggagctagaacgggcccagcatgagctgctgctggggagtctgcagcagcagcaccaggcagacctggagctcatcgagagtgcacacagaagccgcatcaaggtgctagaaacatcgtaccagcaacgggaggagcggctccggagagagaacgaagagctgtcagctcggtatctgtcgcagtgccaggaggccgaacaggcccgtgctgagcttacggcccagcaccagcggcgcttggcggccatagcgcaggagaaggaccaggaaatggagcggctccgggagctgcagcgggcgtccatcctagacatgcgcagagaccacgaggagcagctgcagcggctaaagctgctgaaggaccgagaggtcgatgcggccaccagtgccacctcccacacgcggtccctgaatagcatcatccaccagatggagaagttctccagcagcctgcacgagttgtcctcccgcgtggaggcctcgcacctcaccacctcccaggagcgggagctggggatccggcagcgtgacgagcagctgcgggcactgcaggagcggctgggccagcagcagcgggacatggaggaggagcggagccggcaacaggaggtcatcgggaagatggaggcacggctgaatgagcagagccggctgctggagcaggaacgctggcgggtgactgccgagcagtccaaggcggagtccatgcagcgcgccctagaggagcaaaggaaggtcacggcccagcagatggccatggaaagggcggagctggaacgggccaagagcgccttgctggaggagcagaagtctgtcatgctcaagtgcggggaggagcggcggcgcctggctgccgagtgggcggagttctccgcgcagcaaaagctgagtaaggagcgggccgagcgcgaggccgagcgggcattgcaggtggacacccagcgggagggcaccctcatcagcctggccaaggagcaggctgagctgaagatcagggccagcgagctccgggccgaggagaagcagctggcagcggagagagcagccctggagcaggagcggcaggagctgcggctggagaaggagaggatcaacgccaccgccctgcgtgtcaagctccgcgccgaggaggtggagagcatgagcaaggtggcctccgagaagtacgaggagggggagcgggcattgcgcgaggcccagcaggtgcaggcagagcagcaggcccggttgcaggcggtgcagcaacagcaggagcggctgcggaagcaggagcagcacatgcaccaggagcatctgagtctggcccagcagaggctgcaactggaccgcgcacgacaggacctgccctctagcctcgtgggtctgttccccagggcccagggccctgcagcctccagccagagtgccctcatgcctcctgctcccaccacccgttggtgcagccagccgccaactggcctggaccccagccccttgcacctccatgccaggctggcactgctgaggcacatggcagagcaggaccgtgacttcttggagaatgaacagttcttcctggagaccctgaagaaagggtcctacaatttgacatctcattcagcctgagtgggaccccagccgattccccaacagagggttcggaccccagaactgtcctgttcctccggctgcctccatggaggcagtgcctggggaggattctgagatgcttgaggcctgatgacagctcttccgtggacagggtgcaagtgcatcctttccaaatgtgccagcccggggcagcccctgcctctggggctctgtggtgtaggctatcttaccatggctttggctgccctgccccaaagccattggcttggatctgagggtctgagttggcagcaaggacccccagctctcactgggctctgtgggctccccctgggctctgtgggctccccctgctccacaggtagactgttgtgggctctttttgcctgggcctcttctgaggcaggagctttcttgagggatgccacaaacagccttccctactccctgccagagcagttccctccctgatgagctggagaagggccctctggcctcctgacagtacagggagggcaccagctagatcctcccttgtggtgtgagatgttcctggaactcagccaggccctcctcctcctgggcttgcccagagcccccaccctattcccagcattgcccgaaggaccaaccagtttgggtgaacagtggcctcctcagcttcctccccatctgggtgccccaccggcggcggagggagctgtggcgatggtggggtgtggggagggacgaggagggaagcctctgtgctgctcacctgcccaaagcccagctcagcgggtacgcagtggaggcgacaaggaaccaatcacaactacagaggtttctctgatcctcctccactcccgctgcttcaacttgactaagcttaaaaaaactgcttttgccatggct

SEQ ID NO: 133192 - DNA, 4825 bp, Homo sapiens
  Payload ID: 6026
  Gene Symbol: FBF1
  Gene Name: Fas (TNFRSF6) binding factor 1
  Uniprot ID: Q8TES7
  ENST ID: ENST00000586717
  CDS Start-End: 275-3676
ggctgagggtgccggcagcggctggaagcgggaggccagtcctggccgggctgggcgacccgaatggagccagggccggcgctggtcccagcggccgcacctccgggggcacggcgcgtaacaggaggcttccggggctgagagcgttacaggctgcgctccggggccagataggccgggcgctcagaaggggagtatgagcctgatgtgggcagaatccagatgagctggccagtgctgtgaaggagctgagagcacccccgagagccgtgagatggcaccaaaaaccaagaaaggatgtaaagtgacactacctgagaagcctgttaaactagcttcacataccagagacaccacaggtgtatctcagatgttcccttcttcaaaggcgagaacaaagtccctcctgggtgatgatgtcttcagcaccatggcaggcctggaagaagctgatgctgaggtttcaggtatctcagaggcagacccacaggctctgctccaggccatgaaggacctggacggcatggatgctgatatcttaggtctgaagaaatctaattcagcccctagcaaaaaagctgcaaaggaccctgggaaaggagagctgcccaaccaccccaagcctgcagggggtgccattcccaccaagaagtcacttccgtctcccagcagctctgggcatcagaacaggaggttttcctctgaagacttggaagacccattgagaggacttctctcctatgatgaaggaggaatcaccaagcagccgcctgtgacacagagtaaaacagcttctgacaagagccccagcacagtgagagatcaaggtccctctattcctctaactcctggggacacccccatccgaaaaaaagaagaattgttgtttgatgatggggatgacatcatggccaccttggggtttggagacagccccaaagcagagaagaggcagataggagaccaggaagggcctcgccctgctcgctccacgctggatgagctgctgggtcgaggcatggccaccaaactcctggcccgcccgggcaccggggagcacagggagttcaagctagacaagaagtaccagaggccacaggacagtgaagatatgtggggtgacgaggacttcacctttggagcctatcagcccactgtggtctcctctgagggccggcagtcccgccggcagtctgtcagtaggttcttcgcagacagtggcgcagaccccaagggagaaccaggctccaaacagagccctccaatggcttccagccccatccagcccaggaagggaggagctgactggttgggcctcaaggacgaggacttggacctgttccctgcctcacccaccagagaggcccatcgggaaagttcagtgcctgtcacgccctcagtgcctcctcctgcgagccagcactccacgccagctgggctgcccccctccagggcaaagccaccaactgaaggtgcagggtcccctgccaaagccagccaggcttccaagctgcgagcctccaaggaggagaaagaggactggctgagccatgccctgtctcggaagaagtcccaaggcctggccagagagcagcatgctgggacctctgagggcctgcatttggcggggacagcgggccatcccccttctggcagccaacctctcaccagcacacaagggcttgagcacgcagctgctggagggagttctggaacaactgcacgagaaagaccgtgtgtcaggcctggtgtctcggggtcccctgtgactcagaaccatgccgcctcagcactccctacaggttccccaaagaggggaacagcccctggagacctctcagccactgagcctgccacgtgtttcccgagcacccagaaacccacagagccttccgtgcccgtccagcccctgctcccagagtccctggcccggagcctgctgccgagcacagaataccagaagcagctcctggcagcacaggtgcaacttcagtgcagccccgctgagctccaggccgagctgctgcatagccaggcccggctggcagagctggaggcccaggtgcggaagctggagctagaacgggcccagcatgagctgctgctggggagtctgcagcagcagcaccaggcagacctggagctcatcgagagtgcacacagaagccgcatcaaggtgctagaaacatcgtaccagcaacgggaggagcggctccggagagagaacgaagagctgtcagctcggtatctgtcgcagtgccaggaggccgaacaggcccgtgctgagcttacggcccagcaccagcggcgcttggcggccatagcgcaggagaaggaccaggaaatggagcggctccgggagctgcagcgggcgtccatcctagacatgcgcagagaccacgaggagcagctgcagcggctaaagctgctgaaggaccgagaggtcgatgcggccaccagtgccacctcccacacgcggtccctgaatagcatcatccaccagatggagaagttctccagcagcctgcacgagttgtcctcccgcgtggaggcctcgcacctcaccacctcccaggagcgggagctggggatccggcagcgtgacgagcagctgcgggcactgcaggagcggctgggccagcagcagcgggacatggaggaggagcggagccggcaacaggaggtcatcgggaagatggaggcacggctgaatgagcagagccggctgctggagcaggaacgctggcgggtgactgccgagcagtccaaggcggagtccatgcagcgcgccctagaggagcaaaggaaggtcacggcccagcagatggccatggaaagggcggagctggaacgggccaagagcgccttgctggaggagcagaagtctgtcatgctcaagtgcggggaggagcggcggcgcctggctgccgagtgggcggagttctccgcgcagcaaaagctgagtaaggagcgggccgagcgcgaggccgagcgggcattgcaggtggacacccagcgggagggcaccctcatcagcctggccaagcaggctgagctgaagatcagggccagcgagctccgggccgaggagaagcagctggcagcggagagagcagccctggagcaggagcggcaggagctgcggctggagaaggagaggatcaacgccaccgccctgcgtgtcaagctccgcgccgaggaggtggagagcatgagcaaggtggcctccgagaagtacgaggagggggagcgggcattgcgcgaggcccagcaggtgcaggcagagcagcaggcccggttgcaggcggtgcagcaacagcaggagcggctgcggaagcaggagcagcacatgcaccaggagcatctgagtctggcccagcagaggctgcaactggaccgcgcacgacaggacctgccctctagcctcgtgggtctgttccccagggcccagggccctgcagcctccagccagagtgccctcatgcctcctgctcccaccacccgttggtgcagccagccgccaactggcctggaccccagccccttgcacctccatgccaggctggcactgctgaggcacatggcagagcaggaccgtgacttcttggagaatgaacagttcttcctggagaccctgaagaaagggtcctacaatttgacatctcattcagcctgagtgggaccccagccgattccccaacagagggttcggaccccagaactgtcctgttcctccggctgcctccatggaggcagtgcctggggaggattctgagatgcttgaggcctgatgacagctcttccgtggacagggtgcaagtgcatcctttccaaatgtgccagcccggggcagcccctgcctctggggctctgtggtgtaggctatcttaccatggctttggctgccctgccccaaagccattggcttggatctgagggtctgagttggcagcaaggacccccagctctcactgggctctgtgggctccccctgggctctgtgggctccccctgctccacaggtagactgttgtgggctctttttgcctgggcctcttctgaggcaggagctttcttgagggatgccacaaacagccttccctactccctgccagagcagttccctccctgatgagctggagaagggccctctggcctcctgacagtacagggagggcaccagctagatcctcccttgtggtgtgagatgttcctggaactcagccaggccctcctcctcctgggcttgcccagagcccccaccctattcccagcattgcccgaaggaccaaccagtttgggtgaacagtggcctcctcagcttcctccccatctgggtgccccaccggcggcggagggagctgtggcgatggtggggtgtggggagggacgaggagggaagcctctgtgctgctcacctgcccaaagcccagctcagcgggtacgcagtggaggcgacaaggaaccaatcacaactacagaggtttctctgatcctcctccactcccgctgcttcaacttgactaagcttaaaaaaactgcttttgccatggctcatcggagtttatacttatttcttagaaaatgtttcctgttatttgctggacaagtcccaaagaacaggcagatgttcttattaaaagatcagcctataagattggtcaggaccaggcgcctctggccacgtgcctctcccctccagcacctgcggtctgcggtggcacctggcagctggaccacagccaggagaagggtactattagccctgcttcaaacatgcagaaactgaggcccggggagattaaataacctgcctgaaatgaca

SEQ ID NO: 133193 - DNA, 877 bp, Homo sapiens
  Payload ID: 6026
  Gene Symbol: FBF1
  Gene Name: Fas (TNFRSF6) binding factor 1
  ENST ID: ENST00000588283
  CDS Start-End: 1-267
ctgaatgagcagagccggctgctggagcaggaacgctggcgggtgactgccgagcagtccaaggcggagtccatgcagcgcgccctagaggagcaaaggaaggtcacggcccagcagatggccatggaaagggcggagctggaacgggccaagagcgccttgctggaggagcagaagtctgtcatgctcaagtgcggggaggagcggcggcgcctggctgccgagtgggcggagttctccgcgcagcaaaagctgagagcaggctgagctgaagatcagggccagcgagctccgggccgaggagaagcagctggcagcggagagagcagccctggagcaggagcggcaggagctgcggctggagaaggagaggatcaacgccaccgccctgcgtgtcaagctccgcgccgaggaggtggagagcatgagcaaggtgctgctcgggcacatgggcgtgggcgcatctgagcccaggcagccctgacccaggcggcctccctgcaggtggcctccgagaagtacgaggagggggagcgggcattgcgcgaggcccagcaggtgcaggcagagcagcaggcccggttgcaggcggtgcagcaacagcaggagcggctgcggaagcaggagcagcacatgcaccaggagcatctgagtctggcccagcagaggctgcaactggaccgcgcacgacaggacctgccctctagcctcgtgggtctgttccccagggcccagggccctgcagcctccagccagagtgccctcatgcctcctgctcccaccacccgttggtgcagccagccgccaactggcctggaccccagccccttgcacctccatgccaggctggcactgctgaggcacatggcagagcagg

SEQ ID NO: 133194 - DNA, 3445 bp, Homo sapiens
  Payload ID: 6026
  Gene Symbol: FBF1
  Gene Name: Fas (TNFRSF6) binding factor 1
  ENST ID: ENST00000592193
  CDS Start-End: 1-3445
ggcaccaaaaaccaagaaaggatgtaaaggctccattgatgattttcttggtgaccttctaggggatgatatgacactacctgagaagcctgttaaactagcttcacataccagagacaccacaggtgtatctcagatgttcccttcttcaaaggcgagaacaaagtccctcctgggtgatgatgtcttcagcaccatggcaggcctggaagaagctgatgctgaggtttcaggtatctcagaggcagacccacaggctctgctccaggccatgaaggacctggacggcatggatgctgatatcttaggtctgaagaaatctaattcagcccctagcaaaaaagctgcaaaggaccctgggaaaggagagctgcccaaccaccccaagcctgcagggggtgccattcccaccaagaagtcacttccgtctcccagcagctctgggcatcagaacaggaggttttcctctgaagacttggaagacccattgagaggacttctctcctatgatgaaggaggaatcaccaagcagccgcctgtgacacagagtaaaacagcttctgacaagagccccagcacagtgagagatcaaggtccctctattcctctaactcctggggacacccccatccgaaaaaaagaagaattgttgtttgatgatggggatgacatcatggccaccttggggtttggagacagccccaaagcagagaagaggcagataggagaccaggaagggcctcgccctgctcgctccacgctggatgagctgctgggtcgaggcatggccaccaaactcctggcccgcccgggcaccggggagcacagggagttcaagctagacaagaagtaccagaggccacaggacagtgaagatatgtggggtgacgaggacttcacctttggagcctatcagcccactgtggtctcctctgagggccggcagtcccgccggcagtctgtcagtaggttcttcgcagacagtggcgcagaccccaagggagaaccaggctccaaacagagccctccaatggcttccagccccatccagcccaggaagggaggagctgactggttgggcctcaaggacgaggacttggacctgttccctgcctcacccaccagagaggcccatcgggaaagttcagtgcctgtcacgccctcagtgcctcctcctgcgagccagcactccacgccagctgggctgcccccctccagggcaaagccaccaactgaaggtgcagggtcccctgccaaagccagccaggcttccaagctgcgagcctccaaggaggagaaagaggactggctgagccatgccctgtctcggaagaagtcccaaggcctggccagagagcagcatgctgggacctctgagggcctgcatttggcggggacagcgggccatcccccttctggcagccaacctctcaccagcacacaagggcttgagcacgcagctgctggagggagttctggaacaactgcacgagaaagaccgtgtgtcaggcctggtgtctcggggtcccctgtgactcagaaccatgccgcctcagcactccctacaggttccccaaagaggggaacagcccctggagacctctcagccactgagcctgccacgtgtttcccgagcacccagaaacccacagagccttccgtgcccgtccagcccctgctcccagagtccctggcccggagcctgctgccgagcacagaataccagaagcagctcctggcagcacaggtgcaacttcagtgcagccccgctgagctccaggccgagctgctgcatagccaggcccggctggcagagctggaggcccaggtgcggaagctggagctagaacgggcccagcatgagctgctgctggggagtctgcagcagcagcaccaggcagacctggagctcatcgagagtgcacacagaagccgcatcaaggtgctagaaacatcgtaccagcaacgggaggagcggctccggagagagaacgaagagctgtcagctcggtatctgtcgcagtgccaggaggccgaacaggcccgtgctgagcttacggcccagcaccagcggcgcttggcggccatagcgcaggagaaggaccaggaaatggagcggctccgggagctgcagcgggcgtccatcctagacatgcgcagagaccacgaggagcagctgcagcggctaaagctgctgaaggaccgagaggtcgatgcggccaccagtgccacctcccacacgcggtccctgaatagcatcatccaccagatggagaagttctccagcagcctgcacgagttgtcctcccgcgtggaggcctcgcacctcaccacctcccaggagcgggagctggggatccggcagcgtgacgagcagctgcgggcactgcaggagcggctgggccagcagcagcgggacatggaggaggagcggagccggcaacaggaggtcatcgggaagatggaggcacggctgaatgagcagagccggctgctggagcaggaacgctggcgggtgactgccgagcagtccaaggcggagtccatgcagcgcgccctagaggagcaaaggaaggtcacggcccagcagatggccatggaaagggcggagctggaacgggccaagagcgccttgctggaggagcagaagtctgtcatgctcaagtgcggggaggagcggcggcgcctggctgccgagtgggcggagttctccgcgcagcaaaagctgagtaaggagcgggccgagcgcgaggccgagcgggcattgcaggtggacacccagcgggagggcaccctcatcagcctggccaaggagcaggctgagctgaagatcagggccagcgagctccgggccgaggagaagcagctggcagcggagagagcagccctggagcaggagcggcaggagctgcggctggagaaggagaggatcaacgccaccgccctgcgtgtcaagctccgcgccgaggaggtggagagcatgagcaaggtggcctccgagaagtacgaggagggggagcgggcattgcgcgaggcccagcaggtgcaggcagagcagcaggcccggttgcaggcggtgcagcaacagcaggagcggctgcggaagcaggagcagcacatgcaccaggagcatctgagtctggcccagcagaggctgcaactggaccgcgcacgacaggacctgccctctagcctcgtgggtctgttccccagggcccagggccctgcagcctccagccagagtgccctcatgcctcctgctcccaccacccgttggtgcagccagccgccaactggcctggaccccagccccttgcacctccatgccaggctggcactgctgaggcacatggcagagcaggaccgtgacttcttggagaatgaacagttcttcctggagaccctgaagaaagggtcctacaatttgacatctcattcagcctga

SEQ ID NO: 133195 - DNA, 745 bp, Homo sapiens
  Payload ID: 6026
  Gene Symbol: FBF1
  Gene Name: Fas (TNFRSF6) binding factor 1
  ENST ID: ENST00000586838
  CDS Start-End: 1-451
tcgggaaagttcagtgcctgtcacgccctcagtgcctcctcctgcgagccagcactccacgccagctgggctgcccccctccagggcaaagccaccaactgaaggtgcagggtcccctgccaaagccagccaggcttccaagctgcgagcctccaaggaggagaaagaggactggctgagccatgccctgtctcggaagaagtcccaaggcctggccagagagcagcatgctgggacctctgagggcctgcatttggcggggacagcgggccatcccccttctggcagcctgacctgggccttctgtcaccttcaccttgaacgctgcctttcctcagccaacctctcaccagcacacaagggcttgagcacgcagctgctggagggagttctggaacaactgcacgagaaagaccgtgtgtcaggcctggtgtctcggggtcccctgtgactcagaaccatgccgcctcagcactccctacaggttccccaaagaggggaacagcccctggagacctctcagccactgagcctgccacgtgtttcccgagcacccagaaacccacagagccttccgtgcccgtccagcccctgctcccagagtccctggcccggagcctgctgccgagcacagaataccagaagcagctcctggcagcacaggtgcaacttcagtgcagccccgctgagctccaggccgagctgctgcatagccaggcccggctggcagagctggaggcccagg

SEQ ID NO: 133196 - DNA, 546 bp, Homo sapiens
  Payload ID: 6026
  Gene Symbol: FBF1
  Gene Name: Fas (TNFRSF6) binding factor 1
  ENST ID: ENST00000590264
  CDS Start-End: 1-279
cgcgcacgacaggacctgccctctagcctcgtgggtctgttccccagggcccagggccctgcagcctccagccagagtgccctcatgcctcctgctcccaccacccgttggtgcagccagccgccaactggcctggaccccagccccttgcacctccatgccaggctggcactgctgaggcacatggcagagcaggaccgtgacttcttggagaatgaacagttcttcctggagaccctgaagaaagggtcctacaatttgacatctcattcagcctgagtgggaccccagccgattccccaacagaggaaaatgtttcctgttatttgctggacaagtcccaaagaacaggcagatgttcttattaaaagatcagcctataagattggtcaggaccaggcgcctctggccacgtgcctctcccctccagcacctgcggtctgcggtggcacctggcagctggaccacagccaggagaagggtactattagccctgcttcaaacatgcagaaactgaggcccggggagattaaataacctgcctga

SEQ ID NO: 133197 - DNA, 621 bp, Homo sapiens
  Payload ID: 6026
  Gene Symbol: FBF1
  Gene Name: Fas (TNFRSF6) binding factor 1
  ENST ID: ENST00000586631
  CDS Start-End: 184-336
cggccgcacctccgggggcacggcgcgtaacaggaggcttccggggctgagagcgttacaggctgcgctccggggccagataggccgggcgctcagaaggggagtatgagcctgatgtgggcagaatccagatgagctggccagtgctgtgaaggagctgagagcacccccgagagccgtgagatggtaggcagagttcagagtaagatgcatggaaagcgaacatgcctcccatcctgcatccccaaagatcttgactgcatgcaacactctgggggctgggcggcaaggaccaggatggagaccctggagaagagtgacaggaggtggcattgataccaaactttcgacgaccaaggtttcttctgagactctgagtgtccagctggaagcgtttttaagtgtctgtcactggtattgaggagtcaggggcacggaatagaagacatttccggtcacatgacatctcggctgggagggtttgcatgtcgtgtctgggaaaggagtgacctgcccgcccattggcacccatcgctggttagcagggctgtttccacgctctgaatgagtccgttctcagaaactataggaacacataaaggacttacatctctaaatgcc

SEQ ID NO: 133198 - DNA, 3402 bp, Homo sapiens
  Payload ID: 6026
  Gene Symbol: FBF1
  Gene Name: Fas (TNFRSF6) binding factor 1
  Uniprot ID: Q8TES7
  ENST ID: ENST00000627351
  CDS Start-End: 1-3402
atggcaccaaaaaccaagaaaggatgtaaagtgacactacctgagaagcctgttaaactagcttcacataccagagacaccacaggtgtatctcagatgttcccttcttcaaaggcgagaacaaagtccctcctgggtgatgatgtcttcagcaccatggcaggcctggaagaagctgatgctgaggtttcaggtatctcagaggcagacccacaggctctgctccaggccatgaaggacctggacggcatggatgctgatatcttaggtctgaagaaatctaattcagcccctagcaaaaaagctgcaaaggaccctgggaaaggagagctgcccaaccaccccaagcctgcagggggtgccattcccaccaagaagtcacttccgtctcccagcagctctgggcatcagaacaggaggttttcctctgaagacttggaagacccattgagaggacttctctcctatgatgaaggaggaatcaccaagcagccgcctgtgacacagagtaaaacagcttctgacaagagccccagcacagtgagagatcaaggtccctctattcctctaactcctggggacacccccatccgaaaaaaagaagaattgttgtttgatgatggggatgacatcatggccaccttggggtttggagacagccccaaagcagagaagaggcagataggagaccaggaagggcctcgccctgctcgctccacgctggatgagctgctgggtcgaggcatggccaccaaactcctggcccgcccgggcaccggggagcacagggagttcaagctagacaagaagtaccagaggccacaggacagtgaagatatgtggggtgacgaggacttcacctttggagcctatcagcccactgtggtctcctctgagggccggcagtcccgccggcagtctgtcaggttcttcgcagacagtggcgcagaccccaagggagaaccaggctccaaacagagccctccaatggcttccagccccatccagcccaggaagggaggagctgactggttgggcctcaaggacgaggacttggacctgttccctgcctcacccaccagagaggcccatcgggaaagttcagtgcctgtcacgccctcagtgcctcctcctgcgagccagcactccacgccagctgggctgcccccctccagggcaaagccaccaactgaaggtgcagggtcccctgccaaagccagccaggcttccaagctgcgagcctccaaggaggagaaagaggactggctgagccatgccctgtctcggaagaagtcccaaggcctggccagagagcagcatgctgggacctctgagggcctgcatttggcggggacagcgggccatcccccttctggcagccaacctctcaccagcacacaagggcttgagcacgcagctgctggagggagttctggaacaactgcacgagaaagaccgtgtgtcaggcctggtgtctcggggtcccctgtgactcagaaccatgccgcctcagcactccctacaggttccccaaagaggggaacagcccctggagacctctcagccactgagcctgccacgtgtttcccgagcacccagaaacccacagagccttccgtgcccgtccagcccctgctcccagagtccctggcccggagcctgctgccgagcacagaataccagaagcagctcctggcagcacaggtgcaacttcagtgcagccccgctgagctccaggccgagctgctgcatagccaggcccggctggcagagctggaggcccaggtgcggaagctggagctagaacgggcccagcatgagctgctgctggggagtctgcagcagcagcaccaggcagacctggagctcatcgagagtgcacacagaagccgcatcaaggtgctagaaacatcgtaccagcaacgggaggagcggctccggagagagaacgaagagctgtcagctcggtatctgtcgcagtgccaggaggccgaacaggcccgtgctgagcttacggcccagcaccagcggcgcttggcggccatagcgcaggagaaggaccaggaaatggagcggctccgggagctgcagcgggcgtccatcctagacatgcgcagagaccacgaggagcagctgcagcggctaaagctgctgaaggaccgagaggtcgatgcggccaccagtgccacctcccacacgcggtccctgaatagcatcatccaccagatggagaagttctccagcagcctgcacgagttgtcctcccgcgtggaggcctcgcacctcaccacctcccaggagcgggagctggggatccggcagcgtgacgagcagctgcgggcactgcaggagcggctgggccagcagcagcgggacatggaggaggagcggagccggcaacaggaggtcatcgggaagatggaggcacggctgaatgagcagagccggctgctggagcaggaacgctggcgggtgactgccgagcagtccaaggcggagtccatgcagcgcgccctagaggagcaaaggaaggtcacggcccagcagatggccatggaaagggcggagctggaacgggccaagagcgccttgctggaggagcagaagtctgtcatgctcaagtgcggggaggagcggcggcgcctggctgccgagtgggcggagttctccgcgcagcaaaagctgagtaaggagcgggccgagcgcgaggccgagcgggcattgcaggtggacacccagcgggagggcaccctcatcagcctggccaaggagcaggctgagctgaagatcagggccagcgagctccgggccgaggagaagcagctggcagcggagagagcagccctggagcaggagcggcaggagctgcggctggagaaggagaggatcaacgccaccgccctgcgtgtcaagctccgcgccgaggaggtggagagcatgagcaaggtggcctccgagaagtacgaggagggggagcgggcattgcgcgaggcccagcaggtgcaggcagagcagcaggcccggttgcaggcggtgcagcaacagcaggagcggctgcggaagcaggagcagcacatgcaccaggagcatctgagtctggcccagcagaggctgcaactggaccgcgcacgacaggacctgccctctagcctcgtgggtctgttccccagggcccagggccctgcagcctccagccagagtgccctcatgcctcctgctcccaccacccgttggtgcagccagccgccaactggcctggaccccagccccttgcacctccatgccaggctggcactgctgaggcacatggcagagcaggaccgtgacttcttggagaatgaacagttcttcctggagaccctgaagaaagggtcctacaatttgacatctcattcagcctga

SEQ ID NO: 133199 - DNA, 1841 bp, Homo sapiens
  Payload ID: 6027
  Gene Symbol: FADD
  Gene Name: Fas (TNFRSF6)-associated via death domain
  Uniprot ID: Q13158
  ENST ID: ENST00000301838
  CDS Start-End: 298-924
gacgatacgccgggcgcaggcgcagaagccgcgcccgtccgcggcgccgccagccagggcggaaacggctgcggcttcgctagggacgcatgcgcgggtcccttagttttcgcgagataacggtcgaaaacgcgctcttgtcgatttcctgtagtgaatcaggcaccggagtgcaggttcgggggtggaatccttgggccgctgggcaagcggcgagacctggccagggccagcgagccgaggacagagggcgcacggagggccgggccgcagccccggccgcttgcagaccccgccatggacccgttcctggtgctgctgcactcggtgtcgtccagcctgtcgagcagcgagctgaccgagctcaagttcctatgcctcgggcgcgtgggcaagcgcaagctggagcgcgtgcagagcggcctagacctcttctccatgctgctggagcagaacgacctggagcccgggcacaccgagctcctgcgcgagctgctcgcctccctgcggcgccacgacctgctgcggcgcgtcgacgacttcgaggcgggggcggcggccggggccgcgcctggggaagaagacctgtgtgcagcatttaacgtcatatgtgataatgtggggaaagattggagaaggctggctcgtcagctcaaagtctcagacaccaagatcgacagcatcgaggacagatacccccgcaacctgacagagcgtgtgcgggagtcactgagaatctggaagaacacagagaaggagaacgcaacagtggcccacctggtgggggctctcaggtcctgccagatgaacctggtggctgacctggtacaagaggttcagcaggcccgtgacctccagaacaggagtggggccatgtccccgatgtcatggaactcagacgcatctacctccgaagcgtcctgatgggccgctgctttgcgctggtggaccacaggcatctacacagcctggactttggttctctccaggaaggtagcccagcactgtgaagacccagcaggaagccaggctgagtgagccacagaccacctgcttctgaactcaagctgcgtttattaatgcctctcccgcaccaggccgggcttgggccctgcacagatatttccatttcttcctcactatgacactgagcaagatcttgtctccactaaatgagctcctgcgggagtagttggaaagttggaaccgtgtccagcacagaaggaatctgtgcagatgagcagtcacactgttactccacagcggaggagaccagctcagaggcccaggaatcggagcgaagcagagaggtggagaactgggatttgaacccccgccatccttcaccagagcccatgctcaaccactgtggcgttctgctgcccctgcagttggcagaaaggatgttttgtcccatttccttggaggccaccgggacagacctggacactagggtcaggcggggtgctgtggtggggagaggcatggctggggtgggggtggggagacctggttggccgtggtccagctcttggcccctgtgtgagttgagtctcctctctgagactgctaagtaggggcagtgatggttgccaggacgaattgagataatatctgtgaggtgctgatgagtgattgacacacagcactctctaaatcttccttgtgaggattatgggtcctgcaattctacagtttcttactgttttgtatcaaaatcactatctttctgataacagaattgccaaggcagcgggatctcgtatctttaaaaagcagtcctcttattcctaaggtaatcctattaaaacacagctttacaacttccatactacaaaaaa

SEQ ID NO: 133200 - DNA, 1622 bp, Homo sapiens
  Payload ID: 6028
  Gene Symbol: FAIM
  Gene Name: Fas apoptotic inhibitory molecule
  Uniprot ID: Q9NVQ4
  ENST ID: ENST00000338446
  CDS Start-End: 684-1325
gcactgcgggacatggtgatgtcctgggttggggctgaggaaggcctatgcgcggagggtgcggccttcggctaaggcagaggaccagggttgggtccgtggcggcgggaggggtggcctcctgcgctggtcgccccaggggacctgagaggcgcgacaaacagtcggcgcgtttggtactcgcgcctgcagagctttcaacctccgcgccggctgcgcctgtttctcggccaggggagcaaggccacgcggcctacgcagccgagtcggaaccaaccggttgtttggtgaaacctaccccagagcctcccgcggcccacagagcacagacagaatctccctctgtcacccaggctggagtgcagtggcatgatctcggctcactgcaacctccacctcccgggttcaagcgattcttgtgcctcagcctccggagtagctgggatttacagacgtgcgctaccatgcccggcaaatttttctatttttgcaaagacaggatttcaccgttttgtccaggctggtcttgaactattgacctcaagtgatccgaccgccttgacctcccaaagtgctgggattacggggtgtgagccatcgcgcctggccactttctccaaagttttaaaccaaagccttcttcggcagagctacgacccttcctctatggcccattctatcctatgctgcttccctttataaggacactcccactgttgtgctataatcatctcttggtatctccggactctgccactctgagccctccttacagcctagaaaaaatgacagatctcgtagctgtttgggatgttgctttaagtgacggagtccacaagatcgaatttgaacatgggactacatcaggcaaacgagtagtatatgtagatggaaaggaagagataagaaaagagtggatgttcaaattagtgggcaaagaaacattctatgttggagctgcaaagacaaaagcgaccataaatatagacgctatcagtggttttgcttatgaatatactctggaaattaatgggaaaagtctcaagaagtatatggaggacagatcaaaaaccaccaatacttgggtattacacatggatggtgagaactttagaattgttttggaaaaagatgctatggacgtatggtgcaatggtaaaaaattggagacagcgggtgagtttgtagatgatgggactgaaactcacttcagtatcgggaaccatgactgttacataaaggctgtcagtagtgggaagcggaaagaagggattattcatactctcattgtggataatagagaaatcccagagattgcaagttaatgaattttcatcttaagaagtaaagatcaggactttttaattactgtggtaattaaatgtgttcagtatgtacttatcagtacatttagtctgcaatgttttaattttttaaaaagttacatgaaactaacattccaagggtcaggaaaaaaaccaattatgtatagtcataaaaattacaatttatgatgcaaataatgtaaaatgttttaaagacaaatggcaaataagatatggaccaaagtcactaatgttttacaacagtaacctttactataataaatacttttaaaaaaa

SEQ ID NO: 133201 - DNA, 1157 bp, Homo sapiens
  Payload ID: 6028
  Gene Symbol: FAIM
  Gene Name: Fas apoptotic inhibitory molecule
  Uniprot ID: Q9NVQ4
  ENST ID: ENST00000360570
  CDS Start-End: 255-860
tgggtccgtggcggcgggaggggtggcctcctgcgctggtcgccccaggggacctgagaggcgcgacaaacagtcggcgcgtttggtactcgcgcctgcagagctttcaacctccgcgccggctgcgcctgtttctcggccaggggagcaaggccacgcggcctacgcagccgagtcggaaccaaccggttgtttggtgaaacctaccccagagcctcccgcggcccacagagcacagactgtttttgccaaccatggcatctggagatgacagtcctatctttgaagatgatgaaagccctccttacagcctagaaaaaatgacagatctcgtagctgtttgggatgttgctttaagtgacggagtccacaagatcgaatttgaacatgggactacatcaggcaaacgagtagtatatgtagatggaaaggaagagataagaaaagagtggatgttcaaattagtgggcaaagaaacattctatgttggagctgcaaagacaaaagcgaccataaatatagacgctatcagtggttttgcttatgaatatactctggaaattaatgggaaaagtctcaagaagtatatggaggacagatcaaaaaccaccaatacttgggtattacacatggatggtgagaactttagaattgttttggaaaaagatgctatggacgtatggtgcaatggtaaaaaattggagacagcgggtgagtttgtagatgatgggactgaaactcacttcagtatcgggaaccatgactgttacataaaggctgtcagtagtgggaagcggaaagaagggattattcatactctcattgtggataatagagaaatcccagagattgcaagttaatgaattttcatcttaagaagtaaagatcaggactttttaattactgtggtaattaaatgtgttcagtatgtacttatcagtacatttagtctgcaatgttttaattttttaaaaagttacatgaaactaacattccaagggtcaggaaaaaaaccaattatgtatagtcataaaaattacaatttatgatgcaaataatgtaaaatgttttaaagacaaatggcaaataagatatggaccaaagtcactaatgttttacaacagtaacctttactataataaatacttttaaaaaaa

SEQ ID NO: 133202 - DNA, 927 bp, Homo sapiens
  Payload ID: 6028
  Gene Symbol: FAIM
  Gene Name: Fas apoptotic inhibitory molecule
  Uniprot ID: Q9NVQ4
  ENST ID: ENST00000393034
  CDS Start-End: 98-637
gcggcggccatctctgggcggcggcggcgggcggtgtttgcgcggtcggtgagacccgcgcgggtgagacgctggccctccttacagcctagaaaaaatgacagatctcgtagctgtttgggatgttgctttaagtgacggagtccacaagatcgaatttgaacatgggactacatcaggcaaacgagtagtatatgtagatggaaaggaagagataagaaaagagtggatgttcaaattagtgggcaaagaaacattctatgttggagctgcaaagacaaaagcgaccataaatatagacgctatcagtggttttgcttatgaatatactctggaaattaatgggaaaagtctcaagaagtatatggaggacagatcaaaaaccaccaatacttgggtattacacatggatggtgagaactttagaattgttttggaaaaagatgctatggacgtatggtgcaatggtaaaaaattggagacagcgggtgagtttgtagatgatgggactgaaactcacttcagtatcgggaaccatgactgttacataaaggctgtcagtagtgggaagcggaaagaagggattattcatactctcattgtggataatagagaaatcccagagattgcaagttaatgaattttcatcttaagaagtaaagatcaggactttttaattactgtggtaattaaatgtgttcagtatgtacttatcagtacatttagtctgcaatgttttaattttttaaaaagttacatgaaactaacattccaagggtcaggaaaaaaaccaattatgtatagtcataaaaattacaatttatgatgcaaataatgtaaaatgttttaaagacaaatggcaaataagatatggaccaaagtcactaatgttttacaacagtaacctttactataataaatactttt

SEQ ID NO: 133203 - DNA, 946 bp, Homo sapiens
  Payload ID: 6028
  Gene Symbol: FAIM
  Gene Name: Fas apoptotic inhibitory molecule
  Uniprot ID: Q9NVQ4
  ENST ID: ENST00000393035
  CDS Start-End: 110-649
ggccacgcggcctacgcagccgagtcggaaccaaccggttgtttggtgaaacctaccccagagcctcccgcggcccacagagcacagccctccttacagcctagaaaaaatgacagatctcgtagctgtttgggatgttgctttaagtgacggagtccacaagatcgaatttgaacatgggactacatcaggcaaacgagtagtatatgtagatggaaaggaagagataagaaaagagtggatgttcaaattagtgggcaaagaaacattctatgttggagctgcaaagacaaaagcgaccataaatatagacgctatcagtggttttgcttatgaatatactctggaaattaatgggaaaagtctcaagaagtatatggaggacagatcaaaaaccaccaatacttgggtattacacatggatggtgagaactttagaattgttttggaaaaagatgctatggacgtatggtgcaatggtaaaaaattggagacagcgggtgagtttgtagatgatgggactgaaactcacttcagtatcgggaaccatgactgttacataaaggctgtcagtagtgggaagcggaaagaagggattattcatactctcattgtggataatagagaaatcccagagattgcaagttaatgaattttcatcttaagaagtaaagatcaggactttttaattactgtggtaattaaatgtgttcagtatgtacttatcagtacatttagtctgcaatgttttaattttttaaaaagttacatgaaactaacattccaagggtcaggaaaaaaaccaattatgtatagtcataaaaattacaatttatgatgcaaataatgtaaaatgttttaaagacaaatggcaaataagatatggaccaaagtcactaatgttttacaacagtaacctttactataataaatacttttaaaaaaa

SEQ ID NO: 133204 - DNA, 641 bp, Homo sapiens
  Payload ID: 6028
  Gene Symbol: FAIM
  Gene Name: Fas apoptotic inhibitory molecule
  Uniprot ID: Q9NVQ4
  ENST ID: ENST00000464668
  CDS Start-End: 78-617
gtagttgtatcttaaaggaagagtgaataagagggagaaaatagttacatgtactccctccttacagcctagaaaaaatgacagatctcgtagctgtttgggatgttgctttaagtgacggagtccacaagatcgaatttgaacatgggactacatcaggcaaacgagtagtatatgtagatggaaaggaagagataagaaaagagtggatgttcaaattagtgggcaaagaaacattctatgttggagctgcaaagacaaaagcgaccataaatatagacgctatcagtggttttgcttatgaatatactctggaaattaatgggaaaagtctcaagaagtatatggaggacagatcaaaaaccaccaatacttgggtattacacatggatggtgagaactttagaattgttttggaaaaagatgctatggacgtatggtgcaatggtaaaaaattggagacagcgggtgagtttgtagatgatgggactgaaactcacttcagtatcgggaaccatgactgttacataaaggctgtcagtagtgggaagcggaaagaagggattattcatactctcattgtggataatagagaaatcccagagattgcaagttaatgaattttcatcttaagaagtaaa

SEQ ID NO: 133205 - DNA, 465 bp, Homo sapiens
  Payload ID: 6028
  Gene Symbol: FAIM
  Gene Name: Fas apoptotic inhibitory molecule
  ENST ID: ENST00000479848
  CDS Start-End: 81-465
aggaagagtgaataagagggagaaaatagttacatgtactgtgagtagaatttcttagccctccttacagcctagaaaaaatgacagatctcgtagctgtttgggatgttgctttaagtgacggagtccacaagatcgaatttgaacatgggactacatcaggcaaacgagtagtatatgtagatggaaaggaagagataagaaaagagtggatgttcaaattagtgggcaaagaaacattctatgttggagctgcaaagacaaaagcgaccataaatatagacgctatcagtggttttgcttatgaatatactctggaaattaatgggaaaagtctcaagaagtatatggaggacagatcaaaaaccaccaatacttgggtattacacatggatggtgagaactttagaattgttttggaaaaagatgctatggacgtatggtgcaatggtaaaaaattggaga

SEQ ID NO: 133206 - DNA, 4654 bp, Homo sapiens
  Payload ID: 6029
  Gene Symbol: FAIM2
  Gene Name: Fas apoptotic inhibitory molecule 2
  Uniprot ID: Q9BWQ8
  ENST ID: ENST00000320634
  CDS Start-End: 96-1046
agaacccacgcggaggaaggaagagacgcaggcaggctgcggttacccaagcggccacccgggcctcagggaccccttccccgagagacggcaccatgacccagggaaagctctccgtggctaacaaggcccctgggaccgaggggcagcagcaggtgcatggcgagaagaaggaggctccagcagtgccctcagccccaccctcctatgaggaagccacctctggggaggggatgaaggcaggggccttccccccagcccccacagcggtgcctctccaccctagctgggcctatgtggaccccagcagcagctccagctatgacaacggtttccccaccggagaccatgagctcttcaccactttcagctgggatgaccagaaagttcgtcgagtctttgtcagaaaggtctacaccatcctgctgattcagctgctggtgaccttggctgtcgtggctctctttactttctgtgaccctgtcaaggactatgtccaggccaacccaggctggtactgggcatcctatgctgtgttctttgcaacctacctgaccctggcttgctgttctggacccaggaggcatttcccctggaacctgattctcctgaccgtctttaccctgtccatggcctacctcactgggatgctgtccagctactacaacaccacctccgtgctgctgtgcctgggcatcacggcccttgtctgcctctcagtcaccgtcttcagcttccagaccaagttcgacttcacctcctgccagggcgtgctcttcgtgcttctcatgactcttttcttcagcggactcatcctggccatcctcctacccttccaatatgtgccctggctccatgcagtttatgcagcactgggagcgggtgtatttacattgttcctggcacttgacacccagttgctgatgggtaaccgacgccactcgctgagccctgaggagtatatttttggagccctcaacatttacctagacatcatctatatcttcaccttcttcctgcagctttttggcactaaccgagaatgaggagccctccctgccccaccgtcctccagagaatgcgcccctcctggttccctgtccctcccctgcgctcctgcgagaccagatataaaactagctgccaacccagcctgtggccaggtcactgtctaccccagcccagcccagccctctgccgcttgtacatacgccatggggaccctgaggaactgaggccacgtcaatccctgtgccgccccattcgcccgttacatcttccaaactgggacggtcaaggctgaaggctcctctgggtttgagggtccaagggacaaggaggagaagcctagcaggatttcagatgcaggagagagacccaggaagcccggcagagccctgagccccactgcaattcctcctagggctgcacaatcatgtggccttagggcacactgtcctgcatccagtctgtgtcctcctgtctttctcatccaggtcaggcattgacactttgtaagaaagggggtaggggacacagctgggcaggtggagtgggtgggcaggatggctgtcccagtctgcccatcttctcttggctctgggaccagcggcttgttctagggatttggacctggaggccaagggcaataggagagggtctgaagcctgtgctgtctgctgcttgctgtgaatggccctcccgggtcatgacagagctcttttggggcaggaggtgagggcagggggccccgctccttggtaagggcctgccctggggctcccagggaagtgggagctggggagccaatccacccagacccgcgtccacctgggaggcatttggggttgcaggaccgagacccacatcctctcactcacttctccacccgccaggcagctgccacaggcctaaggctgagtgaggtgtgattgggccctccggctggatgttctgggggaggaggcaatcgctgtagctgccaggccagccccatctggaaggagtccctgctctgcctcagccctaacccgaggctgtgtgggagtcccttctgcacctcttatttcctaaacccttcctgtcagctgctgtttgctggctcgtccccagccaggcctcctgaggtcttcatagttggcacagtccacatctcttctagcttcactggccactcactcagcccagagtccctaagtgctcccccacttatctctgcatctctccaatttggaagccatccagctgatgctaacagccagggccagtccctccagctggtcccatgtaatgaggccagggctccttatcagcttccaggcggctgggatctcaggcagggtgtgcgtcagccctccaacccccagaggggcgcctgtggggagggaaccaggaggccacactgggggagcgtgcagccagcatgtgcagtggccaactccaggccagtggaaagttactgtgtggatacaggaaggctctgagtggctagcaggaccctcccttggcttcgccctcctcctcttctctctcccctgtgctgggagctccgtctgccttgggaagggagacgaggtgtgctgttccttcccagccccatccctccccacccttcctactcccagctttcaagaaacattgcagaagcatttgaagttttgttccatcttggatatttgaagagaaaaggagccaagaactggcgggtggtgtgtgtgcagcaaaggcattgggggcacgggtgagatgcccactgtgtgctggtctaaattaatccatcgcagtgatcctccagagacagcgctctgctcatgtccgtagcagagggaaaagccgaggtgctcagaaaggctcggtaatgagtcccaggtcatacggctagcgagtggcgggcctggggttcagacccacagctgcctcaagcaaacagggtatcacgcttgcccctgggcctgggtgggggccggaatgagaccacatgagagcgcagagaggtgggtggtcaggccctgatgtcctggggatttcttgtcctcagtgccacccggcctcccgtctttcctgaaacccctcgccagattttgcactctgaggtttctatcttccagacaagagctgggaggcaagatttctggtttctggttcctagcctcactgccagcgggctcctgctattaggtgagggtttcttgctgtctggaattcagtttttccatctgccacatggaagttcatagccaggatagggcgggagaggcaccagaacatttctctccactgactttctcacccggttcccaccctcctccacctcctctcctccgggcccctcagtttcctctcctcatctctggcctcagttccagagggttagccccagcaccccactctcctgccactgtcagatagccttggtcatgcttcctagaatctacttgtccaagttctcctctccctgggataagttactgcagaaactggggatttagaagcttattcagggctgagtgccaaaagcttgggggaggagggacaggtcctcggcaataaacagtgtcacacacgcatcacagccatttgagaaatggcttctttgcagagctggggaagccgggcagaagatgccgcagcctcctactctgggtcctgagggggggtggcaggtaccacagtgtaggcagcagggtcagggccaaagtctatgcgttccatctccaatccaggcagtgaggaatcctgaaacaccaggagaggcgtcagaagtaggaagggcaggggaacaggaatgcaagattaaggaaaccgcagctgagcaggtgtcacaagctgtaaaggaggaagggagtctgcaggcccttcacatttttggcctgggtggggctgggcccaggaaggggtgggctggattttgtaaagctggaggcagccaggaatctgactgtccggaatgtgagttgaggggtctcccactgaagtcctcttctggaagctgcagatgggggcccgggaggcacacacgagtctgggactcattcccgggcacacctatggctccttcggtatcacctggggaagccccggaatcttagttcttccattccctactcttccttccgagggagtcaggatgggacagacacccattttccaaaaggctccttgcctccttccctggcccacctgaagccaagtcccaggtgtcctggctgctctcctgggcggggtgggatttttgcataagcactttgctgccctccagtggctgcttgaggaaacgcagggcctggtttgggagagtcaccgagggcccatgtggctggaggttgggggcaggatctggcccgagctctcctcagacctccccagacctgtcttctcatcagccaccgctgttttcttttgccgaacgatggttgcatctctcggacacagtgtaccccctcccaagccctccctgagccgttctcctgagtccctgagggcagacacagctccagggacccaggccagctgccacacccccgacactcctgctgtccactggccttagctcctgcaagttccccagtgtccgcacctgttcccttccctgacctcaccttcctggggtctgtgactgactggagataaaaataaaagcaattgtgacacctga

SEQ ID NO: 133207 - DNA, 815 bp, Homo sapiens
  Payload ID: 6029
  Gene Symbol: FAIM2
  Gene Name: Fas apoptotic inhibitory molecule 2
  ENST ID: ENST00000552669
  CDS Start-End: 18-815
catagggagtagccaccatggtctacacctcccactacaaatcccctgggcgcagacccctgaagactcaccccaccgtgacctactggagggtcaatgaaggcagcagctccagctatgacaacggtttccccaccggagaccatgagctcttcaccactttcagctgggatgaccagaaagttcgtcgagtctttgtcagaaaggtctacaccatcctgctgattcagctgctggtgaccttggctgtcgtggctctctttactttctgtgaccctgtcaaggactatgtccaggccaacccaggctggtactgggcatcctatgctgtgttctttgcaacctacctgaccctggcttgctgttctggacccaggaggcatttcccctggaacctgattctcctgaccgtctttaccctgtccatggcctacctcactgggatgctgtccagctactacaacaccacctccgtgctgctgtgcctgggcatcacggcccttgtctgcctctcagtcaccgtcttcagcttccagaccaagttcgacttcacctcctgccagggcgtgctcttcgtgcttctcatgactcttttcttcagcggactcatcctggccatcctcctacccttccaatatgtgccctggctccatgcagtttatgcagcactgggagcgggtgtatttacattgttcctggcacttgacacccagttgctgatgggtaaccgacgccactcgctgagccctgaggagtatatttttggagccctcaacatttacctagacatcatctatatcttcaccttcttcctg

SEQ ID NO: 133208 - DNA, 1047 bp, Homo sapiens
  Payload ID: 6029
  Gene Symbol: FAIM2
  Gene Name: Fas apoptotic inhibitory molecule 2
  ENST ID: ENST00000550195
  CDS Start-End: 78-704
ggaagagacgcaggcaggctgcggttacccaagcggccacccgggcctcagggaccccttccccgagagacggcaccatgacccagggaaagctctccgtggctaacaaggcccctgggaccgaggggcagcagcaggtgcatggcgagaagaaggaggctccagcagtgccctcagccccaccctcctatgaggaagccacctctggggaggggatgaaggcaggggccttccccccagcccccacagcggtgcctctccaccctagctgggcctatgtggaccccagcagcagctccagctatgacaacggtttccccaccggagaccatgagctcttcaccactttcagctgggatgaccagaaagttcgtcgagtctttgtcagaaagaacccctcccacccccaggtctacaccatcctgctgattcagctgctggtgaccttggctgtcgtggctctctttactttctgtgaccctgtcaaggactatgtccaggccaacccaggctggtactgggcatcctatgctgtgttctttgcaacctacctgaccctggcttgctgttctggacccaggaggcatttcccctggaacctgattctcctgaccgtctttaccctgtccatggcctacctcactgggatgctgtccagttcgacttcacctcctgccagggcgtgctcttcgtgcttctcatgactcttttcttcagcggactcatcctggccatcctcctacccttccaatatgtgccctggctccatgcagtttatgcagcactgggagcgggtgtatttacattgttcctggcacttgacacccagttgctgatgggtaaccgacgccactcgctgagccctgaggagtatatttttggagccctcaacatttacctagacatcatctatatcttcaccttcttcctgcagctttttggcactaaccgagaatgaggagccctccctgccccaccgtcctccagagaatgcgcccctcctggttccctgtccctcccctgcgctcctgcgagaccagatataaa

SEQ ID NO: 133209 - DNA, 547 bp, Homo sapiens
  Payload ID: 6029
  Gene Symbol: FAIM2
  Gene Name: Fas apoptotic inhibitory molecule 2
  ENST ID: ENST00000547871
  CDS Start-End: 214-547
ctctccctgtatgcaagctctttgggcctcaaatgatgtcactgggtgataccacctcccgccattggtcacacctcacttgggagtgccctctccgtggctaacaaggcccctgggaccgaggggcagcagcaggtgcatggcgagaagaaggaggctccagcagtgccctcagccccaccctcctatgaggaagccacctctggggaggggatgaaggcaggggccttccccccagcccccacagcggtgcctctccaccctagctgggcctatgtggaccccagcagcagctccagctatgacaacggtttccccaccggagaccatgagctcttcaccactttcagctgggatgaccagaaagttcgtcgagtctttgtcagaaaggtctacaccatcctgctgattcagctgctggtgaccttggctgtcgtggctctctttactttctgtgaccctgtcaaggactatgtccaggccaacccaggctggtactgggcatcctatgctgtgttctttgcaacctacctgaccctggcttgct

SEQ ID NO: 133210 - DNA, 980 bp, Homo sapiens
  Payload ID: 6029
  Gene Symbol: FAIM2
  Gene Name: Fas apoptotic inhibitory molecule 2
  ENST ID: ENST00000550635
  CDS Start-End: 235-980
ggccctgatgcccggctctggtttcacgcgggcagcgtcagctgcgtcctccgcagcatcttcccaggcccggccctctcctccccccgcgccgatggtacgcgccggctcgcctggcccggctgcagtggatgttgctagaacccacgcggaggaaggaagagacgcaggcaggctgcggttacccaagcggccacccgggcctcagggaccccttccccgagagacggcaccatgacccagggaaagctctccgtggctaacaaggcccctgggaccgaggggcagcagcaggtgcatggcgagaagaaggaggctccagcagtgccctcagccccaccctcctatgaggaagccacctctggggaggggatgaaggcaggggccttccccccagcccccacagcggtgcctctccaccctagctgggcctatgtggaccccagcagcagctccagctatgacaacggtttccccaccggagaccatgagctcttcaccactttcagctgggatgaccagaaagttcgtcgagtctttgtcagaaaggtctacaccatcctgctgattcagctgctggtgaccttggctgtcgtggctctctttactttctgtgaccctgtcaaggactatgtccaggccaacccaggctggtactgggcatcctatgctgtgttctttgcaacctacctgaccctggcttgctgttctggacccaggaggcatttcccctggaacctgattctcctgaccgtctttaccctgtccatggcctacctcactgggatgctgtccagctactacaacaccacctccgtgctgctgtgcctgggcatcacggcccttgtctgcctctcagtcaccgtcttcagcttccagaccaagttcgacttcacctcctgccagggcgtgctcttcgtgcttctcatgactcttttcttcagcggactcatcctggccatcctcctacccttccaata

SEQ ID NO: 133211 - DNA, 433 bp, Homo sapiens
  Payload ID: 6029
  Gene Symbol: FAIM2
  Gene Name: Fas apoptotic inhibitory molecule 2
  ENST ID: ENST00000552863
  CDS Start-End: 1-433
ctatgtccaggccaacccaggctggtactgggcatcctatgctgtgttctttgcaacctacctgaccctggcttgctgttctggacccaggaggcatttcccctggaacctgattctcctgaccgtctttaccctgtccatggcctacctcactgggatgctgtccagctactacaacaccacctccgtgctgctgtgcctgggcatcacggcccttgtctgcctctcagtcaccgtcttcagcttccagaccaagttcgacttcacctcctgccagggcgtgctcttcgtgcttctcatgactcttttcttcagcggactcatcctggccatcctcctacccttccaatatttcctggcacttgacacccagttgctgatgggtaaccgacgccactcgctgagccctgaggagtatatttttggagccctc

SEQ ID NO: 133212 - DNA, 2094 bp, Homo sapiens
  Payload ID: 6029
  Gene Symbol: FAIM2
  Gene Name: Fas apoptotic inhibitory molecule 2
  Uniprot ID: Q9BWQ8
  ENST ID: ENST00000550890
  CDS Start-End: 1178-1990
ctcagtggccctttaggtctaacacagtcttctgggaaccagacctaaatcccattttctgagagccgggctttttgttgctgtttcaatttcacaccaccccctccaccccagtctttccttctctggctgcctcattcaggccttcccagctcaaatcctctcaccaaagctaaacatgtccacgggtggggggcaggggacacatctgagtgtaaatggactcgcatttccaacctgccatggggacgtttccctttgagcctcagtttcctcatctgttcagtgacggaagagactcaactggatgtcttctgaggccccttccactgggtcactctgtgagtctgttctggtttaggggagaggctgagattcctacaggatgaggccagaacagacccttagcctggatcctcttgcccttcctccaccctgaaggcccttcttcttttctgttttctccctctcctcttccctttctgttgcccttctctctcccatctccattctccttgcatcacttccagcgcaacagaaggatcaatcccagtggatgatgcctaggccctgcctctcagtgggccacatgcagctctgtgaccttggatgaatcgctcttcctctgtgatcctcattctcctcattttaaagcaggggtcaaaatgcagctagcaagtctcaggaagattaaatgacataaccttttatttgtaacaatctactatgtgccaggctcttttctggaaccatagagaccctgcccctaccccagggacaatgacagtgacaaccaatggtggacactcctaagaattttctctttcctctgttcctatcccagctccaccatgtgccccagctagctctgacccctctggagcttagttctcttgtctataaaatagagacattcttgtctgcattcctggcttccaagtgcaggtaaggaaggaaccatgaaagttccaggaattgaagagttggtgaggaggaggagttggaaggctccctttccctggtgactatctctctctctgactctactccatagctctccgtggctaacaaggcccctgggaccgaggggcagcagcaggtgcatggcgagaagaaggaggctccagcagtgccctcagccccaccctcctatgaggaagccacctctggggaggggatgaaggcaggggccttccccccagcccccacagcggtgcctctccaccctagctgggcctatgtggaccccagcagcagctccagctatgacaacggtttccccaccggagaccatgagctcttcaccactttcagctgggatgaccagaaagttcgtcgagtctttgtcagaaaggtctacaccatcctgctgattcagctgctggtgaccttggctgtcgtggctctctttactttctgtgaccctgtcaaggactatgtccaggccaacccaggctggtactgggcatcctatgctgtgttctttgcaacctacctgaccctggcttgctgttctggacccaggaggcatttcccctggaacctgattctcctgaccgtctttaccctgtccatggcctacctcactgggatgctgtccagctactacaacaccacctccgtgctgctgtgcctgggcatcacggcccttgtctgcctctcagtcaccgtcttcagcttccagaccaagttcgacttcacctcctgccagggcgtgctcttcgtgcttctcatgactcttttcttcagcggactcatcctggccatcctcctacccttccaatatgtgccctggctccatgcagtttatgcagcactgggagcgggtgtatttacattgttcctggcacttgacacccagttgctgatgggtaaccgacgccactcgctgagccctgaggagtatatttttggagccctcaacatttacctagacatcatctatatcttcaccttcttcctgcagctttttggcactaaccgagaatgaggagccctccctgccccaccgtcctccagagaatgcgcccctcctggttccctgtccctcccctgcgctcctgcgagaccagatataaaactagctgccaaccc

SEQ ID NO: 133213 - DNA, 4515 bp, Homo sapiens
  Payload ID: 6030
  Gene Symbol: FAF2
  Gene Name: Fas associated factor family member 2
  Uniprot ID: Q96CS3
  ENST ID: ENST00000261942
  CDS Start-End: 54-1391
agttccggcgggtgacggtgcggacgggtcaggagcgtagaggcggcggcaaaatggcggcgcctgaggagcgggatctaacccaggagcagacagagaagctgctgcagtttcaggatctcactggcatcgaatctatggatcagtgtcgccataccttggaacagcataactggaacatagaggctgctgtacaggacagattgaatgagcaagagggcgtacctagtgttttcaacccacctccatcacgacccctgcaggttaatacagctgaccacaggatctacagctatgttgtctcaagacctcaaccaagggggctgcttggatggggttattacttgataatgcttccattccggtttacctattacacgatacttgatatatttaggtttgctcttcgttttatacggcctgaccctcgcagccgggtcactgaccccgttggggacattgtttcatttatgcactcttttgaagagaaatatgggagggcacaccctgtcttctaccagggaacgtacagccaggcacttaacgatgccaaaagggagcttcgctttcttttggtttatcttcatggagatgatcaccaggactctgatgagttttgtcgcaacacactctgtgcacctgaagttatttcactaataaacactaggatgctcttctgggcatgctctacaaacaaacctgagggatacagggtctcacaggctttacgagagaacacctatccattcctggccatgattatgctgaaggatcgaaggatgactgtggtgggacggctagaaggcctcattcaacctgatgacctcattaaccaactgacatttatcatggatgctaaccagacttacctggtgtcagaacgcctagaaagggaagaaagaaaccagacccaagtgctgagacaacagcaggatgaggcctacctggcctctctcagagctgaccaggagaaagaaagaaagaaacgggaggagcgggagcgtaagcggcggaaggaggaggaggtgcaacagcaaaagttggcagaggagagacggcggcagaatttacaggaggaaaaggaaaggaagttggaatgcctgccccctgaaccttcccctgatgaccctgaaagtgtcaagatcatcttcaaattacctaatgattctcgagtagagagacgattccacttttcacagtctctaacagtaatccacgacttcttattctccttgaaggaaagcccagaaaagtttcagattgaagccaattttcccaggcgagtgctgccctgcatcccttcagaggagtggcccaatccccctacgctacaggaggccggactcagccacacagaagttctttttgttcaggacctaactgacgaatgacatttttttcttcctgtcccctcctaccccagtccctaaaagaaatggggaaaaaagaaaacaacagcaagtcagaaaaaaaaaacaagagagagaaattcatattattattattattataatacaatattttttttaaaagactgctgcatccttaggaaggatcagaaaccatgctgcccgtaagagtcacaacctgtgtgtgcgcgcaaggttagcaacaaacgtacccgcttggcaagcccacccttcctgtggcctctgtgcacgcaccttccagtgaacagagactcttcaccttcgacccatccattgtcccagctgggaaggggacattcccactagttctcattcattcttgcttttatgaaaaataaaagtgaaaaacctccatcaaccagctacttgcagcatctcctgaggacttgcttctcctgcctctggggaagagagggaagagaaagcacagagcagagaagcagagatgttccttgaactgcccacaagttttcaataacttttatttctgttttgtaatgaccaaaggaatgaggctgacataggtatatatatatatttttttcctttatttgataaagagccaattctttaaacccatgagtttatgccctgggctccttagcccacaatagtgtaataaaagtgccccgggctggtttgtgcttatttctgccattgtccctctcacgttcccagagaggtcattctttttggtccaactcttgctgtcctttcttaccacctgtgcaccccacttggagcagtgggaggaaatctgggtttgtggccccacaaaggctgtatatgtaaagatacacctatgtatgtggtggaactcacctttacacacaactgcagcttttccttggagtctgtaccaggtggtggttatggggtctgaaccaaaggatagcagctcttcattcctcttctgacatgtgcatgctgctccccccagccctgggctttcctgaattgccaagcctggtgcctttccaaaggactagcagggcctgtggtggagccagcagaaccacaggagagtgccctgcctgtctcagtggaagtgtattattgttttaaggatagaaccagaggccttgaagggagccaagacagaactcccagcctgtgtaatctattggaaggcacattttcatttctgatgcagccaccttctggaggcagcttttatcctttctctctattgctatgttgaagtaatagggttttttttaacctctggatgtctcgtctgtggttgagtttatggtaatgggtacatgggtcaggccatgtattaacagatgccagtgcgctctgacaagtattccaaagtgttctgtagctagactggtgcaggctcgttgtaccactgcaaccgactgacgttactgtagttcctagaatgctgtgagggcggggggttcagatcaacataaagcctaacttgctggagttgtagtctcaaggctttctctcttgcttaactaaaacctaaggaccactgtttttggtagcaattatatggttactatccactgcagtcctcagttgttggggtaaatcccacatggcagagtaaggcaccccacagaaattaacttggagagcctgagaaattcccagtggccttggcatagctgtctagaacaccatctctaggaaaatttaattctgtccctggccagctattgttcttccacttcgttttctgctgtcccaaggccagatgagtggaatcaccatctgactgctgtcaataaaatgtatctggcgtgaacagcaggataacccatgttctccacataaggataaccttacgtgaaaccttcctgctgacaaccatgcagaggaatttttccacttaagtcagagccttcctccccatctggaattcacagctgttccctggcagcacacaggagggtattaaggacctttgtgaggctaggtacactgtccacacctctttggggaagttacgattttttttttccatcataattcagtctcttcttattctacagtgtgcactttatgcctctcgccttttgataatagttgttcagtgaaggaagtcagctgccagaatattaagaagggtctccctttatgtcagtacaactgttagggcggccttcccatttactttaggtttcaagaggattcaccggaagcacatgccccggtctagtcccatttgaaacagttctgctttactgagaccctaggccggtctccttgctgaccctagcgctgctgcctaggtgccatttcctttcctcctcagtcaaatacaggctgcacattttgtcacttaatgccagtacaatctgtgttactcctaaggacttttgggattttgatgagacctgcgagggagaagacactgagaagccagtgatctgcaagcatttgctcttgtttccacatcacctctgggatatttcagctgttgtttccaaatggcaaatcatcaactaaaagcacttgtttcaagttttgttctgcactcccacgactgaagttgtagattgagctgaataaccatgggaagtgaccaagcaaagacactcgattggagtcagttgaatatttgtaccctcagtggagcccttctggtcttttcttccacttctgcagaatttcctctagcaaatacttctttctccttgcttgcctccaccatgatatttgaataagagatggccagaggataacacttgtctcttaaaaactaagctaaaaagaacctagaaccttcaattgagcagttgtgaaaattgctaatggtgccaaggccaagcaaagagtttcagaaaatgactgagaaggagcgataacccccagaatgcaaaatcaggggcatcattatccggtgcttgaacaaggagctccgctctacaactggtttttttaggacttgtgaggaacacagcaacggaaatccatccacaaaggatgcagtgccccaacttgtactgcgcctgaatagtcatgtgataatttactgaagaaatctagtgtactttaaatttttttcataaaagtttacattgtattgtaggttaacattaaatgttttatagcaaaaacttca

SEQ ID NO: 133214 - DNA, 684 bp, Homo sapiens
  Payload ID: 6030
  Gene Symbol: FAF2
  Gene Name: Fas associated factor family member 2
  ENST ID: ENST00000510730
  CDS Start-End: 540-684
gcgctagtgcggagagacaaggctccaggcacggaaaagcagatgccgggccggggttccagcgccgcagtcacggcggtggacggcaagctgtgcggacgactgggggcgccatgaatggtcgaggatccggggagccgagtccagatcttcctgcaagtgaccccgaagcggcaatggaacggtggccgaagtctgcccacagcttccgcttcgaaggcggcgtcggaaatgccgcgccagtatccagagcccttcggaacctcccgagagatggtcaggagcttttggaaactttaggtcaggggccagcgaccaaaaggctggtatttcggaacggctgcgtctcccgagaaacctccaagagtatctgaggttgccggaaaatggttagagagcagccgaaatcagccgaatgccattcgggatgctccggagcttctcgaggcacattcgggccctctcggctctgcaagactgcactggaatcttaggtctcctttcgtcgcctaatcttagcagatcctttcgtcgcctaaatggatctcactggcatcgaatctatggatcagtgtcgccataccttggaacagcataactggaacatagaggctgctgtacaggacagattgaatgagcaagagggcgtacctagtgttttcaacccacctccatcacgacccc

SEQ ID NO: 133215 - DNA, 1722 bp, Homo sapiens
  Payload ID: 6031
  Gene Symbol: FAS
  Gene Name: Fas cell surface death receptor
  ENST ID: ENST00000352159
  CDS Start-End: 191-892
cttctggggagtgagggaagcggtttacgagtgacttggctggagcctcaggggcgggcactggcacggaacacaccctgaggccagccctggctgcccaggcggagctgcctcttctcccgcgggttggtggacccgctcagtacggagttggggaagctctttcacttcggaggattgctcaacaaccatgctgggcatctggaccctcctacctctggttcttacgtctgttgctagattatcgtccaaaagtgttaatgcccaagtgactgacatcaactccaagggattggaattgaggaagactgttactacagttgagactcagaacttggaaggcctgcatcatgatggccaattctgccataagccctgtcctccaggtgaaaggaaagctagggactgcacagtcaatggggatgaaccagactgcgtgccctgccaagaagggaaggagtacacagacaaagcccatttttcttccaaatgcagaagatgtagattgtgtgatgaaggacatggcttagaagtggaaataaactgcacccggacccagaataccaagtgcagatgtaaaccaaactttttttgtaactctactgtatgtgaacactgtgacccttgcaccaaatgtgaacatggaatcatcaaggaatgcacactcaccagcaacaccaagtgcaaagaggaaggatccagatctaacttggggtggctttgtcttcttcttttgccaattccactaattgtttgggtgaagagaaaggaagtacagaaaacatgcagaaagcacagaaaggaaaaccaaggttctcatgaatctccaactttaaatcctgaaacagtggcaataaatttatctgactattttctatttttcagatgttgacttgagtaaatatatcaccactattgctggagtcatgacactaagtcaagttaaaggctttgttcgaaagaatggtgtcaatgaagccaaaatagatgagatcaagaatgacaatgtccaagacacagcagaacagaaagttcaactgcttcgtaattggcatcaacttcatggaaagaaagaagcgtatgacacattgattaaagatctcaaaaaagccaatctttgtactcttgcagagaaaattcagactatcatcctcaaggacattactagtgactcagaaaattcaaacttcagaaatgaaatccaaagcttggtctagagtgaaaaacaacaaattcagttctgagtatatgcaattagtgtttgaaaagattcttaatagctggctgtaaatactgcttggttttttactgggtacattttatcatttattagcgctgaagagccaacatatttgtagatttttaatatctcatgattctgcctccaaggatgtttaaaatctagttgggaaaacaaacttcatcaagagtaaatgcagtggcatgctaagtacccaaataggagtgtatgcagaggatgaaagattaagattatgctctggcatctaacatatgattctgtagtatgaatgtaatcagtgtatgttagtacaaatgtctatccacaggctaaccccactctatgaatcaatagaagaagctatgaccttttgctgaaatatcagttactgaacaggcaggccactttgcctctaaattacctctgataattctagagattttaccatatttctaaactttgtttataactctgagaagatc

SEQ ID NO: 133216 - DNA, 983 bp, Homo sapiens
  Payload ID: 6031
  Gene Symbol: FAS
  Gene Name: Fas cell surface death receptor
  Uniprot ID: P25445
  ENST ID: ENST00000355279
  CDS Start-End: 1-663
atgctgggcatctggaccctcctacctctggttcttacgtctgttgctagattatcgtccaaaagtgttaatgcccaagtgactgacatcaactccaagggattggaattgaggaagactgttactacagttgagactcagaacttggaaggcctgcatcatgatggccaattctgccataagccctgtcctccaggtgaaaggaaagctagggactgcacagtcaatggggatgaaccagactgcgtgccctgccaagaagggaaggagtacacagacaaagcccatttttcttccaaatgcagaagatgtagattgtgtgatgaaggacatggcttagaagtggaaataaactgcacccggacccagaataccaagtgcagatgtaaaccaaactttttttgtaactctactgtatgtgaacactgtgacccttgcaccaaatgtgaacatggaatcatcaaggaatgcacactcaccagcaacaccaagtgcaaagaggaaggatccagatctaacttggggtggctttgtcttcttcttttgccaattccactaattgtttgggtgaagagaaaggaagtacagaaaacatgcagaaagcacagaaaggaaaaccaaggttctcatgaatctccaactttaaatcctatgttgacttgagtaaatatatcaccactattgctggagtcatgacactaagtcaagttaaaggctttgttcgaaagaatggtgtcaatgaagccaaaatagatgagatcaagaatgacaatgtccaagacacagcagaacagaaagttcaactgcttcgtaattggcatcaacttcatggaaagaaagaagcgtatgacacattgattaaagatctcaaaaaagccaatctttgtactcttgcagagaaaattcagactatcatcctcaaggacattactagtgactcagaaaattcaaacttcagaaatgaaatccaaagcttggtctag

SEQ ID NO: 133217 - DNA, 2563 bp, Homo sapiens
  Payload ID: 6031
  Gene Symbol: FAS
  Gene Name: Fas cell surface death receptor
  Uniprot ID: P25445
  ENST ID: ENST00000355740
  CDS Start-End: 221-1228
gcaagagtgacacacaggtgttcaaagacgcttctggggagtgagggaagcggtttacgagtgacttggctggagcctcaggggcgggcactggcacggaacacaccctgaggccagccctggctgcccaggcggagctgcctcttctcccgcgggttggtggacccgctcagtacggagttggggaagctctttcacttcggaggattgctcaacaaccatgctgggcatctggaccctcctacctctggttcttacgtctgttgctagattatcgtccaaaagtgttaatgcccaagtgactgacatcaactccaagggattggaattgaggaagactgttactacagttgagactcagaacttggaaggcctgcatcatgatggccaattctgccataagccctgtcctccaggtgaaaggaaagctagggactgcacagtcaatggggatgaaccagactgcgtgccctgccaagaagggaaggagtacacagacaaagcccatttttcttccaaatgcagaagatgtagattgtgtgatgaaggacatggcttagaagtggaaataaactgcacccggacccagaataccaagtgcagatgtaaaccaaactttttttgtaactctactgtatgtgaacactgtgacccttgcaccaaatgtgaacatggaatcatcaaggaatgcacactcaccagcaacaccaagtgcaaagaggaaggatccagatctaacttggggtggctttgtcttcttcttttgccaattccactaattgtttgggtgaagagaaaggaagtacagaaaacatgcagaaagcacagaaaggaaaaccaaggttctcatgaatctccaactttaaatcctgaaacagtggcaataaatttatctgatgttgacttgagtaaatatatcaccactattgctggagtcatgacactaagtcaagttaaaggctttgttcgaaagaatggtgtcaatgaagccaaaatagatgagatcaagaatgacaatgtccaagacacagcagaacagaaagttcaactgcttcgtaattggcatcaacttcatggaaagaaagaagcgtatgacacattgattaaagatctcaaaaaagccaatctttgtactcttgcagagaaaattcagactatcatcctcaaggacattactagtgactcagaaaattcaaacttcagaaatgaaatccaaagcttggtctagagtgaaaaacaacaaattcagttctgagtatatgcaattagtgtttgaaaagattcttaatagctggctgtaaatactgcttggttttttactgggtacattttatcatttattagcgctgaagagccaacatatttgtagatttttaatatctcatgattctgcctccaaggatgtttaaaatctagttgggaaaacaaacttcatcaagagtaaatgcagtggcatgctaagtacccaaataggagtgtatgcagaggatgaaagattaagattatgctctggcatctaacatatgattctgtagtatgaatgtaatcagtgtatgttagtacaaatgtctatccacaggctaaccccactctatgaatcaatagaagaagctatgaccttttgctgaaatatcagttactgaacaggcaggccactttgcctctaaattacctctgataattctagagattttaccatatttctaaactttgtttataactctgagaagatcatatttatgtaaagtatatgtatttgagtgcagaatttaaataaggctctacctcaaagacctttgcacagtttattggtgtcatattatacaatatttcaattgtgaattcacatagaaaacattaaattataatgtttgactattatatatgtgtatgcattttactggctcaaaactacctacttctttctcaggcatcaaaagcattttgagcaggagagtattactagagctttgccacctctccatttttgccttggtgctcatcttaatggcctaatgcacccccaaacatggaaatatcaccaaaaaatacttaatagtccaccaaaaggcaagactgcccttagaaattctagcctggtttggagatactaactgctctcagagaaagtagctttgtgacatgtcatgaacccatgtttgcaatcaaagatgataaaatagattcttatttttcccccacccccgaaaatgttcaataatgtcccatgtaaaacctgctacaaatggcagcttatacatagcaatggtaaaatcatcatctggatttaggaattgctcttgtcatacccccaagtttctaagatttaagattctccttactactatcctacgtttaaatatctttgaaagtttgtattaaatgtgaattttaagaaataatatttatatttctgtaaatgtaaactgtgaagatagttataaactgaagcagatacctggaaccacctaaagaacttccatttatggaggatttttttgccccttgtgtttggaattataaaatataggtaaaagtacgtaattaaataatgtttttggta

SEQ ID NO: 133218 - DNA, 1044 bp, Homo sapiens
  Payload ID: 6031
  Gene Symbol: FAS
  Gene Name: Fas cell surface death receptor
  Uniprot ID: P25445
  ENST ID: ENST00000357339
  CDS Start-End: 100-1044
ggctgcccaggcggagctgcctcttctcccgcgggttggtggacccgctcagtacggagttggggaagctctttcacttcggaggattgctcaacaaccatgctgggcatctggaccctcctacctctggttcttacgtctgttgctagattatcgtccaaaagtgttaatgcccaagtgactgacatcaactccaagggattggaattgaggaagactgttactacagttgagactcagaacttggaaggcctgcatcatgatggccaattctgccataagccctgtcctccaggtgaaaggaaagctagggactgcacagtcaatggggatgaaccagactgcgtgccctgccaagaagggaaggagtacacagacaaagcccatttttcttccaaatgcagaagatgtagattgtgtgatgaaggacatggcttagaagtggaaataaactgcacccggacccagaataccaagtgcagatgtaaaccaaactttttttgtaactctactgtatgtgaacactgtgacccttgcaccaaatgtgaacatggaatcatcaaggaatgcacactcaccagcaacaccaagtgcaaagaggaagtgaagagaaaggaagtacagaaaacatgcagaaagcacagaaaggaaaaccaaggttctcatgaatctccaactttaaatcctgaaacagtggcaataaatttatctgatgttgacttgagtaaatatatcaccactattgctggagtcatgacactaagtcaagttaaaggctttgttcgaaagaatggtgtcaatgaagccaaaatagatgagatcaagaatgacaatgtccaagacacagcagaacagaaagttcaactgcttcgtaattggcatcaacttcatggaaagaaagaagcgtatgacacattgattaaagatctcaaaaaagccaatctttgtactcttgcagagaaaattcagactatcatcctcaaggacattactagtgactcagaaaattcaaacttcagaaatgaaatccaaagcttggtctag

SEQ ID NO: 133219 - DNA, 1076 bp, Homo sapiens
  Payload ID: 6031
  Gene Symbol: FAS
  Gene Name: Fas cell surface death receptor
  Uniprot ID: P25445
  ENST ID: ENST00000484444
  CDS Start-End: 147-458
gcctcaggggcgggcactggcacggaacacaccctgaggccagccctggctgcccaggcggagctgcctcttctcccgcgggttggtggacccgctcagtacggagttggggaagctctttcacttcggaggattgctcaacaaccatgctgggcatctggaccctcctacctctggttcttacgtctgttgctagattatcgtccaaaagtgttaatgcccaagtgactgacatcaactccaagggattggaattgaggaagactgttactacagttgagactcagaacttggaaggcctgcatcatgatggccaattctgccataagccctgtcctccagatgtgaacatggaatcatcaaggaatgcacactcaccagcaacaccaagtgcaaagaggaaggatccagatctaacttggggtggctttgtcttcttcttttgccaattccactaattgtttgggtgaagagaaaggaagtacagaaaacatgcagaaagcacagaaaggaaaaccaaggttctcatgaatctccaactttaaatcctgaaacagtggcaataaatttatctgatgttgacttgagtaaatatatcaccactattgctggagtcatgacactaagtcaagttaaaggctttgttcgaaagaatggtgtcaatgaagccaaaatagatgagatcaagaatgacaatgtccaagacacagcagaacagaaagttcaactgcttcgtaattggcatcaacttcatggaaagaaagaagcgtatgacacattgattaaagatctcaaaaaagccaatctttgtactcttgcagagaaaattcagactatcatcctcaaggacattactagtgactcagaaaattcaaacttcagaaatgaaatccaaagcttggtctagagtgaaaaacaacaaattcagttctgagtatatgcaattagtgtttgaaaagattcttaatagctggctgtaaatactgcttggttttttactgggtacattttatcatttattagcgctgaagagccaacatatttgtagatttttaatatctcatgattctgcctcc

SEQ ID NO: 133220 - DNA, 836 bp, Homo sapiens
  Payload ID: 6031
  Gene Symbol: FAS
  Gene Name: Fas cell surface death receptor
  Uniprot ID: P25445
  ENST ID: ENST00000492756
  CDS Start-End: 1-399
atgctgggcatctggaccctcctacctctggttcttacgtctgttgctagattatcgtccaaaagtgttaatgcccaagtgactgacatcaactccaagggattggaattgaggaagactgttactacagttgagactcagaacttggaaggcctgcatcatgatggccaattctgccataagccctgtcctccaggtgaaaggaaagctagggactgcacagtcaatggggatgaaccagactgcgtgccctgccaagaagggaaggagtacacagacaaagcccatttttcttccaaatgcagaagatgtagattgtgtgatgaaggacatgatgtgaacatggaatcatcaaggaatgcacactcaccagcaacaccaagtgcaaagaggaagtgaagagaaaggaagtacagaaaacatgcagaaagcacagaaaggaaaaccaaggttctcatgaatctccaactttaaatcctgaaacagtggcaataaatttatctgatgttgacttgagtaaatatatcaccactattgctggagtcatgacactaagtcaagttaaaggctttgttcgaaagaatggtgtcaatgaagccaaaatagatgagatcaagaatgacaatgtccaagacacagcagaacagaaagttcaactgcttcgtaattggcatcaacttcatggaaagaaagaagcgtatgacacattgattaaagatctcaaaaaagccaatctttgtactcttgcagagaaaattcagactatcatcctcaaggacattactagtgactcagaaaattcaaacttcagaaatgaaatccaaagcttggtctag

SEQ ID NO: 133221 - DNA, 975 bp, Homo sapiens
  Payload ID: 6031
  Gene Symbol: FAS
  Gene Name: Fas cell surface death receptor
  Uniprot ID: P25445
  ENST ID: ENST00000494410
  CDS Start-End: 26-475
cacttcggaggattgctcaacaaccatgctgggcatctggaccctcctacctctggttcttacgtctgttgctagattatcgtccaaaagtgttaatgcccaagtgactgacatcaactccaagggattggaattgaggaagactgttactacagttgagactcagaacttggaaggcctgcatcatgatggccaattctgccataagccctgtcctccaggtgaaaggaaagctagggactgcacagtcaatggggatgaaccagactgcgtgccctgccaagaagggaaggagtacacagacaaagcccatttttcttccaaatgcagaagatgtagattgtgtgatgaaggacatgatgtgaacatggaatcatcaaggaatgcacactcaccagcaacaccaagtgcaaagaggaaggatccagatctaacttggggtggctttgtcttcttcttttgccaattccactaattgtttggggaaacagtggcaataaatttatctgatgttgacttgagtaaatatatcaccactattgctggagtcatgacactaagtcaagttaaaggctttgttcgaaagaatggtgtcaatgaagccaaaatagatgagatcaagaatgacaatgtccaagacacagcagaacagaaagttcaactgcttcgtaattggcatcaacttcatggaaagaaagaagcgtatgacacattgattaaagatctcaaaaaagccaatctttgtactcttgcagagaaaattcagactatcatcctcaaggacattactagtgactcagaaaattcaaacttcagaaatgaaatccaaagcttggtctagagtgaaaaacaacaaattcagttctgagtatatgcaattagtgtttgaaaagattcttaatagctggctgtaaatactgcttggttttttactgggtacattttatcatttattagcgctgaagagccaacata

SEQ ID NO: 133222 - DNA, 857 bp, Homo sapiens
  Payload ID: 6031
  Gene Symbol: FAS
  Gene Name: Fas cell surface death receptor
  Uniprot ID: P25445
  ENST ID: ENST00000479522
  CDS Start-End: 26-286
cacttcggaggattgctcaacaaccatgctgggcatctggaccctcctacctctggttcttacgtctgttgctagattatcgtccaaaagtgttaatgcccaagtgactgacatcaactccaagggattggaattgaggaagactgttactacagttgagactcagaacttggaaggcctgcatcatgatggccaattctgccataagccctgtcctccagatgtgaacatggaatcatcaaggaatgcacactcaccagcaacaccaagtgcaaagaggaagtgaagagaaaggaagtacagaaaacatgcagaaagcacagaaaggaaaaccaaggttctcatgaatctccaactttaaatcctgaaacagtggcaataaatttatctgatgttgacttgagtaaatatatcaccactattgctggagtcatgacactaagtcaagttaaaggctttgttcgaaagaatggtgtcaatgaagccaaaatagatgagatcaagaatgacaatgtccaagacacagcagaacagaaagttcaactgcttcgtaattggcatcaacttcatggaaagaaagaagcgtatgacacattgattaaagatctcaaaaaagccaatctttgtactcttgcagagaaaattcagactatcatcctcaaggacattactagtgactcagaaaattcaaacttcagaaatgaaatccaaagcttggtctagagtgaaaaacaacaaattcagttctgagtatatgcaattagtgtttgaaaagattcttaatagctggctgtaaatactgcttggttttttactgggtacattttatcatttattagcgctgaagagccaacata

SEQ ID NO: 133223 - DNA, 924 bp, Homo sapiens
  Payload ID: 6031
  Gene Symbol: FAS
  Gene Name: Fas cell surface death receptor
  Uniprot ID: P25445
  ENST ID: ENST00000488877
  CDS Start-End: 26-475
cacttcggaggattgctcaacaaccatgctgggcatctggaccctcctacctctggttcttacgtctgttgctagattatcgtccaaaagtgttaatgcccaagtgactgacatcaactccaagggattggaattgaggaagactgttactacagttgagactcagaacttggaaggcctgcatcatgatggccaattctgccataagccctgtcctccaggtgaaaggaaagctagggactgcacagtcaatggggatgaaccagactgcgtgccctgccaagaagggaaggagtacacagacaaagcccatttttcttccaaatgcagaagatgtagattgtgtgatgaaggacatgatgtgaacatggaatcatcaaggaatgcacactcaccagcaacaccaagtgcaaagaggaaggatccagatctaacttggggtggctttgtcttcttcttttgccaattccactaattgtttgggtgaagagaaaggaagtacagaaaacatgcagaaagcacagaaaggaaaaccaaggttctcatgaatctccaactttaaatcctgaaacagtggcaataaatttatctgatgttgacttgagtaaatatatcaccactattgctggagtcatgacactaagtcaagttaaaggctttgttcgaaagaatggtgtcaatgaagccaaaatagatgagatcaagaatgacaatgtccaagacacagcagaacagaaagttcaactgcttcgtaattggcatcaacttcatggaaagaaagaagcgtatgacacattgattaaagatctcaaaaaagccaatctttgtactcttgcagagaaaattcagactatcatcctcaaggacattactagtgactcagaaaattcaaacttcagaaatgaaatccaaagcttggtctag

SEQ ID NO: 133224 - DNA, 1200 bp, Homo sapiens
  Payload ID: 6031
  Gene Symbol: FAS
  Gene Name: Fas cell surface death receptor
  ENST ID: ENST00000612663
  CDS Start-End: 195-845
gacgcttctggggagtgagggaagcggtttacgagtgacttggctggagcctcaggggcgggcactggcacggaacacaccctgaggccagccctggctgcccaggcggagctgcctcttctcccgcgggttggtggacccgctcagtacggagttggggaagctctttcacttcggaggattgctcaacaaccatgctgggcatctggaccctcctacctctggttcttacgtctgttgctagattatcgtccaaaagtgttaatgcccaagtgactgacatcaactccaagggattggaattgaggaagactgttactacagttgagactcagaacttggaaggcctgcatcatgatggccaattctgccataagccctgtcctccaggtgaaaggaaagctagggactgcacagtcaatggggatgaaccagactgcgtgccctgccaagaagggaaggagtacacagacaaagcccatttttcttccaaatgcagaagatgtagattgtgtgatgaaggacatggcttagaagtggaaataaactgcacccggacccagaataccaagtgcagatgtaaaccaaactttttttgtaactctactgtatgtgaacactgtgacccttgcaccaaatgtgaacatggaatcatcaaggaatgcacactcaccagcaacaccaagtgcaaagaggaaggatccagatctaacttggggtggctttgtcttcttcttttgccaattccactaattgtttgggtgaagagaaaggaagtacagaaaacatgcagaaagcacagaaaggaaaaccaaggttctcatgaatctaactttaaatcctgaaacagtggcaataaatttatctgatgttgacttgagtaaatatatcaccactattgctggagtcatgacactaagtcaagttaaaggctttgttcgaaagaatggtgtcaatgaagccaaaatagatgagatcaagaatgacaatgtccaagacacagcagaacagaaagttcaactgcttcgtaattggcatcaacttcatggaaagaaagaagcgtatgacacattgattaaagatctcaaaaaagccaatctttgtactcttgcagagaaaattcagactatcatcctcaaggacattactagtgactcagaaaattcaaacttcagaaatgaaatccaaagcttggtctag

SEQ ID NO: 133225 - DNA, 1111 bp, Homo sapiens
  Payload ID: 6031
  Gene Symbol: FAS
  Gene Name: Fas cell surface death receptor
  ENST ID: ENST00000615406
  CDS Start-End: 347-1111
cctacccgcgcgcaggccaagttgctgaatcaatggagccctccccaacccgggcgttccccagcgaggcttccttcccatcctcctgaccaccggggcttttcgtgagctcgtctctgatctcgcgcaagagtgacacacaggtgttcaaagacgcttctggggagtgagggaagcggtttacgagtgacttggctggagcctcaggggcgggcactggcacggaacacaccctgaggccagccctggctgcccaggcggagctgcctcttctcccgcgggttggtggacccgctcagtacggagttggggaagctctttcacttcggaggattgctcaacaaccatgctgggcatctggaccctcctacctctggttcttacgtctgttgctagattatcgtccaaaagtgttaatgcccaagtgactgacatcaactccaagggattggaattgaggaagactgttactacagttgagactcagaacttggaaggcctgcatcatgatggccaattctgccataagccctgtcctccaggtgaaaggaaagctagggactgcacagtcaatggggatgaaccagactgcgtgccctgccaagaagggaaggagtacacagacaaagcccatttttcttccaaatgcagaagatgtagattgtgtgatgaaggacatggcttagaagtggaaataaactgcacccggacccagaataccaagtgcagatgtaaaccaaactttttttgtaactctactgtatgtgaacactgtgacccttgcaccaaatgtgaacatggaatcatcaaggaatgcacactcaccagcaacaccaagtgcaaagaggaaggatccagatctaacttggggtggctttgtcttcttcttttgccaattccactaattgtttgggtgaagagaaaggaagtacagaaaacatgcagaaagcacagaaaggaaaaccaaggttctcatgaatctccaactttaaatcctgaaacagtggcaataaatttatctgatgttgacttgagtaaatatatcaccactattgctggagtcatgacactaagtcaagttaaaggctttgttcgagaatggtgtcaatga

SEQ ID NO: 133226 - DNA, 1081 bp, Homo sapiens
  Payload ID: 6031
  Gene Symbol: FAS
  Gene Name: Fas cell surface death receptor
  ENST ID: ENST00000626542
  CDS Start-End: 347-1081
cctacccgcgcgcaggccaagttgctgaatcaatggagccctccccaacccgggcgttccccagcgaggcttccttcccatcctcctgaccaccggggcttttcgtgagctcgtctctgatctcgcgcaagagtgacacacaggtgttcaaagacgcttctggggagtgagggaagcggtttacgagtgacttggctggagcctcaggggcgggcactggcacggaacacaccctgaggccagccctggctgcccaggcggagctgcctcttctcccgcgggttggtggacccgctcagtacggagttggggaagctctttcacttcggaggattgctcaacaaccatgctgggcatctggaccctcctacctctggttcttacgtctgttgctagattatcgtccaaaagtgttaatgcccaagtgactgacatcaactccaagggattggaattgaggaagactgttactacagttgagactcagaacttggaaggcctgcatcatgatggccaattctgccataagccctgtcctccaggtgaaaggaaagctagggactgcacagtcaatggggatgaaccagactgcgtgccctgccaagaagggaaggagtacacagacaaagcccatttttcttccaaatgcagaagatgtagattgtgtgatgaaggacatggcttagaagtggaaataaactgcacccggacccagaataccaagtgcagatgtaaaccaaactttttttgtaactctactgtatgtgaacactgtgacccttgcaccaaatgtgaacatggaatcatcaaggaatgcacactcaccagcaacaccaagtgcaaagaggaaggatccagatctaacttggggtggctttgtcttcttcttttgccaattccactaattgtttgggtgaagagaaaggaagtacagaaaacatgcagaaagcacagaaaggaaaaccaaggttctcatgaatctccaactttaaatcctgaaacagtggcaataaatttatctgatgttgacttgagtaaatatcaccactattgctggagtcatgacactaagtcaagttaa

SEQ ID NO: 133227 - DNA, 917 bp, Homo sapiens
  Payload ID: 6032
  Gene Symbol: FASLG
  Gene Name: Fas ligand (TNF superfamily, member 6)
  Uniprot ID: P48023
  ENST ID: ENST00000340030
  CDS Start-End: 59-442
tacaggactgagaagaagtaaaaccgtttgctggggctggcctgactcaccagctgccatgcagcagcccttcaattacccatatccccagatctactgggtggacagcagtgccagctctccctgggcccctccaggcacagttcttccctgtccaacctctgtgcccagaaggcctggtcaaaggaggccaccaccaccaccgccaccgccaccactaccacctccgccgccgccgccaccactgcctccactaccgctgccacccctgaagaagagagggaaccacagcacaggcctgtgtctccttgtgatgtttttcatggttctggttgccttggtaggattgggcctggggatgtttcagctcttccacctacagaaggagctggcagaactccgagaggccaccccagtccaccccctgaaaaaaaggagctgaggaaagtggcccatttaacaggcaagtccaactcaaggtccatgcctctggaatgggaagacacctatggaattgtcctgctttctggagtgaagtataagaagggtggccttgtgatcaatgaaactgggctgtactttgtatattccaaagtatacttccggggtcaatcttgcaacaacctgcccctgagccacaaggtctacatgaggaactctaagtatccccaggatctggtgatgatggaggggaagatgatgagctactgcactactgggcagatgtgggcccgcagcagctacctgggggcagtgttcaatcttaccagtgctgatcatttatatgtcaacgtatctgagctctctctggtcaattttgaggaatctcagacgtttttcggcttatataagctctaagagaagcactttgggattctttccattatgattctttgttacaggcaccgagaatgttg

SEQ ID NO: 133228 - DNA, 1888 bp, Homo sapiens
  Payload ID: 6032
  Gene Symbol: FASLG
  Gene Name: Fas ligand (TNF superfamily, member 6)
  Uniprot ID: P48023
  ENST ID: ENST00000367721
  CDS Start-End: 185-1030
agagagagatagagaaagagaaagacagaggtgtttcccttagctatggaaactctataagagagatccagcttgcctcctcttgagcagtcagcaacagggtcccgtccttgacacctcagcctctacaggactgagaagaagtaaaaccgtttgctggggctggcctgactcaccagctgccatgcagcagcccttcaattacccatatccccagatctactgggtggacagcagtgccagctctccctgggcccctccaggcacagttcttccctgtccaacctctgtgcccagaaggcctggtcaaaggaggccaccaccaccaccgccaccgccaccactaccacctccgccgccgccgccaccactgcctccactaccgctgccacccctgaagaagagagggaaccacagcacaggcctgtgtctccttgtgatgtttttcatggttctggttgccttggtaggattgggcctggggatgtttcagctcttccacctacagaaggagctggcagaactccgagagtctaccagccagatgcacacagcatcatctttggagaagcaaataggccaccccagtccaccccctgaaaaaaaggagctgaggaaagtggcccatttaacaggcaagtccaactcaaggtccatgcctctggaatgggaagacacctatggaattgtcctgctttctggagtgaagtataagaagggtggccttgtgatcaatgaaactgggctgtactttgtatattccaaagtatacttccggggtcaatcttgcaacaacctgcccctgagccacaaggtctacatgaggaactctaagtatccccaggatctggtgatgatggaggggaagatgatgagctactgcactactgggcagatgtgggcccgcagcagctacctgggggcagtgttcaatcttaccagtgctgatcatttatatgtcaacgtatctgagctctctctggtcaattttgaggaatctcagacgtttttcggcttatataagctctaagagaagcactttgggattctttccattatgattctttgttacaggcaccgagaatgttgtattcagtgagggtcttcttacatgcatttgaggtcaagtaagaagacatgaaccaagtggaccttgagaccacagggttcaaaatgtctgtagctcctcaactcacctaatgtttatgagccagacaaatggaggaatatgacggaagaacatagaactctgggctgccatgtgaagagggagaagcatgaaaaagcagctaccaggtgttctacactcatcttagtgcctgagagtatttaggcagattgaaaaggacaccttttaactcacctctcaaggtgggccttgctacctcaagggggactgtctttcagatacatggttgtgacctgaggatttaagggatggaaaaggaagactagaggcttgcataataagctaaagaggctgaaagaggccaatgccccactggcagcatcttcacttctaaatgcatatcctgagccatcggtgaaactaacagataagcaagagagatgttttggggactcatttcattcctaacacagcatgtgtatttccagtgcaattgtaggggtgtgtgtgtgtgtgtgtgtgtgtgtgtgtgtatgactaaagagagaatgtagatattgtgaagtacatattaggaaaatatgggttgcatttggtcaagattttgaatgcttcctgacaatcaactctaatagtgcttaaaaatcattgattgtcagctactaatgatgttttcctataatataataaatatttatgtagatgtgcatttttgtgaaatgaaaacatgtaataaaaagtatatgttaggatacaaat

SEQ ID NO: 133229 - DNA, 1827 bp, Homo sapiens
  Payload ID: 6033
  Gene Symbol: FASTK
  Gene Name: Fas-activated serine/threonine kinase
  Uniprot ID: Q14296
  ENST ID: ENST00000297532
  CDS Start-End: 79-1728
ccgatagctgcttcgggattggcgtccgggcggctatctaggggctgctgggaagatggcggactcggtggctagccgatgaggaggccgcggggggaacccggcccccgggccccgagaccgactgagggagcgacctgcgcagggcccggggagtcatggtctccatcacccaactccatgcttcgagtcctgctctctgctcagacctcccctgctcggctgtctggcctgctgctgatccctccagtacagccctgctgtttggggcccagcaaatggggggaccggcctgttggaggaggccccagtgcaggtcctgtgcaaggactgcagcggcttctggaacaggcgaagagccctggggagctgctgcgctggctgggccagaaccccagcaaggtgcgcgcccaccactactcggtggcgcttcgtcgtctgggccagctcttggggtctcggccacggccccctcctgtggagcaggtcacactgcaggacttgagtcagctcatcatccgaaactgcccctcctttgacattcacaccatccacgtgtgtctgcaccttgcagtcttacttggctttccatctgatggtcccctggtgtgtgccctggaacaggagcgaaggctccgcctccctccgaagccacctccccctttgcagccccttctccgaggtgggcaagggttggaagctgctctaagctgcccccgttttctgcggtatccacggcagcatctgatcagcagcctggcagaggcaaggccagaggaactgactccccacgtgatggtgctcctggcccagcacctggcccggcaccggttgcgggagccccagcttctggaagccattgcccacttcctggtggttcaggaaacgcaactcagcagcaaggtggtacagaagttggtcctgccctttgggcgactgaactacctgcccctggaacagcagtttatgccctgccttgagaggatcctggctcgggaagcaggggtggcacccctggctacagtcaacatcttgatgtcactgtgccaactgcggtgcctgcccttcagagccctgcactttgttttttcccctggcttcatcaactacatcagtggcacccctcatgctctgattgtgcgtcgctacctctccctgctggacacggccgtggagctggagctcccaggataccggggtccccgccttccccgaaggcagcaagtgcccatctttccccagcctctcatcaccgaccgtgcccgctgcaagtacagtcacaaggacatagtagctgaggggttgcgccagctgctgggggaggagaaataccgccaggacctgactgtgcctccaggctactgcacagacttcctgctgtgcgccagcagctctggtgctgtgcttcccgtgaggacccaggaccccttcctgccatacccaccaaggtcctgcccacagggccaggctgcctctagcgccactactcgagaccctgcccagagggtggtgctggtgttgcgggaacgctggcatttctgccgggacggccgggtgctgctgggctcgagggccctgagggagcggcacctaggcctgatgggctaccagctcctgccgctacccttcgaggaactggagtcccagagaggcctgccccagctcaagagctacctgaggcagaagctccaggccctgggcctgcgctgggggcctgaagggggctgaggggttgatgtggggttcaggatggcccccccatggggggtggatgatttgcactttggttccctgtgttttgatttctcattaaagttcctttccttc

SEQ ID NO: 133230 - DNA, 1402 bp, Homo sapiens
  Payload ID: 6033
  Gene Symbol: FASTK
  Gene Name: Fas-activated serine/threonine kinase
  Uniprot ID: Q14296
  ENST ID: ENST00000353841
  CDS Start-End: 77-1303
gatagctgcttcgggattggcgtccgggcggctatctaggggctgctgggaagatggcggactcggtggctagccgatgaggaggccgcggggggaacccggcccccgggccccgagaccgactgagggagcgacctgcgcagggcccggggagtcatgctttccatctgatggtcccctggtgtgtgccctggaacaggagcgaaggctccgcctccctccgaagccacctccccctttgcagccccttctccgaggtgggcaagggttggaagctgctctaagctgcccccgttttctgcggtatccacggcagcatctgatcagcagcctggcagaggcaaggccagaggaactgactccccacgtgatggtgctcctggcccagcacctggcccggcaccggttgcgggagccccagcttctggaagccattgcccacttcctggtggttcaggaaacgcaactcagcagcaaggtggtacagaagttggtcctgccctttgggcgactgaactacctgcccctggaacagcagtttatgccctgccttgagaggatcctggctcgggaagcaggggtggcacccctggctacagtcaacatcttgatgtcactgtgccaactgcggtgcctgcccttcagagccctgcactttgttttttcccctggcttcatcaactacatcagtggcacccctcatgctctgattgtgcgtcgctacctctccctgctggacacggccgtggagctggagctcccaggataccggggtccccgccttccccgaaggcagcaagtgcccatctttccccagcctctcatcaccgaccgtgcccgctgcaagtacagtcacaaggacatagtagctgaggggttgcgccagctgctgggggaggagaaataccgccaggacctgactgtgcctccaggctactgcacagacttcctgctgtgcgccagcagctctggtgctgtgcttcccgtgaggacccaggaccccttcctgccatacccaccaaggtcctgcccacagggccaggctgcctctagcgccactactcgagaccctgcccagagggtggtgctggtgttgcgggaacgctggcatttctgccgggacggccgggtgctgctgggctcgagggccctgagggagcggcacctaggcctgatgggctaccagctcctgccgctacccttcgaggaactggagtcccagagaggcctgccccagctcaagagctacctgaggcagaagctccaggccctgggcctgcgctgggggcctgaagggggctgaggggttgatgtggggttcaggatggcccccccatggggggtggatgatttgcactttggttccctgtgttttgatttctcattaaagttcctttccttc

SEQ ID NO: 133231 - DNA, 1764 bp, Homo sapiens
  Payload ID: 6033
  Gene Symbol: FASTK
  Gene Name: Fas-activated serine/threonine kinase
  Uniprot ID: Q14296
  ENST ID: ENST00000482571
  CDS Start-End: 97-1665
gagccacgtctccgaagaccgatagctgcttcgggattggcgtccgggcggctatctaggggctgctgggaagatggcggactcggtggctagccgatgaggaggccgcggggggaacccggcccccgggccccgagaccgactgagggagcgacctgcgcagggcccggggagtcatggtctccatcacccaactccatgcttcgagtcctgctctctgctcagacctcccctgctcggctgtctggcctgctgctgatccctccagtacagccctgctgtttggggcccagcaaatggggggaccggcctgttggaggaggccccagtgcaggtcctgtgcaaggactgcagcggcttctggaacaggcgaagagccctggggagctgctgcgctggctgggccagaaccccagcaaggtgcgcgcccaccactactcggtggcgcttcgtcgtctgggccagctcttggggtctcggccacggccccctcctgtggagcaggtcacactgcaggacttgagtcagctcatcatccgaaactgcccctcctttgacattcacaccatccacgtgtgtctgcaccttgcagtcttacttggctttccatctgatggtcccctggtgtgtgccctggaacaggagcgaaggctccgcctccctccgaagccacctccccctttgcagccccttctccgagaggcaaggccagaggaactgactccccacgtgatggtgctcctggcccagcacctggcccggcaccggttgcgggagccccagcttctggaagccattgcccacttcctggtggttcaggaaacgcaactcagcagcaaggtggtacagaagttggtcctgccctttgggcgactgaactacctgcccctggaacagcagtttatgccctgccttgagaggatcctggctcgggaagcaggggtggcacccctggctacagtcaacatcttgatgtcactgtgccaactgcggtgcctgcccttcagagccctgcactttgttttttcccctggcttcatcaactacatcagtggcacccctcatgctctgattgtgcgtcgctacctctccctgctggacacggccgtggagctggagctcccaggataccggggtccccgccttccccgaaggcagcaagtgcccatctttccccagcctctcatcaccgaccgtgcccgctgcaagtacagtcacaaggacatagtagctgaggggttgcgccagctgctgggggaggagaaataccgccaggacctgactgtgcctccaggctactgcacagacttcctgctgtgcgccagcagctctggtgctgtgcttcccgtgaggacccaggaccccttcctgccatacccaccaaggtcctgcccacagggccaggctgcctctagcgccactactcgagaccctgcccagagggtggtgctggtgttgcgggaacgctggcatttctgccgggacggccgggtgctgctgggctcgagggccctgagggagcggcacctaggcctgatgggctaccagctcctgccgctacccttcgaggaactggagtcccagagaggcctgccccagctcaagagctacctgaggcagaagctccaggccctgggcctgcgctgggggcctgaagggggctgaggggttgatgtggggttcaggatggcccccccatggggggtggatgatttgcactttggttccctgtgttttgatttctcattaaagttcctttccttc

SEQ ID NO: 133232 - DNA, 1609 bp, Homo sapiens
  Payload ID: 6033
  Gene Symbol: FASTK
  Gene Name: Fas-activated serine/threonine kinase
  ENST ID: ENST00000540185
  CDS Start-End: 30-1427
gggaagatggcggactcggtggctagccgatgaggaggccgcggggggaacccggcccccgggccccgagaccgactgagggagcgacctgcgcagggcccggggagtcatggtctccatcacccaactccatgcttcgagtcctgctctctgctcagacctcccctgctcggctgtctggcctgctgctgatccctccagtacagccctgctgtttggggcccagcaaatggggggaccggcctgttggaggaggccccagtgcaggtcctgtgcaaggactgcagcggcttctggaacaggcgaagagccctggggagctgctgcgctggctgggccagaaccccagcaaggtgcgcgcccaccactactcggtggcgcttcgtcgtctgggccagctcttggggtctcggccacggccccctcctgtggagcaggtcacactgcaggacttgagtcagctcatcatccgaaactgcccctcctttgacattcacaccatccacgtgtgtctgcaccttgcagtcttacttggctttccatctgatggtcccctggtgtgtgccctggaacaggagcgaaggctccgcctccctccgaagccacctccccctttgcagccccttctccgaggtgggcaagggttggaagctgctctaagctgcccccgttttctgcggtatccacggcagcatctgatcagcagcctggcagaggcaaggccagaggaactgactccccacgtgatggtgctcctggcccagcacctggcccggcaccggttgcgggagccccagcttctggaagccattgcccacttcctggtggttcaggaaacgcaactcagcagcaaggtggtacagaagttggtcctgccctttgggcgactgaactacctgcccctggaacagcagtttatgccctgccttgagaggatcctggctcgggaagcaggggtggcacccctggctacagtcaacatcttgatgtcactgtgccaactgcggtgcctgcccttcagagccctgcactttgttttttcccctggcttcatcaactacatcagtggcacccctcatgctctgattgtgcgtcgctacctctccctgctggacacggccgtggagctggagctcccaggataccggggtccccgccttccccgaaggcagcaagtgcccatctttccccagcctctcatcaccgaccgtgcccgctgcaagtacagtcacaaggacatagtagctgaggggttgcgccagctgctgggggaggagaaataccgccaggacctgactgtgcctccaggctactgcacagacttcctgctgtgcgccagcagctctggtgctgtgcttcccgtgaggacccaggaccccttcctgccatacccaccaagggcctgccccagctcaagagctacctgaggcagaagctccaggccctgggcctgcgctgggggcctgaagggggctgaggggttgatgtggggttcaggatggcccccccatggggggtggatgatttgcactttggttccctgtgttttgatttctcattaaagttcctttccttccccgttgtgaatctcagttttgggacggggagc

SEQ ID NO: 133233 - DNA, 1748 bp, Homo sapiens
  Payload ID: 6034
  Gene Symbol: FEZ1
  Gene Name: fasciculation and elongation protein zeta 1 (zygin I)
  Uniprot ID: Q99689
  ENST ID: ENST00000278919
  CDS Start-End: 236-1414
cggggaaggggtggggtggaggcgggagcggagccgggcgccgccggagctgcgcggggagcgctcgctggctggctggctggctggctctccgctgcgctgcgctgcgctccggccgctcccgcggcccgtggatgggggtgtccggctgagccccgggatccgcctccctccgccaggacccgcacagataaactcatcctgaaagtcgctgttgttctcctgctgagcaagaatggaggccccactggtgagtctggatgaagagtttgaggaccttcgaccctcctgctcggaggacccggaggagaagccccagtgtttctatggttcatctccccaccatctcgaggacccctccctctccgagcttgagaatttttcttccgaaataatcagcttcaagtccatggaggacctcgtaaatgaatttgatgagaagctcaatgtctgctttcggaactacaacgccaagaccgagaacctagctcccgtgaagaaccagttacagatccaagaggaggaggagacccttcaggacgaggaggtttgggatgctctgacagacaattacatcccttcactctcagaagactggagggatccaaacatcgaggctctgaatggcaactgctctgacactgagatccatgagaaagaagaggaagagttcaatgagaagagtgaaaatgattccggtatcaacgaggagcctctgctcacagcagatcaggtaattgaggagattgaggaaatgatgcagaactccccagaccctgaggaagaagaggaggttctggaagaagaggatggaggagaaacttcctcccaggcagactcggtcctcctgcaggagatgcaggcattgacacagaccttcaacaacaactggtcctatgaagggctgaggcacatgtctgggtctgagctgaccgagctgctggaccaggtggagggtgccatccgtgacttctcggaggagctggtgcagcagctggcccgccgggacgagctggagtttgagaaggaagtgaagaactcctttatcacggtgcttattgaggttcagaacaagcagaaggagcagcgagaactgatgaaaaagaggcggaaagagaaagggctgagcctgcagagcagccggatagagaagggaaaccagatgcctctcaagcgcttcagcatggaaggcatctccaacattctgcagagtggcatccgccagacctttggctcctcaggaactgacaaacagtatctgaacacagtcattccttacgagaagaaagcctctcctccctcagtggaagacctgcagatgctgacaaacattctctttgccatgaaggaggataatgagaaggtgcctactttgctaacggactacattttaaaagtgctctgccctacctaaccttgccctttggagcagcctcgctgcaggaggtcactgagcaagagtcattccatcacagggactgcatgagaccatgtaacctccgacatgtatttaaacgtgtatagcttaacctggattaaacacgagcaagcgcgcggggtcctttgccgttggcttctagtgctagtaatcattggatgcatgatggggcagggccggtgatggtgcctcccccttgctggtgtcaggagaggggaaggcagccgctttcaccgctcattatgtagtctggctacagccctcaaaaacagcttatactcttaagactaattttgaaataaaaccttca

SEQ ID NO: 133234 - DNA, 1053 bp, Homo sapiens
  Payload ID: 6034
  Gene Symbol: FEZ1
  Gene Name: fasciculation and elongation protein zeta 1 (zygin I)
  Uniprot ID: Q99689
  ENST ID: ENST00000366139
  CDS Start-End: 203-517
ccgggcgccgccggagctgcgcggggagcgctcgctggctggctggctggctggctctccgctgcgctgcgctgcgctccggccgctcccgcggcccgtggatgggggtgtccggctgagccccgggatccgcctccctccgccaggacccgcacagataaactcatcctgaaagtcgctgttgttctcctgctgagcaagaatggaggccccactggtgagtctggatgaagagtttgaggaccttcgaccctcctgctcggaggacccggaggagaagccccagtgtttctatggttcatctccccaccatctcgaggacccctccctctccgagcttgagaatttttcttccgaaataatcagcttcaagtccatggaggacctcgtaaatgaatttgatgagaagctcaatgtctgctttcggaactacaacgccaagaccgagaacctagctcccgtgaagaaccagttacagatccaagaggaggaggagacccttcaggacgaggagtaagaagtcttaattgccctctcctgcttcagtcgagagccctgtagtccttgtctccttgacatagtgctggtttctgtctataggtttatgggctattactttcattttcgtgttgccagcggagcagtgccctggtacttgctgtcatagctctatatatgtccctttacagtcccctgaggagaactttcttaaattgaaaccttagaggaatgaaggttttcctagatacaaaatggaatttcaggagcacagtaaatttcagggtctgtctatcttaagctttctttatatcagtggaaatccagcgagatattagaaataaaggccagaaaaaattaattaaccatgatggatgaatctatgttattggactaatttgcttcaagaaacaccagaattttgaaaatcccgaatttttgacagcccctcaggcctggagagttatctacagatgttaggatatgtccacataagaaagcatctaaactgaactgagagcacagcgggctaccctggacaaagtaaaggtggaa

SEQ ID NO: 133235 - DNA, 750 bp, Homo sapiens
  Payload ID: 6034
  Gene Symbol: FEZ1
  Gene Name: fasciculation and elongation protein zeta 1 (zygin I)
  Uniprot ID: Q99689
  ENST ID: ENST00000524435
  CDS Start-End: 324-638
gtccagtcaccgtaaacgccccaagatcatctttgtccctaaaaacttacccccgaccccgctcgtgcccctccccagagtgcggagccttccccagaccgcgcattcctgcagtgtcagaaccgctggcagcggccgcagacgccgggagagcgattgttttactacagacgggcgggagaagggaccggggcggctgcgcggtggcggggcgcgctgccgtcgggtgggccccgggctctggaatgcggggagcagtgtttgacggcgtcgaggagataaactcatcctgaaagtcgctgttgttctcctgctgagcaagaatggaggccccactggtgagtctggatgaagagtttgaggaccttcgaccctcctgctcggaggacccggaggagaagccccagtgtttctatggttcatctccccaccatctcgaggacccctccctctccgagcttgagaatttttcttccgaaataatcagcttcaagtccatggaggacctcgtaaatgaatttgatgagaagctcaatgtctgctttcggaactacaacgccaagaccgagaacctagctcccgtgaagaaccagttacagatccaagaggaggaggagacccttcaggacgaggagtaagaagtcttaattgccctctcctgcttcagtcgagagccctgtagtccttgtctccttgacatagtgctggtttctgtctataggtttatgggctattactttcattttcgtg

SEQ ID NO: 133236 - DNA, 569 bp, Homo sapiens
  Payload ID: 6034
  Gene Symbol: FEZ1
  Gene Name: fasciculation and elongation protein zeta 1 (zygin I)
  ENST ID: ENST00000527534
  CDS Start-End: 333-569
aggtgccgtcgcgggggttgactttagttaggacccgactcactgctgggggtggggtctggtgggggtggtaaggaggccccgggattctctgacaggacggtctggggtcgccgcagctcccctcacctggtcccattctgggattagaaaggaacaacgggaggccgtcgccttcctgcccagcccttcagggagcgcagctgggacgccgcgccaggccctggagatgtgggatgatgggcacttccagtatcatctcagcatcggccctccagccaggcctgataaactcatcctgaaagtcgctgttgttctcctgctgagcaagaatggaggccccactggtgagtctggatgaagagtttgaggaccttcgaccctcctgctcggaggacccggaggagaagccccagtgtttctatggttcatctccccaccatctcgaggacccctccctctccgagcttgagaatttttcttccgaaataatcagcttcaagtccatggaggacctcgtaaatgaatttgatgagaagctcaatgtctgctttcggaactacaacgcc

SEQ ID NO: 133237 - DNA, 619 bp, Homo sapiens
  Payload ID: 6034
  Gene Symbol: FEZ1
  Gene Name: fasciculation and elongation protein zeta 1 (zygin I)
  ENST ID: ENST00000577924
  CDS Start-End: 1-619
ggtttgggatgctctgacagacaattacatcccttcactctcagaagactggagggatccaaacatcgaggctctgaatggcaactgctctgacactgagacttatagcatccatagagaggtgttctccaatggcttgatggacagaataaaccagctgccagtgtccttggagcctactcagggaaggaggccagaggtctgtctgatccatgagaaagaagaggaagagttcaatgagaagagtgaaaatgattccggtatcaacgaggagcctctgctcacagcagatcaggtaattgaggagattgaggaaatgatgcagaactccccagaccctgaggaagaagaggaggttctggaagaagaggatggaggagaaacttcctcccaggcagactcggtcctcctgcaggagatgcaggcattgacacagaccttcaacaacaactggtcctatgaagggctgaggcacatgtctgggtctgagctgaccgagctgctggaccaggtggagggtgccatccgtgacttctcggaggagctggtgcagcagctggcccgccgggacgagctggagtttgagaaggaagtgaagaactcctttatcacggtgctt

SEQ ID NO: 133238 - DNA, 1782 bp, Homo sapiens
  Payload ID: 6035
  Gene Symbol: FEZ2
  Gene Name: fasciculation and elongation protein zeta 2 (zygin II)
  ENST ID: ENST00000305852
  CDS Start-End: 334-882
gatttggaatgccctgacagataattatgggaatgtgatgcctgtagactggaagtcatcgcatactaggaccttgcacttgcttactctgaacctctcagaaaaaggggtaagtgacagtttgctctttgatacatcagatgatgaagagctgagagaacagctggatatgcactcaatcatcgtctcctgtgttaatgatgaacccctcttcacggcagaccagtaaaaattttgattatttggagcatccacacctgaacaccattggttaatggagaattcagtgcatttctgctctgggtgccttaggttattgaagaaattgaagaaatgatgcaggaatcaccggacccagaagatgatgaaacccctacacagtcagatcggctttcaatgctttcccaggaaattcaaactctcaagaggtctagtaccggcagttatgaagagagagtgaaaaggctctcagtgtctgagttaaatgaaatcctggaagaaattgagactgccattaaggagtactctgaggagctggtgcagcagttggctttacgagatgaactggagtttgaaaaggaagtgaaaaacagctttatttctgttcttattgaagtgcaaaacaaacagaaagagcacaaagaaacagcaaaaaagaaaaagaaactaaaaaatggcagctctcagaatgggaagaatgagagaagtcatatgcccggcacatatttgactacagtcattccttatgagaaaaaaaacggaccaccgtctgttgaagatcttcaaatattaacaaaaattcttcgtgccatgaaggaggacagtgaaaaagttccgagcttgttaactgattatattctgaaagttctgtgtcctacatagagcagcaactttatctgcggtgggctccaagctagatttccgacagcattattctgagagctggctaccattacccttcttgctattggaaactcagcacatttgaacttgggtttgattcagtattaacagatcttgactacactaattctttatattatagaaccaacggaaatatgggcactattttgaattctagagatggtttttgttaaatctactaataaactgttctcttagtagattaagagagagtaatattaattgtgcatgtgcagttgtatttctcattaactgacagtatgcccatttgtttttatggctttcttatctaaactgcactgatgaactagattaaagccttgggagatttatactataaattcagtgatggcaagaaccaacactgtttttttgtgagaattgtcagtgtaactattacctaccagtattgttcagagagattgaaacagaataaacgggctgttcttgaagaagcaaaaccagaatatgcattactttggtttaatacttagtgctaacattgaaactgttggtggtgatggattttgtagcttgctgcttgtttcaccactggtcaaattttaaccattaaattgccattcacttttagaatcttgtatttaagttttgattttcaaatgttctgcttcatgtgtctgtgaagaattgtactttaagtgtgtgtcctctgaggtgcttgagaaagtgtacactgcagaactgcccattctcattactgtgtcctattttattcatgcctgtgtgtttttcttaagtatgaattctagatacagctacttatggattcatcaatatcatgagcacttttgctggttccagtcaaatcaatggcatttaataaattttttaagaagt

SEQ ID NO: 133239 - DNA, 847 bp, Homo sapiens
  Payload ID: 6035
  Gene Symbol: FEZ2
  Gene Name: fasciculation and elongation protein zeta 2 (zygin II)
  ENST ID: ENST00000357996
  CDS Start-End: 111-847
ttttcctgtttctggcttcacgagcagccatgggagacaactacaaatgattacagactccagcagcaacaaggatttggaatgccctgacagataattatgggaatgtgatgcctgtagactggaagtcatcgcatactaggaccttgcacttgcttactctgaacctctcagaaaaaggggtaagtgacagtttgctctttgatacatcagatgatgaagagctgagagaacagctggatatgcactcaatcatcgtctcctgtgttaatgatgaacccctcttcacggcagaccaggttattgaagaaattgaagaaatgatgcaggaatcaccggacccagaagatgatgaaacccctacacagtcagatcggctttcaatgctttcccaggaaattcaaactctcaagaggtctagtaccggcagttatgaagagagagtgaaaaggctctcagtgtctgagttaaatgaaatcctggaagaaattgagactgccattaaggagtactctgaggagctggtgcagcagttggctttacgagatgaactggagtttgaaaaggaagtgaaaaacagctttatttctgttcttattgaagtgcaaaacaaacagaaagagcacaaagaaacagcaaaaaagaaaaagaaactaaaaaatggcagctctcagaatgggaagaatgagagaagtcatatgcccggcacatatttgactacagtcattccttatgagaaaaaaaacggaccaccgtctgttgaagatcttcaaatattaacaaaaattcttcgtgccatgaaggaggacagtgaaaaagttccgagcttgttaactgattatattct

SEQ ID NO: 133240 - DNA, 2097 bp, Homo sapiens
  Payload ID: 6035
  Gene Symbol: FEZ2
  Gene Name: fasciculation and elongation protein zeta 2 (zygin II)
  Uniprot ID: Q9UHY8
  ENST ID: ENST00000379245
  CDS Start-End: 50-1192
gggcgggctgggccggcctgggcggggcgcgcgactgctccgggcggcgatggcggcggacggggactggcaggatttctatgagttccaggagccggcccggagcctcctggaccaggagaactgtaacgcgagccccgagcctggggcggaggcgggggccgaggcgggtgggggcgccgacggtttcccggccccggcctgcagcttggaggagaagctgagcctgtgcttccgcccctcggatccgggcgccgagcccccgaggacggccgtgcggcccatcacggagcgcagcctcctgcagggggacgagatttggaatgccctgacagataattatgggaatgtgatgcctgtagactggaagtcatcgcatactaggaccttgcacttgcttactctgaacctctcagaaaaaggggtaagtgacagtttgctctttgatacatcagatgatgaagagctgagagaacagctggatatgcactcaatcatcgtctcctgtgttaatgatgaacccctcttcacggcagaccaggttattgaagaaattgaagaaatgatgcaggaatcaccggacccagaagatgatgaaacccctacacagtcagatcggctttcaatgctttcccaggaaattcaaactctcaagaggtctagtaccggcagttatgaagagagagtgaaaaggctctcagtgtctgagttaaatgaaatcctggaagaaattgagactgccattaaggagtactctgaggagctggtgcagcagttggctttacgagatgaactggagtttgaaaaggaagtgaaaaacagctttatttctgttcttattgaagtgcaaaacaaacagaaagagcacaaagaaacagcaaaaaagaaaaagaaactaaaaaatggcagctctcagaatgggaagaatgagagaagtcatatgcccggcacacgcttcagcatggaagggatctcaaatgtcattcagaatggcctccgccacacctttggaaattcaggtggagagaaacagtatttgactacagtcattccttatgagaaaaaaaacggaccaccgtctgttgaagatcttcaaatattaacaaaaattcttcgtgccatgaaggaggacagtgaaaaagttccgagcttgttaactgattatattctgaaagttctgtgtcctacatagagcagcaactttatctgcggtgggctccaagctagatttccgacagcattattctgagagctggctaccattacccttcttgctattggaaactcagcacatttgaacttgggtttgattcagtattaacagatcttgactacactaattctttatattatagaaccaacggaaatatgggcactattttgaattctagagatggtttttgttaaatctactaataaactgttctcttagtagattaagagagagtaatattaattgtgcatgtgcagttgtatttctcattaactgacagtatgcccatttgtttttatggctttcttatctaaactgcactgatgaactagattaaagccttgggagatttatactataaattcagtgatggcaagaaccaacactgtttttttgtgagaattgtcagtgtaactattacctaccagtattgttcagagagattgaaacagaataaacgggctgttcttgaagaagcaaaaccagaatatgcattactttggtttaatacttagtgctaacattgaaactgttggtggtgatggattttgtagcttgctgcttgtttcaccactggtcaaattttaaccattaaattgccattcacttttagaatcttgtatttaagttttgattttcaaatgttctgcttcatgtgtctgtgaagaattgtactttaagtgtgtgtcctctgaggtgcttgagaaagtgtacactgcagaactgcccattctcattactgtgtcctattttattcatgcctgtgtgtttttcttaagtatgaattctagatacagctacttatggattcatcaatatcatgagcacttttgctggttccagtcaaatcaatggcatttaataaattttttaagaagtaaaaa

SEQ ID NO: 133241 - DNA, 1931 bp, Homo sapiens
  Payload ID: 6035
  Gene Symbol: FEZ2
  Gene Name: fasciculation and elongation protein zeta 2 (zygin II)
  Uniprot ID: Q9UHY8
  ENST ID: ENST00000405912
  CDS Start-End: 1-1062
atggcggcggacggggactggcaggatttctatgagttccaggagccggcccggagcctcctggaccaggagaactgtaacgcgagccccgagcctggggcggaggcgggggccgaggcgggtgggggcgccgacggtttcccggccccggcctgcagcttggaggagaagctgagcctgtgcttccgcccctcggatccgggcgccgagcccccgaggacggccgtgcggcccatcacggagcgcagcctcctgcagggggacgagatttggaatgccctgacagataattatgggaatgtgatgcctgtagactggaagtcatcgcatactaggaccttgcacttgcttactctgaacctctcagaaaaaggggtaagtgacagtttgctctttgatacatcagatgatgaagagctgagagaacagctggatatgcactcaatcatcgtctcctgtgttaatgatgaacccctcttcacggcagaccaggttattgaagaaattgaagaaatgatgcaggaatcaccggacccagaagatgatgaaacccctacacagtcagatcggctttcaatgctttcccaggaaattcaaactctcaagaggtctagtaccggcagttatgaagagagagtgaaaaggctctcagtgtctgagttaaatgaaatcctggaagaaattgagactgccattaaggagtactctgaggagctggtgcagcagttggctttacgagatgaactggagtttgaaaaggaagtgaaaaacagctttatttctgttcttattgaagtgcaaaacaaacagaaagagcacaaagaaacagcaaaaaagaaaaagaaactaaaaaatggcagctctcagaatgggaagaatgagagaagtcatatgcccggcacatatttgactacagtcattccttatgagaaaaaaaacggaccaccgtctgttgaagatcttcaaatattaacaaaaattcttcgtgccatgaaggaggacagtgaaaaagttccgagcttgttaactgattatattctgaaagttctgtgtcctacatagagcagcaactttatctgcggtgggctccaagctagatttccgacagcattattctgagagctggctaccattacccttcttgctattggaaactcagcacatttgaacttgggtttgattcagtattaacagatcttgactacactaattctttatattatagaaccaacggaaatatgggcactattttgaattctagagatggtttttgttaaatctactaataaactgttctcttagtagattaagagagagtaatattaattgtgcatgtgcagttgtatttctcattaactgacagtatgcccatttgtttttatggctttcttatctaaactgcactgatgaactagattaaagccttgggagatttatactataaattcagtgatggcaagaaccaacactgtttttttgtgagaattgtcagtgtaactattacctaccagtattgttcagagagattgaaacagaataaacgggctgttcttgaagaagcaaaaccagaatatgcattactttggtttaatacttagtgctaacattgaaactgttggtggtgatggattttgtagcttgctgcttgtttcaccactggtcaaattttaaccattaaattgccattcacttttagaatcttgtatttaagttttgattttcaaatgttctgcttcatgtgtctgtgaagaattgtactttaagtgtgtgtcctctgaggtgcttgagaaagtgtacactgcagaactgcccattctcattactgtgtcctattttattcatgcctgtgtgtttttcttaagtatgaattctagatacagctacttatggattcatcaatatcatgagcacttttgctggttccagtcaaa

SEQ ID NO: 133242 - DNA, 1869 bp, Homo sapiens
  Payload ID: 6035
  Gene Symbol: FEZ2
  Gene Name: fasciculation and elongation protein zeta 2 (zygin II)
  ENST ID: ENST00000451623
  CDS Start-End: 25-942
ggcgcgcgactgctccgggcggcgatggcggcggacggggactggcaggatttctatgagttccaggagccggcccggagcctcctggaccaggagaactgtaacgcgagccccgagcctggggcggaggcgggggccgaggcgggtgggggcgccgacggtttcccggccccggcctgcagcttggaggagaagctgagcctgtgcttccgcccctcggatccgggcgccgagcccccgaggacggccgtgcggcccatcacggagcgcagcctcctgcagggggacgagatttggaatgccctgacagataattatgggaatgtgatgcctgtagactggaagtcatcgcatactaggaccttgcacttgcttactctgaacctctcagaaaaaggggtaagtgacagtttgctctttgatacatcagatgatgaagagctgagagaacagctggatatgcactcaatcatcgtctcctgtgttaatgatgaacccctcttcacggcagaccaggttattgaagaaattgaagaaatgatgcaggaatcaccggacccagaagatgatgaaacccctacacagtcagatcggctttcaatgctttcccaggaaattcaaactctcaagaggtctagtaccggcagttatgaagagagagtgaaaaggctctcagtgtctgagttaaatgaaatcctggaagaaattgagactgccattaaggagtactctgaggagctggtgcagcagttggctttacgagatgaactggagtttgaaaaggaagtgaaaaacagctttatttctgttcttattgaagtgcaaaacaaacagaaagagcacaaagaaacagcaaaaaagaaaaagaaactaaaaaatggcagctctcagaatgggaagaatgagagaagtcatatgcccggcacattcttcgtgccatgaaggaggacagtgaaaaagttccgagcttgttaactgattatattctgaaagttctgtgtcctacatagagcagcaactttatctgcggtgggctccaagctagatttccgacagcattattctgagagctggctaccattacccttcttgctattggaaactcagcacatttgaacttgggtttgattcagtattaacagatcttgactacactaattctttatattatagaaccaacggaaatatgggcactattttgaattctagagatggtttttgttaaatctactaataaactgttctcttagtagattaagagagagtaatattaattgtgcatgtgcagttgtatttctcattaactgacagtatgcccatttgtttttatggctttcttatctaaactgcactgatgaactagattaaagccttgggagatttatactataaattcagtgatggcaagaaccaacactgtttttttgtgagaattgtcagtgtaactattacctaccagtattgttcagagagattgaaacagaataaacgggctgttcttgaagaagcaaaaccagaatatgcattactttggtttaatacttagtgctaacattgaaactgttggtggtgatggattttgtagcttgctgcttgtttcaccactggtcaaattttaaccattaaattgccattcacttttagaatcttgtatttaagttttgattttcaaatgttctgcttcatgtgtctgtgaagaattgtactttaagtgtgtgtcctctgaggtgcttgagaaagtgtacactgcagaactgcccattctcattactgtgtcctattttattcatgcctgtgtgtttttcttaagtatgaattctagatacagctacttatggattcatcaatatcatgagcacttttgctggt

SEQ ID NO: 133243 - DNA, 556 bp, Homo sapiens
  Payload ID: 6035
  Gene Symbol: FEZ2
  Gene Name: fasciculation and elongation protein zeta 2 (zygin II)
  ENST ID: ENST00000414288
  CDS Start-End: 1-416
aaatcctggaagaaattgagactgccattaaggagtactctgaggagctggtgcagcagttggctttacgagatgaactggagtttgaaaaggaagtgaaaaacagctttatttctgttcttattgaagtgcaaaacaaacagaaagagcacaaagaaacagcaaaaaagaaaaagaaactaaaaaatggcagctctcagaatgggaagaatgagagaagtcatatgcccggcacatatttgactacagtcattccttatgagaaaaaaaacggaccaccgtctgttgaagatcttcaaatattaacaaaaattcttcgtgccatgaaggaggacagtgaaaaagttccgagcttgttaactgattatattctgaaagaacccatcgctacaatatgtgagcagatgaaaccctgattagtcccagaatgctacgaaggggaagaggaggacgtttattagagtatgctgagctgctgtggaatgacagaactcaaaaagtctctttgcagttaggcttcccctgatcgtgctcggtaaagtctttcttcttcagc

SEQ ID NO: 133244 - DNA, 765 bp, Homo sapiens
  Payload ID: 6035
  Gene Symbol: FEZ2
  Gene Name: fasciculation and elongation protein zeta 2 (zygin II)
  ENST ID: ENST00000432869
  CDS Start-End: 1-211
ctcaaatgtcattcagaatggcctccgccacacctttggaaattcaggtggagagaaacagtatttgactacagtcattccttatgagaaaaaaaacggaccaccgtctgttgaagatcttcaaatattaacaaaaattcttcgtgccatgaaggaggacagtgaaaaagttccgagcttgttaactgattatattctgaaaggactataattgtgaacctacctataccgcatgccttagggaagcagcacccatctaattctgctcctcatgctcgggccgctggctcctgtctttctgtgtcctacatagagcagcaactttatctgcggtgggctccaagctagatttccgacagcattattctgagagctggctaccattacccttcttgctattggaaactcagcacatttgaacttgggtttgattcagtattaacagatcttgactacactaattctttatattatagaaccaacggaaatatgggcactattttgaattctagagatggtttttgttaaatctactaataaactgttctcttagtagattaagagagagtaatattaattgtgcatgtgcagttgtatttctcattaactgacagtatgcccatttgtttttatggctttcttatctaaactgcactgatgaactagattaaagccttgggagatttatactataaattcagtgatggcaagaaccaacactgtttttttgtgagaattgtcagtgtaactattacctaccagtat

SEQ ID NO: 133245 - DNA, 1940 bp, Homo sapiens
  Payload ID: 6035
  Gene Symbol: FEZ2
  Gene Name: fasciculation and elongation protein zeta 2 (zygin II)
  ENST ID: ENST00000413938
  CDS Start-End: 191-382
attctcatgatagtgaataagtcttacaagatctgatgggcttatcaggggtttccgcttttgctccttcctcattttcccttgctgccgccatgtaagaagtgccttttgcctcctgccatgattctgaggcctccccagccatgtggaactgatttggaatgccctgacagataattatgggaatgtgatgcctgtagactggaagtcatcgcatactaggaccttgcacttgcttactctgaacctctcagaaaaaggggtaagtgacagtttgctctttgatacatcagatgatgaagagctgagagaacagctggatatgcactcaatcatcgtctcctgtgttaatgatgaacccctcttcacggcagaccagtaaaaattttgattatttggagcatccacacctgaacaccattggttaatggagaattcagtgcatttctgctctgggtgccttaggttattgaagaaattgaagaaatgatgcaggaatcaccggacccagaagatgatgaaacccctacacagtcagatcggctttcaatgctttcccaggaaattcaaactctcaagaggtctagtaccggcagttatgaagagagagtgaaaaggctctcagtgtctgagttaaatgaaatcctggaagaaattgagactgccattaaggagtactctgaggagctggtgcagcagttggctttacgagatgaactggagtttgaaaaggaagtgaaaaacagctttatttctgttcttattgaagtgcaaaacaaacagaaagagcacaaagaaacagcaaaaaagaaaaagaaactaaaaaatggcagctctcagaatgggaagaatgagagaagtcatatgcccggcacatatttgactacagtcattccttatgagaaaaaaaacggaccaccgtctgttgaagatcttcaaatattaacaaaaattcttcgtgccatgaaggaggacagtgaaaaagttccgagcttgttaactgattatattctgaaagttctgtgtcctacatagagcagcaactttatctgcggtgggctccaagctagatttccgacagcattattctgagagctggctaccattacccttcttgctattggaaactcagcacatttgaacttgggtttgattcagtattaacagatcttgactacactaattctttatattatagaaccaacggaaatatgggcactattttgaattctagagatggtttttgttaaatctactaataaactgttctcttagtagattaagagagagtaatattaattgtgcatgtgcagttgtatttctcattaactgacagtatgcccatttgtttttatggctttcttatctaaactgcactgatgaactagattaaagccttgggagatttatactataaattcagtgatggcaagaaccaacactgtttttttgtgagaattgtcagtgtaactattacctaccagtattgttcagagagattgaaacagaataaacgggctgttcttgaagaagcaaaaccagaatatgcattactttggtttaatacttagtgctaacattgaaactgttggtggtgatggattttgtagcttgctgcttgtttcaccactggtcaaattttaaccattaaattgccattcacttttagaatcttgtatttaagttttgattttcaaatgttctgcttcatgtgtctgtgaagaattgtactttaagtgtgtgtcctctgaggtgcttgagaaagtgtacactgcagaactgcccattctcattactgtgtcctattttattcatgcctgtgtgtttttcttaagtatgaattctagatacagctacttatggattcatcaatatcatgagcacttttgctggttccagtcaaatcaatggcatttaataaattttttaagaagtaaaaa

SEQ ID NO: 133246 - DNA, 1455 bp, Homo sapiens
  Payload ID: 6035
  Gene Symbol: FEZ2
  Gene Name: fasciculation and elongation protein zeta 2 (zygin II)
  ENST ID: ENST00000441005
  CDS Start-End: 1-550
aactctcaagaggtctagtaccggcagttatgaagagagagtgaaaaggctctcagtgtctgagttaaatgaaatcctggaagaaattgagactgccattaaggagtactctgaggagctggtgcagcagttggctttacgagatgaactggagtttgaaaaggaagtgaaaaacagctttatttctgttcttattgaagtgcaaaacaaacagaaagagcacaaagaaacagcaaaaaagaaaaagaaactaaaaaatggcagctctcagaatgggaagaatgagagaagtcatatgcccggcacatatttgactacagtcattccttatgagaaaaaaaacggaccaccgtctgttgaagatcttcaaatattaacaaaaaagcgaaggctccttgtaaataacccagttcctctttttttgtctccactgtttggaaattttaaatcagggaagcaactctcagttcttcgtgccatgaaggaggacagtgaaaaagttccgagcttgttaactgattatattctgaaagttctgtgtcctacatagagcagcaactttatctgcggtgggctccaagctagatttccgacagcattattctgagagctggctaccattacccttcttgctattggaaactcagcacatttgaacttgggtttgattcagtattaacagatcttgactacactaattctttatattatagaaccaacggaaatatgggcactattttgaattctagagatggtttttgttaaatctactaataaactgttctcttagtagattaagagagagtaatattaattgtgcatgtgcagttgtatttctcattaactgacagtatgcccatttgtttttatggctttcttatctaaactgcactgatgaactagattaaagccttgggagatttatactataaattcagtgatggcaagaaccaacactgtttttttgtgagaattgtcagtgtaactattacctaccagtattgttcagagagattgaaacagaataaacgggctgttcttgaagaagcaaaaccagaatatgcattactttggtttaatacttagtgctaacattgaaactgttggtggtgatggattttgtagcttgctgcttgtttcaccactggtcaaattttaaccattaaattgccattcacttttagaatcttgtatttaagttttgattttcaaatgttctgcttcatgtgtctgtgaagaattgtactttaagtgtgtgtcctctgaggtgcttgagaaagtgtacactgcagaactgcccattctcattactgtgtcctattttattcatgcctgtgtgtttttcttaagtatgaattctagatacagctacttatggattcatcaatatcatgagcacttttgctggttccagtcaaatcaatggcatttaataaattttttaagaagtaaaaa

SEQ ID NO: 133247 - DNA, 2777 bp, Homo sapiens
  Payload ID: 6036
  Gene Symbol: FSCN1
  Gene Name: fascin actin-bundling protein 1
  Uniprot ID: Q16658
  ENST ID: ENST00000382361
  CDS Start-End: 115-1596
gctgcggagggtgcgtgcgggccgcggcagccgaacaaaggagcaggggcgccgccgcagggacccgccacccacctcccggggccgcgcagcggcctctcgtctactgccaccatgaccgccaacggcacagccgaggcggtgcagatccagttcggcctcatcaactgcggcaacaagtacctgacggccgaggcgttcgggttcaaggtgaacgcgtccgccagcagcctgaagaagaagcagatctggacgctggagcagccccctgacgaggcgggcagcgcggccgtgtgcctgcgcagccacctgggccgctacctggcggcggacaaggacggcaacgtgacctgcgagcgcgaggtgcccggtcccgactgccgtttcctcatcgtggcgcacgacgacggtcgctggtcgctgcagtccgaggcgcaccggcgctacttcggcggcaccgaggaccgcctgtcctgcttcgcgcagacggtgtcccccgccgagaagtggagcgtgcacatcgccatgcaccctcaggtcaacatctacagcgtcacccgtaagcgctacgcgcacctgagcgcgcggccggccgacgagatcgccgtggaccgcgacgtgccctggggcgtcgactcgctcatcaccctcgccttccaggaccagcgctacagcgtgcagaccgccgaccaccgcttcctgcgccacgacgggcgcctggtggcgcgccccgagccggccactggctacacgctggagttccgctccggcaaggtggccttccgcgactgcgagggccgttacctggcgccgtcggggcccagcggcacgctcaaggcgggcaaggccaccaaggtgggcaaggacgagctctttgctctggagcagagctgcgcccaggtcgtgctgcaggcggccaacgagaggaacgtgtccacgcgccagggtatggacctgtctgccaatcaggacgaggagaccgaccaggagaccttccagctggagatcgaccgcgacaccaaaaagtgtgccttccgtacccacacgggcaagtactggacgctgacggccaccgggggcgtgcagtccaccgcctccagcaagaatgccagctgctactttgacatcgagtggcgtgaccggcgcatcacactgagggcgtccaatggcaagtttgtgacctccaagaagaatgggcagctggccgcctcggtggagacagcaggggactcagagctcttcctcatgaagctcatcaaccgccccatcatcgtgttccgcggggagcatggcttcatcggctgccgcaaggtcacgggcaccctggacgccaaccgctccagctatgacgtcttccagctggagttcaacgatggcgcctacaacatcaaagactccacaggcaaatactggacggtgggcagtgactccgcggtcaccagcagcggcgacactcctgtggacttcttcttcgagttctgcgactataacaaggtggccatcaaggtgggcgggcgctacctgaagggcgaccacgcaggcgtcctgaaggcctcggcggaaaccgtggaccccgcctcgctctgggagtactagggccggcccgtccttccccgcccctgcccacatggcggctcctgccaaccctccctgctaaccccttctccgccaggtgggctccagggcgggaggcaagcccccttgcctttcaaactggaaaccccagagaaaacggtgcccccacctgtcgcccctatggactccccactctcccctccgcccgggttccctactcccctcgggtcagcggctgcggcctggccctgggagggatttcagatgcccctgccctcttgtctgccacggggcgagtctggcacctctttcttctgacctcagacggctctgagccttatttctctggaagcggctaagggacggttgggggctgggagccctgggcgtgtagtgtaactggaatcttttgcctctcccagccacctcctcccagccccccaggagagctgggcacatgtcccaagcctgtcagtggccctccctggtgcactgtccccgaaacccctgcttgggaagggaagctgtcgggtgggctaggactgacccttgtggtgtttttttgggtggtggctggaaacagcccctctcccacgtggcagaggctcagcctggctcccttccctggagcggcagggcgtgacggccacagggtctgcccgctgcacgttctgccaaggtggtggtggcgggcgggtaggggtgtgggggccgtcttcctcctgtctctttcctttcaccctagcctgactggaagcagaaaatgaccaaatcagtattttttttaatgaaatattattgctggaggcgtcccaggcaagcctggctgtagtagcgagtgatctggcggggggcgtctcagcaccctccccagggggtgcatctcagccccctctttccgtccttcccgtccagccccagccctgggcctgggctgccgacacctgggccagagcccctgctgtgattggtgctccctgggcctcccgggtggatgaagccaggcgtcgccccctccgggagccctggggtgagccgccggggcccccctgctgccagcctcccccgtccccaacatgcatctcactctgggtgtcttggtcttttattttttgtaagtgtcatttgtataactctaaacgcccatgatagtagcttcaaactggaaatagcgaaataaaataactcagtctgcagcccca

SEQ ID NO: 133248 - DNA, 550 bp, Homo sapiens
  Payload ID: 6036
  Gene Symbol: FSCN1
  Gene Name: fascin actin-bundling protein 1
  ENST ID: ENST00000405801
  CDS Start-End: 138-550
aggcaccccgcccttcgcccgccgcgcgcgtctccaggccggtgcgctgagctccgctccgcgggcgaccgagggcggcttcagcgcgagccgggagaccccaggccagctccctcgggaagcccctaccctctggtatggacctgtctgccaatcaggacgaggagaccgaccaggagaccttccagctggagatcgaccgcgacaccaaaaagtgtgccttccgtacccacacgggcaagtactggacgctgacggccaccgggggcgtgcagtccaccgcctccagcaagaatgccagctgctactttgacatcgagtggcgtgaccggcgcatcacactgagggcgtccaatggcaagtttgtgacctccaagaagaatgggcagctggccgcctcggtggagacagcaggggactcagagctcttcctcatgaagctcatcaaccgccccatcatcgtgttccgcggggagcatggcttcatcggctgccgcaaggtcacgggcaccctggacgccaaccgctccagctatgacgtcttccagct

SEQ ID NO: 133249 - DNA, 580 bp, Homo sapiens
  Payload ID: 6036
  Gene Symbol: FSCN1
  Gene Name: fascin actin-bundling protein 1
  ENST ID: ENST00000444748
  CDS Start-End: 183-580
tttctcgctcgcggcgccgctgcggtccggagcactgcccattgcgcccccgctaggcacgcgggctaccccgcctggagggggcgaggagtggggctttgcccatcctcgggtgccgctgcccacctcccaccccgggctgggatcatgggctcccctaggccccgcggagtcgcaaccgtatggacctgtctgccaatcaggacgaggagaccgaccaggagaccttccagctggagatcgaccgcgacaccaaaaagtgtgccttccgtacccacacgggcaagtactggacgctgacggccaccgggggcgtgcagtccaccgcctccagcaagaatgccagctgctactttgacatcgagtggcgtgaccggcgcatcacactgagggcgtccaatggcaagtttgtgacctccaagaagaatgggcagctggccgcctcggtggagacagcaggggactcagagctcttcctcatgaagctcatcaaccgccccatcatcgtgttccgcggggagcatggcttcatcggctgccgcaaggtcacgggcaccctggacgccaaccgctccagcta

SEQ ID NO: 133250 - DNA, 713 bp, Homo sapiens
  Payload ID: 6036
  Gene Symbol: FSCN1
  Gene Name: fascin actin-bundling protein 1
  ENST ID: ENST00000447103
  CDS Start-End: 353-713
ggcttttgcggttcacccctgcagaggagccccccgcgccgcccccgggcccagggctcgggtcccgaggttccccaggaggcggtctccctcctcgcgccgcggcccgggaacggcgtggcgcggatggcggccctccaggcaccccgcccttcgcccgccgcgcgcgtctccaggccggtgcgctgagctccgctccgcgggcgaccgagggcggcttcagcgcgagccgggagaccccaggccagctccctcgggaagcccctaccctctggtgaacccatcccctagggcgctcgccgggaacaattgactgcaactcgatccgtcccctccggggcctcctgcaggtatggacctgtctgccaatcaggacgaggagaccgaccaggagaccttccagctggagatcgaccgcgacaccaaaaagtgtgccttccgtacccacacgggcaagtactggacgctgacggccaccgggggcgtgcagtccaccgcctccagcaagaatgccagctgctactttgacatcgagtggcgtgaccggcgcatcacactgagggcgtccaatggcaagtttgtgacctccaagaagaatgggcagctggccgcctcggtggagacagcaggggactcagagctcttcctcatgaagctcatcaaccgccccatcatcgtgttccgcggggagcatggcttcatcggctgccgca

SEQ ID NO: 133251 - DNA, 1551 bp, Homo sapiens
  Payload ID: 6037
  Gene Symbol: FSCN2
  Gene Name: fascin actin-bundling protein 2, retinal
  Uniprot ID: O14926
  ENST ID: ENST00000334850
  CDS Start-End: 1-1551
atgccgacgaacggcctgcaccaggtgctgaagatccagtttggcctcgtcaacgacactgaccgctacctgacagctgagagcttcggcttcaaggtcaatgcctcggcacccagcctcaagaggaagcagacctgggtgctggaacccgacccaggacaaggcacggctgtgctgctccgcagcagccacctgggccgctacctgtcggcagaagaggacgggcgcgtggcctgtgaggcagagcagccgggccgtgactgccgcttcctggtcctgccgcagccagatgggcgctgggtgctgcggtccgagccgcacggccgcttcttcggaggcaccgaggaccagctgtcctgcttcgccacagccgtttccccggccgagctgtggaccgtgcacctggccatccacccgcaggcccacctgctgagcgtgagccggcggcgctacgtgcacctgtgcccgcgggaggacgagatggccgcagacggagacaagccctggggcgtggacgccctcctcaccctcatcttccggagccgacggtactgcctcaagtcctgtgacagccgctacctgcgcagcgacggccgtctggtctgggagcctgagccccgtgcctgctacacgctggagttcaaggcgggcaagctggccttcaaggactgcgacggccactacctggcacccgtggggcccgcaggcaccctcaaggccggccgaaacacgcgacctggcaaggatgagctctttgatctggaggagagtcacccacaggtggtgctggtggctgccaaccaccgctacgtctctgtgcggcaaggggtcaacgtctcagccaatcaggatgatgaactagaccacgagaccttcctgatgcaaattgaccaggagacaaagaagtgcaccttctattccagcactgggggctactggaccctggtcacccatgggggcattcacgccacagccacacaagtttctgccaacaccatgtttgagatggagtggcgtggccggcgggtagcactcaaagccagcaacgggcgctacgtgtgcatgaagaagaatgggcagctggcggctatcagcgattttgtcgggcccccaccccgcccggcctggacagggaaggtggcgggaggggcagcgcagcagacgctctccccgccaggcaaggacgaagagttcaccctcaagctcatcaaccggcccatcctggtgctgcgcggcctggacggcttcgtctgccaccaccgcggctccaaccagctggacaccaaccgctccgtctacgacgtcttccacctgagcttcagcgacggcgcctaccggatccgaggccgcgacggagggttctggtacacgggcagccacggcagcgtgtgcagcgacggcgaacgcgccgaggacttcgtcttcgagttccgtgagcgcggccgcctggccatccgcgcccggagcggcaagtacctgcgcggcggcgcctcgggcctgctgcgggccgatgccgacgccccggccgggaccgcgctttgggagtactga

SEQ ID NO: 133252 - DNA, 1665 bp, Homo sapiens
  Payload ID: 6037
  Gene Symbol: FSCN2
  Gene Name: fascin actin-bundling protein 2, retinal
  Uniprot ID: O14926
  ENST ID: ENST00000417245
  CDS Start-End: 137-1615
cagggggttcgtgacgccggctgggtctgggggctgtgggccagccgagccgacccgggcttctgggggaccgcgggggccgtgagcactcagagggcgcatcccaggcccctccggggacccggccagcctgaagatgccgacgaacggcctgcaccaggtgctgaagatccagtttggcctcgtcaacgacactgaccgctacctgacagctgagagcttcggcttcaaggtcaatgcctcggcacccagcctcaagaggaagcagacctgggtgctggaacccgacccaggacaaggcacggctgtgctgctccgcagcagccacctgggccgctacctgtcggcagaagaggacgggcgcgtggcctgtgaggcagagcagccgggccgtgactgccgcttcctggtcctgccgcagccagatgggcgctgggtgctgcggtccgagccgcacggccgcttcttcggaggcaccgaggaccagctgtcctgcttcgccacagccgtttccccggccgagctgtggaccgtgcacctggccatccacccgcaggcccacctgctgagcgtgagccggcggcgctacgtgcacctgtgcccgcgggaggacgagatggccgcagacggagacaagccctggggcgtggacgccctcctcaccctcatcttccggagccgacggtactgcctcaagtcctgtgacagccgctacctgcgcagcgacggccgtctggtctgggagcctgagccccgtgcctgctacacgctggagttcaaggcgggcaagctggccttcaaggactgcgacggccactacctggcacccgtggggcccgcaggcaccctcaaggccggccgaaacacgcgacctggcaaggatgagctctttgatctggaggagagtcacccacaggtggtgctggtggctgccaaccaccgctacgtctctgtgcggcaaggggtcaacgtctcagccaatcaggatgatgaactagaccacgagaccttcctgatgcaaattgaccaggagacaaagaagtgcaccttctattccagcactgggggctactggaccctggtcacccatgggggcattcacgccacagccacacaagtttctgccaacaccatgtttgagatggagtggcgtggccggcgggtagcactcaaagccagcaacgggcgctacgtgtgcatgaagaagaatgggcagctggcggctatcagcgattttgtcggcaaggacgaagagttcaccctcaagctcatcaaccggcccatcctggtgctgcgcggcctggacggcttcgtctgccaccaccgcggctccaaccagctggacaccaaccgctccgtctacgacgtcttccacctgagcttcagcgacggcgcctaccggatccgaggccgcgacggagggttctggtacacgggcagccacggcagcgtgtgcagcgacggcgaacgcgccgaggacttcgtcttcgagttccgtgagcgcggccgcctggccatccgcgcccggagcggcaagtacctgcgcggcggcgcctcgggcctgctgcgggccgatgccgacgccccggccgggaccgcgctttgggagtactgaggccgcgcccagaccagcctgtcgcgcattaaaaccgtgtctctcccgca

SEQ ID NO: 133253 - DNA, 2238 bp, Homo sapiens
  Payload ID: 6038
  Gene Symbol: FSCN3
  Gene Name: fascin actin-bundling protein 3, testicular
  Uniprot ID: Q9NQT6
  ENST ID: ENST00000265825
  CDS Start-End: 220-1716
ccctttccccactgtggtgtgataagaggctgccctcacagtcacaatgctcccgggtcacagaggtgctgggccccaggccagcctctgcctgggaagttctctctgggaacatctggtgggtactacaggccctattccaggccctatggcctgtggaacctcaccacgggggggagggctgggccagacggagacatcacctgtggtgtcagccccatggatgagacagagtggatacacagacatcccaaggctgaggacctaagggttgggctcatcagctgggcaggaacctacctcacctttgaggcatgcaagaatacagtcactgcaactgcgaagagtttgggcaggagacagacctgggagatcttggtgagcaatgagcatgagacacaggccgtggtgcgactaaagagcgtgcagggcctctacctgctgtgtgagtgtgatggcaccgtgtgttatggccgcccaaggaccagccaccatgggtgctttctactgcgtttccaccggaacagcaagtggaccctccagtgcctaatctctggtcgttatttggagtccaatggcaaggacgtgttttgcacttcccacgtcctctcagcttaccacatgtggaccccccgaccagccctccatgtccacgtgatcctctacagccccatccaccgctgctatgcccgggctgaccccactatgggccgcatctgggtggacgcagcagttccctgcctggaggagtgtggcttcctgttgcatttccgagatggatgctaccacctggagacctctacacaccacttcttgtcccatgtagaccggctgttctcccaaccctcatcacagacagcttttcacatgcaagtgcggcctggagggcttgtggcactgtgtgatggagaaggaggcatgttatatccacagggcacgcatctgctcttgggcatgggctgcaaccccatgaggggtgaggagtggttcatcctacagcactgcccaacctgggtcagcctcaggtcaaagactgggcggttcatctcagtcatctacgatggtgaggtgcgtgctgcttctgagcgcttaaaccgaatgtccttgttccagtttgaatgtgacagtgagagccccactgtgcagcttcgttcagccaatggctactacctatcccagaggcgccacagggcagtaatggctgatgggcaccccctggagtctgacacgttcttccgaatgcactggaactgtggcaggatcatcctgcagtcctgcagggggcgcttcctgggcattgcacccaacagcctgctgatggccaatgtcatccttccaggcccaaatgaggaatttgggattttatttgccaatcgctccttccttgtattgcgaggtcgttatggctatgtgggctcctcatcgggccatgacctcatacagtgcaaccaggatcagcccgaccgcattcatctactaccctgccgaccgggtatctaccacttccaggcacaggggggatccttctggtcaataacatcctttggcacctttcgcccttggggcaagtttgccctcaacttctgtatcgagcttcaggggagcaacttactcactgtactggcccccaatggcttctacatgcgagccgaccaaagtggcaccctgttggcagacagtgaagacattaccagagagtgtatctgggaattttaggtcaatgggatgtcacctaccaaaatccaaatcctccaggaaaaactactacactaaatggaccaggaacctcagagtcaagatccaagagaagaacatctgttacaacttttcctacccagtttagcaaaacacctgttttatgcaacaatacatcacaacaggccacccccaagatccttgtgtgcatctgactcaatatagaataggggtctggatgagggttgaaacagacaccccaggctgctctaagttctatacaggagagaccaaatggcaagcagttcttccactgatcttccccgtccccatccagaactgctagactttttccagtgaacccatgagcagccagcattgccctgaagggtttagaatccagttatgactttaaatatctttttggtttagaaaaaaggaaagattgttaatctcgtgagcacaggataatggtaataacaccttatgcctgtataggccactttacctcctcctaccacgatttatttaacttccccaccc

SEQ ID NO: 133254 - DNA, 696 bp, Homo sapiens
  Payload ID: 6038
  Gene Symbol: FSCN3
  Gene Name: fascin actin-bundling protein 3, testicular
  ENST ID: ENST00000421705
  CDS Start-End: 113-352
gggaacatctggtgggtactacaggccctattccaggccctatggcctgtggaacctcaccacgggggggagggctgggccagacggagacatcacctgtggtgtcagccccatggatgagacagagtggatacacagacatcccaaggctgaggacctaagggttgggctcatcagctgggcaggaacctacctcacctttgaggcatgcaagaatacagtcactgcaactgcgaagagtttgggcaggagacagcacagggtggttgtgtcagaaagaagagaagtggagagcacagggtggttgtgtcagaaagaggagaagtggagagcccaggttgatcacagctgaaccaggcagttgcatctgaactgttcatgctcccatcttcatccctggagccagggcctgcctataagagcttttgcttctgtcttgccatgctggaaggcaacctttggggatggaggtattggctaagtgtgctctctgcggacaacagtgaggaagaaaaaaacctgggagatcttggtgagcaatgagcatgagacacaggccgtggtgcgactaaagagcgtgcagggcctctacctgctgtgtgagtgtgatggcaccgtgtgttatggccgcccaaggaccagccaccatgggtgctttctactgcgtttccaccggaacagcaagtggaccctcca

SEQ ID NO: 133255 - DNA, 725 bp, Homo sapiens
  Payload ID: 6038
  Gene Symbol: FSCN3
  Gene Name: fascin actin-bundling protein 3, testicular
  ENST ID: ENST00000478821
  CDS Start-End: 284-725
gggaagttctctctgggaacatctgacctgggagatcttggtgagcaatgagcatgagacacaggccgtggtgcgactaaagagcgtgcagggcctctacctgctgtgtgagtgtgatggcaccgtgtgttatggccgcccaaggaccagccaccatgggtgctttctactgcgtttccaccggaacagcaagtggaccctccagtgcctaatctctggtcgttatttggagtccaatggcaaggacgtgttttgcacttcccacgtcctctcagcttaccacatgtggaccccccgaccagccctccatgtccacgtgatcctctacagccccatccaccgctgctatgcccgggctgaccccactatgggccgcatctgggtggacgcagcagttccctgcctggaggagtgtggcttcctgttgcatttccgagatggatgctaccacctggagacctctacacaccacttcttgtcccatgtagaccggctgttctcccaaccctcatcacagacagcttttcacatgcaagtgcggcctggagggcttgtggcactgtgtgatggagaaggaggcatgttatatccacagggcacgcatctgctcttgggcatgggctgcaaccccatgaggggtgaggagtggttcatcctacagcactgcccaacctgggtcagcctcaggtcaaagactgggcggttcatctcagtcatctacgatg

SEQ ID NO: 133256 - DNA, 1045 bp, Homo sapiens
  Payload ID: 6039
  Gene Symbol: FASTKD1
  Gene Name: FAST kinase domains 1
  ENST ID: ENST00000438035
  CDS Start-End: 287-1045
ataaaccctgagatatgagggttgggcgagacatccgagcctgtttcgttccgtgttgggaccaggaataaccctgacttctgagctttcataaccccaggatcctccagaaaatttgcggcgcgctgagggaaaaccttgctgaagctgtacattggaatgcgtttacagtcattgtaatggaagcaaaatacatgaaggaaaaactgttatttgtatccctgcttattgcacctgacgactagttgcagatggttttgtttacctaagaaaacttgtgatataaatgaaaaaaacacctgttttcctagagtcattggttacaaatatgcttcgtctaagagctatttgtccattctcctggagagtgtttcaatttcgacccatcagttgtgaaccactaattattcagatgaataagtgtacagatgaggagcaaatgtttggttttattgaaagaaacaaagccatactttcagaaaagcaagtgggatgtgcatttgatatgctttggaagcttcaaaagcagaagaccagcctgttaaaaaatgctgagtatgtcagagaccatcctcaatttcttactcttcataatttagctacaaataaattcaaattaatgaatgacgataccctggtgaatgtgttatacgtcacacaacagtttgatattaaactgctctcagaattttcctcttgcctagcagatcagcatttgtattttagtccattaatgggaaaaatagctgatattgttcataggaacttggaaaccacacaggacttaagttccttgtctgtcttgatggtcaacatatcttctttaatatcacgacattttcaacaacaactggtgaacaaaacagaacttctttttgacaccatagattcttctgaggtcaacgttgcaaaaagcatagcaaagtttcttcgaaatgttagatatcgttatcaaccactattagaaagatgtaataacgtatttttaagtaatgtggaccaccttgatttggattccatcagtaaaatacttagtgtatacaaa

SEQ ID NO: 133257 - DNA, 1850 bp, Homo sapiens
  Payload ID: 6039
  Gene Symbol: FASTKD1
  Gene Name: FAST kinase domains 1
  ENST ID: ENST00000445210
  CDS Start-End: 1023-1850
gcattttttcctggtttgggggcaaggtctcatgggaaaggtcatgtctctcgaagaaaggttataaaccctgagatatgagggttgggcgagacatccgagcctgtttcgttccgtgttgggaccaggaataaccctgacttctgagctttcataaccccaggatcctccagaaaatttgcggcgcgctgagggaaaaccttgctggcaagtcgggactgtgtggcagcggctatttttcttttcccacccagcacgttttcgggctggggacatagggttcagttgagatacggaggcttccttcgggatattgggttctctgaagtgcggatggactagggcagggctgagaccccattcattcactcatttgtttagctctcctttatgcccggcgcagaagataccccttagggtcccaaggcccttcctgtagttaagttccttccttaaggtcattcagctggggcaaagctggggactcgacacctttctatgctaaccattgagctgcctccactttgagcagctcagtggatgaatatagtatcttgaggatacctttgatttgtgcagggttttcttgtgcaggtttgtgacccaggtcagcttaggtcaggatgctgtactgcttgccacaaaatagcctgtactgtcgcgtcgttttttcttgtgaacagactgtttggcatagccgtagagaggggtctgagacatgaatttagtgatacagcgttgatttgtttgtgtaatgaagctgttcaagtggaaagaactgagttgtagtccctgcttcactagtactagaaggattttttaaacctttttgaacctattttgccttatctgtaaaatggaaataatatcaacctggaagaagctgtacattggaatgcgtttacagtcattgtaatggaagcaaaatacatgaaggaaaaactgttatttgtatccctgcttattgcacctgacgactagttgcagatggttttgtttacctaagaaaacttgtgatataaatgaaaaaaacacctgttttcctagagtcattggttacaaatatgcttcgtctaagagctatttgtccattctcctggagagtgtttcaatttcgacccatcagttgtgaaccactaattattcagatgaataagtgtacagatgaggagcaaatgtttggttttattgaaagaaacaaagccatactttcagaaaagcaagtgggatgtgcatttgatatgctttggaagcttcaaaagcagaagaccagcctgttaaaaaatgctgagtatgtcagagaccatcctcaatttcttactcttcataatttagctacaaataaattcaaattaatgaatgacgataccctggtgaatgtgttatacgtcacacaacagtttgctggtgaggcccatgacccgctagttgaagcactagttacagaagcatggagaaggctagaaaggtttgatattaaactgctctcagaattttcctcttgcctagcagatcagcatttgtattttagtccattaatgggaaaaatagctgatattgttcataggaacttggaaaccacacaggacttaagttccttgtctgtcttgatggtcaacatatcttctttaatatcacgacattttcaacaacaactggtgaacaaaacagaacttctttttgacaccatagattcttctgaggtcaacgttgcaaaaagcatagcaaagtttcttcgaaatgttagatatcgttatcaaccactattagaaagatgtaataacgtatttttaagtaatgtggaccaccttgatttggattccatcagtaaaatacttagtgtatacaaa

SEQ ID NO: 133258 - DNA, 2967 bp, Homo sapiens
  Payload ID: 6039
  Gene Symbol: FASTKD1
  Gene Name: FAST kinase domains 1
  Uniprot ID: Q53R41
  ENST ID: ENST00000453153
  CDS Start-End: 348-2891
attttttcctggtttgggggcaaggtctcatgggaaaggtcatgtctctcgaagaaaggttataaaccctgagatatgagggttgggcgagacatccgagcctgtttcgttccgtgttgggaccaggaataaccctgacttctgagctttcataaccccaggatcctccagaaaatttgcggcgcgctgagggaaaaccttgctgaagctgtacattggaatgcgtttacagtcattgtaatggaagcaaaatacatgaaggaaaaactgttatttgtatccctgcttattgcacctgacgactagttgcagatggttttgtttacctaagaaaacttgtgatataaatgaaaaaaacacctgttttcctagagtcattggttacaaatatgcttcgtctaagagctatttgtccattctcctggagagtgtttcaatttcgacccatcagttgtgaaccactaattattcagatgaataagtgtacagatgaggagcaaatgtttggttttattgaaagaaacaaagccatactttcagaaaagcaagtgggatgtgcatttgatatgctttggaagcttcaaaagcagaagaccagcctgttaaaaaatgctgagtatgtcagagaccatcctcaatttcttactcttcataatttagctacaaataaattcaaattaatgaatgacgataccctggtgaatgtgttatacgtcacacaacagtttgctggtgaggcccatgacccgctagttgaagcactagttacagaagcatggagaaggctagaaaggtttgatattaaactgctctcagaattttcctcttgcctagcagatcagcatttgtattttagtccattaatgggaaaaatagctgatattgttcataggaacttggaaaccacacaggacttaagttccttgtctgtcttgatggtcaacatatcttctttaatatcacgacattttcaacaacaactggtgaacaaaacagaacttctttttgacaccatagattcttctgaggtcaacgttgcaaaaagcatagcaaagtttcttcgaaatgttagatatcgttatcaaccactattagaaagatgtaataacgtatttttaagtaatgtggaccaccttgatttggattccatcagtaaaatacttagtgtatacaaatttctacaatttaatagttttgaatttattataatggctaaaaagaagctaactgaaatgattcctctgtgtaatcatcctgctagctttgtaaaattgtttgtagcattgggacccattgcaggacctgaagaaaagaaacaacttaaatcaactatgttattgatgtcagaggacctaactggcgagcaagccctggcagtgttgggagcaatgggagatatggaaagcagaaactcatgtctgattaaaagagttacttcagttctgcataaacatttggatggctataaaccattagagttgttgaagataactcaagaattaacttttctgcatttccaaaggaaggagttttttgcgaaacttagagaattactgcttagttatttgaaaaatagtttcataccaactgaggtgtctgttctggtccgtgctatttccctgctcccttctcctcacttggacgaagtggggatatcccgaattgaagccgttttaccacagtgtgacctaaataacctgagtagttttgccacatctgttttaagatggattcagcatgatcacatgtatttggataatatgactgcgaaacaactgaaactacttcaaaaattagatcactatggtcgtcagagactacaacacagcaacagtttggatctgttacggaaggaacttaaatctctcaaaggaaacacgtttcctgagtcacttcttgaagaaatgattgctactttacagcatttcatggatgatattaattacataaatgttggggagattgcatcttttatttctagtactgattacctcagtactttgctactagataggatagcctcagtggctgttcagcagattgaaaagatccatccttttacaatccctgctattattcgtccattcagcgtattgaactatgatccacctcaaagggatgaatttttgggaacttgcgtgcaacatcttaattcttacttaggtatattggatccttttatattagtgtttcttggtttctctttggccacacttgaatattttccagaagatctgctaaaggcaatttttaacatcaaattcttagctagattggattctcaacttgaaattttatctccatctcgaagtgcaagagtccagtttcatcttatggagttaaatagatcagtctgcttggaatgccctgagtttcagattccatggtttcatgaccgcttctgtcaacaatataataaaggtattggtggcatggatggaacacaacagcagatttttaaaatgttagcagaggtactaggaggaatcaattgtgtaaaagcctcggttcttacgccttattaccacaaagtagattttgagtgtatcttggataaaagaaaaaaacctcttccgtatggaagccataatatagcattgggacaactaccagaaatgccctgggaatcaaatatcgaaatagttggatcaaggctgccaccaggggctgaaaggattgctttggaatttttggattcaaaagcactttgtagaaatatccctcacatgaaaggaaaatctgctatgaaaaaacgacatttggaaattctggggtatcgtgtaattcagatttcccagtttgaatggaactctatggcactgtcaacaaaggatgctcggatggactacctgagagaatgtatatttggagaagtcaagtcatgtttgtagtttttatttaaaatgaatgttatcgtgtgttacatttggacctattttaataaagtggcctgtctcaattaaaaaa

SEQ ID NO: 133259 - DNA, 2791 bp, Homo sapiens
  Payload ID: 6039
  Gene Symbol: FASTKD1
  Gene Name: FAST kinase domains 1
  Uniprot ID: Q53R41
  ENST ID: ENST00000453929
  CDS Start-End: 307-2721
atgtctctcgaagaaaggttataaaccctgagatatgagggttgggcgagacatccgagcctgtttcgttccgtgttgggaccaggaataaccctgacttctgagctttcataaccccaggatcctccagaaaatttgcggcgcgctgagggaaaaccttgctgaagctgtacattggaatgcgtttacagtcattgtaatggaagcaaaatacatgaaggaaaaactgttatttgtatccctgcttattgcacctgacgactagttgcagatggttttgtttacctaagaaaacttgtgatataaatgaaaaaaacacctgttttcctagagtcattggttacaaatatgcttcgtctaagagctatttgtccattctcctggagagtgtttcaatttcgacccatcagttgtgaaccactaattattcagatgaataagtgtacagatgaggagcaaatgtttggttttattgaaagaaacaaagccatactttcagaaaagcaagtgggatgtgcatttgatatgctttggaagcttcaaaagcagaagaccagcctgttaaaaaatgctgagtatgtcagagaccatcctcaatttcttactcttcataatttagctacaaataaattcaaattaatgaatgacgataccctggtgaatgtgttatacgtcacacaacagtttgctggtgaggcccatgacccgctagttgaagcactagttacagaagcatggagaaggctagaaaggtttgatattaaactgctctcagaattttcctcttgcctagcagatcagcatttgtattttagtccattaatgggaaaaatagctgatattgttcataggaacttggaaaccacacaggacttaagttccttgtctgtcttgatggtcaacatatcttctttaatatcacgacattttcaacaacaactggtgaacaaaacagaacttctttttgacaccatagattcttctgaggtcaacgttgcaaaaagcatagcaaagtttcttcgaaatgttagatatcgttatcaaccactattagaaagatgtaataacgtatttttaagtaatgtggaccaccttgatttggattccatcagtaaaatacttagtgtatacaaatttctacaatttaatagttttgaatttattataatggctaaaaagaagctaactgaaatgattcctctgtgtaatcatcctgctagctttgtaaaattgtttgtagcattgggacccattgcaggacctgaagaaaagaaacaacttaaatcaactatgttattgatgtcagaggacctaactggcgagcaagccctggcagtgttgggagcaatgggagatatggaaagcagaaactcatgtctgattaaaagagttacttcagttctgcataaacatttggatggctataaaccattagagttgttgaagataactcaagaattaacttttctgcatttccaaaggaaggagttttttgcgaaacttagagaattactgcttagttatttgaaaaatagtttcataccaactgaggtgtctgttctggtccgtgctatttccctgctcccttctcctcacttggacgaagtggggatatcccgaattgaagccgttttaccacagtgtgacctaaataacctgagtagttttgccacatctgttttaagatggattcagcatgatcacatgtatttggataatatgactgcgaaacaactgaaactacttcaaaaattagatcactatggtcgtcagagactacaacacagcaacagtttggatctgttacggaaggaacttaaatctctcaaaggaaacacgtttcctgagtcacttcttgaagaaatgattgctactttacagcatttcatggatgatattaattacataaatgttggggagattgcatcttttatttctagtactgattacctcagtactttgctactagataggatagcctcagtggctgttcagcagattgaaaagatccatccttttacaatccctgctattattcgtccattcagcgtattgaactatgatccacctcaaagggatgaatttttgggaacttgcgtgcaacatcttaattcttacttaggtatattggatccttttatattagtgtttcttggtttctctttggccacacttgaatattttccagaagatctgctaaaggcaatttttaacatcaaattcttagctagattggattctcaacttgaaagtattggtggcatggatggaacacaacagcagatttttaaaatgttagcagaggtactaggaggaatcaattgtgtaaaagcctcggttcttacgccttattaccacaaagtagattttgagtgtatcttggataaaagaaaaaaacctcttccgtatggaagccataatatagcattgggacaactaccagaaatgccctgggaatcaaatatcgaaatagttggatcaaggctgccaccaggggctgaaaggattgctttggaatttttggattcaaaagcactttgtagaaatatccctcacatgaaaggaaaatctgctatgaaaaaacgacatttggaaattctggggtatcgtgtaattcagatttcccagtttgaatggaactctatggcactgtcaacaaaggatgctcggatggactacctgagagaatgtatatttggagaagtcaagtcatgtttgtagtttttatttaaaatgaatgttatcgtgtgttacatttggacctattttaataaagtggcctgtctcaatt

SEQ ID NO: 133260 - DNA, 687 bp, Homo sapiens
  Payload ID: 6039
  Gene Symbol: FASTKD1
  Gene Name: FAST kinase domains 1
  ENST ID: ENST00000417376
  CDS Start-End: 376-687
gttttcctgataatctaatttttttgttttgttttgttttgttttgaggcggagtcttgctctgtcaccaggctggagtacagtggcacaatcttggctcactgcaacctccgcctcccaggttcaagcaattctcctttaacaactgtaatactattgttaactgtgggcatttgaaattggattattgtggagttttgtgaaaatgtggttggctgcagatgaggatatagtaggtttgctggtgaggcccatgacccgctagttgaagcactagttacagaagcatggagaaggctagaaaggtttgatattaaactgctctcagaattttcctcttgcctagcagatcagcatttgtattttagtccattaatgggaaaaatagctgatattgttcataggaacttggaaaccacacaggacttaagttccttgtctgtcttgatggtcaacatatcttctttaatatcacgacattttcaacaacaactggtgaacaaaacagaacttctttttgacaccatagattcttctgaggtcaacgttgcaaaaagcatagcaaagtttcttcgaaatgttagatatcgttatcaaccactattagaaagatgtaataacgtatttttaagtaatgtggaccaccttgatttggattccatcagtaaaatacttagtgtatacaaa

SEQ ID NO: 133261 - DNA, 3188 bp, Homo sapiens
  Payload ID: 6040
  Gene Symbol: FASTKD2
  Gene Name: FAST kinase domains 2
  Uniprot ID: Q9NYY8
  ENST ID: ENST00000236980
  CDS Start-End: 349-2481
aaagtctggcgcccagcagaggttaggtgtttaaagttaggacctgaatgggttacgttgcgatacacgatcaaacatcgcccttataagctctgtggtatccccgagccccactcctgtatgcagggaaattagtcattctccttggtaaactttcttcaagtaagtccttcagctacagccgcgaacatatgctttttgacctttgagggaatccgtaagatctcgtgagaagcgcagcttctcggggaagctgtcatggctgctcctgtacgtagtcacggtcttgtgctctaaggaaaacgacagcacgtgttctttttcactagtagaagtgacgttggtttcatgttgacaactttgaagccatttggaagtgtttcagtggagagcaaaatgaataacaaagcgggctcctttttctggaaccttagacaattcagtacattagtttcaacaagcagaactatgaggctatgttgtttgggactttgcaaaccaaaaatagttcattcaaactggaacattttaaataactttcataacagaatgcaatcaactgatatcattagatatctctttcaggatgcattcatttttaaatcagatgttggctttcaaacaaagggcataagcactctaacagcccttagaattgaaagactactttatgctaaaagactgttttttgactcaaagcagtctcttgtccctgttgataaatctgatgatgaattgaagaaagtaaaccttaatcatgaagtctccaatgaagatgttcttaccaaggaaacaaaaccaaaccgtatcagcagtagaaaactgtctgaggaatgtaattccctgagtgatgtgttagatgcattttcaaaagcgcccacatttcctagtagcaactatttcacagcaatgtggacaattgccaaaagactgtctgatgaccagaagcgctttgaaaaacgactgatgtttagccaccctgcatttaatcagctctgtgaacatatgatgagagaagccaagatcatgcagtataagtacctactgttcagtcttcacgccatagtgaagcttggaatccctcagaacactattttggtgcagactttgctgagggtgacccaggaacgtatcaatgagtgtgatgagatatgcctttcagttttgtcaactgttttagaggcaatggaaccatgcaagaatgttcatgttctacgaacgggattcagaatactagttgatcagcaagtttggaaaatagaagatgtcttcacattacaagttgtgatgaagtgtattggaaaagatgcaccgattgctcttaagaggaaactggagatgaaagccttgagggaattagacagattttctgttttgaatagccaacacatgtttgaagtactagctgccatgaatcaccgatctcttatactcctggatgaatgcagtaaggtggtcctagataatatccatgggtgtcctttaagaataatgatcaacatattgcagtcctgcaaagacctccagtaccataatttggatctcttcaagggacttgcagattatgtggctgcaactttcgacatctggaagttcagaaaagttctttttatcctcattttatttgaaaaccttggctttcgacctgttggtttaatggacctgtttatgaagagaatagtagaggatcctgaatccctaaacatgaaaaacattctatctattcttcatacttactcttctctcaatcatgtctacaaatgccagaacaaagaacagttcgtggaagttatggctagtgctctgactggttatcttcacactatttcttctgaaaacttattggatgcagtatattcattttgcttgatgaattactttcccctggctccttttaatcagcttctgcaaaaagacatcatcagtgagctgctgacatcagatgacatgaagaatgcttacaagctgcatactttggatacttgtctaaaacttgatgatactgtctatctgagggacatagccttgtcactcccacagctgccgcgggagctgccatcgtcacatacaaatgcaaaggtggcagaggtgctgagcagccttctgggaggtgaaggacacttctcaaaggatgtgcacttgccacacaattatcatattgattttgaaatcagaatggacactaacaggaatcaagtgctaccactttctgatgtggatacaacttctgctacagatattcaaagagtagctgtgctatgtgtttccagatctgcttattgtttgggttcaagccaccccagaggattccttgctatgaaaatgcggcatttgaatgcaatgggttttcatgtgatcttggtcaataactgggagatggacaaactagagatggaagatgcagtcacatttttgaagactaaaatctattcagtagaagctcttcctgttgctgctgtaaatgtgcaaagcacacaataaagtgaaaatcaaccttttcatattaggagacatgcatttgtaaaaattaataaagatgacaagtcagttgtcaatggaattgagctatctgctaagacaaaaaatgttacctcagttcactattaaaattaattttaggagtggaagaaatgttgttactgccatttaaaaatatgctgagaaaattccagaagggttatttttccaaccacacctattccctctagtgcccagatatttgatttgtgagctgtacgtttcaccttttcatctttgatctactaaaaactggtttcttagttgtgaggtgtcacaggcaggttgatgtgggtagtagtccttgtctttggaatctgaatatttatactcctgctctaagctgttctaagacttggggttatgcctttaaatcattttcaagcattggccaaataataattggacaaagttctaaagttgtcaagtgtgtaagaattagtgaggtagctgttgaaaatgagtgaggatggtatttgtatttgtaataagcactgcaggtagagatatttcatgggttataataagagaaacacagatgagatgtagatggtaaggagtcttactgttgttggggtccttcctttctctttcttttttcccccttacccctcccacaatttcatgaagtcttttaaattaaatatatagctgaattgtgttgtgaatca

SEQ ID NO: 133262 - DNA, 2344 bp, Homo sapiens
  Payload ID: 6040
  Gene Symbol: FASTKD2
  Gene Name: FAST kinase domains 2
  Uniprot ID: Q9NYY8
  ENST ID: ENST00000403094
  CDS Start-End: 208-2340
gaagctgtcatggctgctcctgtacgtagtcacggtcttgtgctctaaggtgagtggaggacgagcttgggcttagcggcagcccgtatcacatcctagactttttacttcgaggagaagagtctcacgagttgtcctggaagtaagtttaaaggaggaaaacgacagcacgtgttctttttcactagtagaagtgacgttggtttcatgttgacaactttgaagccatttggaagtgtttcagtggagagcaaaatgaataacaaagcgggctcctttttctggaaccttagacaattcagtacattagtttcaacaagcagaactatgaggctatgttgtttgggactttgcaaaccaaaaatagttcattcaaactggaacattttaaataactttcataacagaatgcaatcaactgatatcattagatatctctttcaggatgcattcatttttaaatcagatgttggctttcaaacaaagggcataagcactctaacagcccttagaattgaaagactactttatgctaaaagactgttttttgactcaaagcagtctcttgtccctgttgataaatctgatgatgaattgaagaaagtaaaccttaatcatgaagtctccaatgaagatgttcttaccaaggaaacaaaaccaaaccgtatcagcagtagaaaactgtctgaggaatgtaattccctgagtgatgtgttagatgcattttcaaaagcgcccacatttcctagtagcaactatttcacagcaatgtggacaattgccaaaagactgtctgatgaccagaagcgctttgaaaaacgactgatgtttagccaccctgcatttaatcagctctgtgaacatatgatgagagaagccaagatcatgcagtataagtacctactgttcagtcttcacgccatagtgaagcttggaatccctcagaacactattttggtgcagactttgctgagggtgacccaggaacgtatcaatgagtgtgatgagatatgcctttcagttttgtcaactgttttagaggcaatggaaccatgcaagaatgttcatgttctacgaacgggattcagaatactagttgatcagcaagtttggaaaatagaagatgtcttcacattacaagttgtgatgaagtgtattggaaaagatgcaccgattgctcttaagaggaaactggagatgaaagccttgagggaattagacagattttctgttttgaatagccaacacatgtttgaagtactagctgccatgaatcaccgatctcttatactcctggatgaatgcagtaaggtggtcctagataatatccatgggtgtcctttaagaataatgatcaacatattgcagtcctgcaaagacctccagtaccataatttggatctcttcaagggacttgcagattatgtggctgcaactttcgacatctggaagttcagaaaagttctttttatcctcattttatttgaaaaccttggctttcgacctgttggtttaatggacctgtttatgaagagaatagtagaggatcctgaatccctaaacatgaaaaacattctatctattcttcatacttactcttctctcaatcatgtctacaaatgccagaacaaagaacagttcgtggaagttatggctagtgctctgactggttatcttcacactatttcttctgaaaacttattggatgcagtatattcattttgcttgatgaattactttcccctggctccttttaatcagcttctgcaaaaagacatcatcagtgagctgctgacatcagatgacatgaagaatgcttacaagctgcatactttggatacttgtctaaaacttgatgatactgtctatctgagggacatagccttgtcactcccacagctgccgcgggagctgccatcgtcacatacaaatgcaaaggtggcagaggtgctgagcagccttctgggaggtgaaggacacttctcaaaggatgtgcacttgccacacaattatcatattgattttgaaatcagaatggacactaacaggaatcaagtgctaccactttctgatgtggatacaacttctgctacagatattcaaagagtagctgtgctatgtgtttccagatctgcttattgtttgggttcaagccaccccagaggattccttgctatgaaaatgcggcatttgaatgcaatgggttttcatgtgatcttggtcaataactgggagatggacaaactagagatggaagatgcagtcacatttttgaagactaaaatctattcagtagaagctcttcctgttgctgctgtaaatgtgcaaagcacacaataaagtg

SEQ ID NO: 133263 - DNA, 2586 bp, Homo sapiens
  Payload ID: 6040
  Gene Symbol: FASTKD2
  Gene Name: FAST kinase domains 2
  Uniprot ID: Q9NYY8
  ENST ID: ENST00000402774
  CDS Start-End: 367-2499
catcgcccttataagctctgtggtatccccgagccccactcctgtatgcagggaaattagtcattctccttggtaaactttcttcaagtaagtccttcagctacagccgcgaacatatgctttttgacctttgagggaatccgtaagatctcgtgagaagcgcagcttctcggggaagctgtcatggctgctcctgtacgtagtcacggtcttgtgctctaaggtgagtggaggacgagcttgggcttagcggcagcccgtatcacatcctagactttttacttcgaggagaagagtctcacgagttgtcctggaagaaaacgacagcacgtgttctttttcactagtagaagtgacgttggtttcatgttgacaactttgaagccatttggaagtgtttcagtggagagcaaaatgaataacaaagcgggctcctttttctggaaccttagacaattcagtacattagtttcaacaagcagaactatgaggctatgttgtttgggactttgcaaaccaaaaatagttcattcaaactggaacattttaaataactttcataacagaatgcaatcaactgatatcattagatatctctttcaggatgcattcatttttaaatcagatgttggctttcaaacaaagggcataagcactctaacagcccttagaattgaaagactactttatgctaaaagactgttttttgactcaaagcagtctcttgtccctgttgataaatctgatgatgaattgaagaaagtaaaccttaatcatgaagtctccaatgaagatgttcttaccaaggaaacaaaaccaaaccgtatcagcagtagaaaactgtctgaggaatgtaattccctgagtgatgtgttagatgcattttcaaaagcgcccacatttcctagtagcaactatttcacagcaatgtggacaattgccaaaagactgtctgatgaccagaagcgctttgaaaaacgactgatgtttagccaccctgcatttaatcagctctgtgaacatatgatgagagaagccaagatcatgcagtataagtacctactgttcagtcttcacgccatagtgaagcttggaatccctcagaacactattttggtgcagactttgctgagggtgacccaggaacgtatcaatgagtgtgatgagatatgcctttcagttttgtcaactgttttagaggcaatggaaccatgcaagaatgttcatgttctacgaacgggattcagaatactagttgatcagcaagtttggaaaatagaagatgtcttcacattacaagttgtgatgaagtgtattggaaaagatgcaccgattgctcttaagaggaaactggagatgaaagccttgagggaattagacagattttctgttttgaatagccaacacatgtttgaagtactagctgccatgaatcaccgatctcttatactcctggatgaatgcagtaaggtggtcctagataatatccatgggtgtcctttaagaataatgatcaacatattgcagtcctgcaaagacctccagtaccataatttggatctcttcaagggacttgcagattatgtggctgcaactttcgacatctggaagttcagaaaagttctttttatcctcattttatttgaaaaccttggctttcgacctgttggtttaatggacctgtttatgaagagaatagtagaggatcctgaatccctaaacatgaaaaacattctatctattcttcatacttactcttctctcaatcatgtctacaaatgccagaacaaagaacagttcgtggaagttatggctagtgctctgactggttatcttcacactatttcttctgaaaacttattggatgcagtatattcattttgcttgatgaattactttcccctggctccttttaatcagcttctgcaaaaagacatcatcagtgagctgctgacatcagatgacatgaagaatgcttacaagctgcatactttggatacttgtctaaaacttgatgatactgtctatctgagggacatagccttgtcactcccacagctgccgcgggagctgccatcgtcacatacaaatgcaaaggtggcagaggtgctgagcagccttctgggaggtgaaggacacttctcaaaggatgtgcacttgccacacaattatcatattgattttgaaatcagaatggacactaacaggaatcaagtgctaccactttctgatgtggatacaacttctgctacagatattcaaagagtagctgtgctatgtgtttccagatctgcttattgtttgggttcaagccaccccagaggattccttgctatgaaaatgcggcatttgaatgcaatgggttttcatgtgatcttggtcaataactgggagatggacaaactagagatggaagatgcagtcacatttttgaagactaaaatctattcagtagaagctcttcctgttgctgctgtaaatgtgcaaagcacacaataaagtgaaaatcaaccttttcatattaggagacatgcatttgtaaaaattaataaagatgacaagtcagttgtcaatggaattgagcta

SEQ ID NO: 133264 - DNA, 576 bp, Homo sapiens
  Payload ID: 6040
  Gene Symbol: FASTKD2
  Gene Name: FAST kinase domains 2
  ENST ID: ENST00000418289
  CDS Start-End: 205-576
gcgcccagcagaggttaggtgtttaaagttaggacctgaatgggttacgttgcgatacacgatcaaacatcgcccttataagctctgtggtatccccgagccccactcctgtatgcagggaaattagtcattctccttggtaaactttcttcaagaaaacgacagcacgtgttctttttcactagtagaagtgacgttggtttcatgttgacaactttgaagccatttggaagtgtttcagtggagagcaaaatgaataacaaagcgggctcctttttctggaaccttagacaattcagtacattagtttcaacaagcagaactatgaggctatgttgtttgggactttgcaaaccaaaaatagttcattcaaactggaacattttaaataactttcataacagaatgcaatcaactgatatcattagatatctctttcaggatgcattcatttttaaatcagatgttggctttcaaacaaagggcataagcactctaacagcccttagaattgaaagactactttatgctaaaagactgttttttgactcaaagcagtctcttgtccctgttgat

SEQ ID NO: 133265 - DNA, 2402 bp, Homo sapiens
  Payload ID: 6041
  Gene Symbol: FASTKD3
  Gene Name: FAST kinase domains 3
  Uniprot ID: Q14CZ7
  ENST ID: ENST00000264669
  CDS Start-End: 138-2126
ggagtgattgcccggcagagcgcgatactcgtttgtagtttcataaacattgatgttgggtcaatcatgttctcaatgtatttaaccatgtgtttttaaattttttaatttagttatcaaattgagaatctgatggtatggcattaatcaccttgaggaagaacctttatcgtttatctgattttcagatgcatagagctctggctgctttaaaaaataaacctctaaatcatgttcacaaggtagtcaaggagcgtctgtgcccttggttgtgttcacgacaacctgagcctttcggggtcaaattccatcatgcccattgtaaaaagtttcattcgaaaaatggaaatgaccttcatccactcggtggaccagtgttctctcaagtatctgactgcgacaggcttgaacaaaatgttaaaaatgaggagagtcagatgttttacaggagactgagcaacttgacttcatcagaagaagtgctaagttttataagcacgatggaaaccctgcctgacactatggcagcaggagctttacaacgaatttgtgaagtggaaaaaaaggatggtgatcaagggctgccaaaagaaatactggagaatagcatctttcaagctttatgctttcagtttgaaaaggagccctcacagctgtcaaacactagtttagtgactgctttgcaagctctgattctgttgcatgtggatcctcaaagtagcctgttgctgaacctggtggcagaatgccaaaatcgtctcagaaaaggtggcatggaagttcgcaatctttgtattcttggggaaagtctgattacactgcacagttcaggttgtgtgacactagaactcattataaatcaacttcaaggtgaaaaattggaaacatttaccccggaggatattgtggccctttatagaatcttgcaggcatgtactgaaaaagtggatgaacaccaaacatttttaaataagataaacaacttttccctatcaatagtttccaacctgagtcctaaattgattagccaaatgctcactgccctggtggttcttgatcaaagtcaagcatttcctctgattataaaattgggcaaatatgtcgtgaggcatgtcccacatttcactaacgaggagcttaggagagtcttggaggcgttcatatattttgggcaccatgacacattttttacaaaagccctagagcatcgtgtagctgcggtgtgcctcacgttggatcctgaagttgtctgcagggtcatggagtactgcagtagagaactgattctttcaaaacccatcctcaatgcagtggcagaaacttttgtttgccaaacagaaaaattttcacctcgtcagatttctgccttaatggaaccatttgggaaactcaattatttgccaccaaatgcctctgctttatttagaaagctggaaaacgtgctattcactcatttcaattattttccacccaaatcattattgaaacttcttcattcatgttcacttaatgaatgccatccagtcaactttctggcaaaaatattcaagcctcttttccttcaacggctgcaaggtaaagaatctcatttggacacattgagtcgggcacaactgacccaacttttcttagcctcagtcctggaatgccctttctataagggtccaaaactccttcctaaatatcaagtgaagtcatttcttaccccatgctgttccctggagacccctgtggattctcagctttatagatatgtgaagattgggctgactaaccttttaggagcaagattatattttgctccaaaagtgttgacaccctattgttatacaatagatgttgaaattaaattagatgaagaaggatttgtattgccatccacagctaatgaagatatccataaaaggatagcactgtgtattgatggtccaaaaaggttttgctccaatagcaaacacttactggggaaagaagctattaaacaaagacacctacagttactcggttatcaagttgttcagatcccctatcatgagattgggatgctaaaatcaagacgtgaattggtggaatatttacaaagaaaactgttttctcaaaacactgttcattggttgcaagaatgaatactgacttcagaactcaaacaatggaagaacttgcatttttatggaactcagtattaaaagaaaaatataatgtgaattagccactttgcagaatatgttctagactggtgatctgaaagcatctgtagttttccttatactatgtatacatttattgtggtaaaatttaaaattaattttaatttaatactagtgtcatagatactttttgtacatcaaacaattgatcatgtgctgtaaaggaattcaatgaataaatgttatttttaagta

SEQ ID NO: 133266 - DNA, 2229 bp, Homo sapiens
  Payload ID: 6041
  Gene Symbol: FASTKD3
  Gene Name: FAST kinase domains 3
  ENST ID: ENST00000507036
  CDS Start-End: 88-1914
tgatgttgggtcaatcatgttctcaatgtatttaaccatgtgtttttaaattttttaatttagttatcaaattgagaatctgatggtatggcattaatcaccttgaggaagaacctttatcgtttatctgattttcagatgcatagagctctggctgctttaaaaaataaacctctaaatcatgttcacaaggtagtcaaggagcgtctgtgcccttggttgtgttcacgacaacctgagcctttcggggtcaaattccatcatgcccattgtaaaaagtttcattcgaaaaatggaaatgaccttcatccactcggtggaccagtgttctctcaagtatctgactgcgacaggcttgaacaaaatgttaaaaatgaggagagtcagatgttttacaggagactgagcaacttgacttcatcagaagaagtgctaagttttataagcacgatggaaaccctgcctgacactatggcagcaggagctttacaacgaatttgtgaagtggaaaaaaaggatggtgatcaagggctgccaaaagaaatactggagaatagcatctttcaagctttatgctttcagtttgaaaaggagccctcacagctgtcaaacactagtttagtgactgctttgcaagctctgattctgttgcatgtggatcctcaaagtagcctgttgctgaacctggtggcagaatgccaaaatcgtctcagaaaaggtggcatggaagttcgcaatctttgtattcttggggaaagtctgattacactgcacagttcaggttgtgtgacactagaactcattataaatcaacttcaaggtgaaaaattggaaacatttaccccggaggatattgtggccctttatagaatcttgcaggcatgtactgaaaaagtggatgaacaccaaacatttttaaataagataaacaacttttccctatcaatagtttccaacctgagtcctaaattgattagccaaatgctcactgccctggtggttcttgatcaaagtcaagcatttcctctgattataaaattgggcaaatatgtcgtgaggcatgtcccacatttcactaacgaggagcttaggagagtcttggaggcgttcatatattttgggcaccatgacacattttttacaaaagccctagagcatcgtgtagctgcggtgtgcctcacgttggatcctgaagttgtctgcagggtcatggagtactgcagtagagaactgattctttcaaaacccatcctcaatgcagtggcagaaacttttgtttgccaaacagaaaaattttcacctcgtcagatttctgccttaatggaaccatttgggaaactcaattatttgccaccaaatgcctctgctttatttagaaagctggaaaacgtgctattcactcatttcaattattttccacccaaatcattattgaaacttcttcattcatgttcacttaatgaatgccatccagtcaactttctggcaaaaatattcaagcctcttttccttcaacggctgcaaggtaaagaatctcatttggacacattgagtcgggcacaactgacccaacttttcttagcctcagtcctggaatgccctttctataagggtccaaaactccttcctaaatatcaagtgaagtcatttcttaccccatgctgttccctggagacccctgtggattctcagctttatagatatgtgaagattgggctgactaaccttttaggagcaagattatattttgctccaaaagtgttgacaccctattgttatacaatagccttcagtccaattgatcaatgcaaggtggaaggaatcaaagcaaagcaaaggaatgaatacaggaagatagtgtttgtgagggtatcacacgaggaatttttcctttcttctctcaccagatgttgaaattaaattagatgaagaaggatttgtattgccatccacagctaatgaagatatccataaaaggatagcactgtgtattgatggtccaaaaaggttttgctccaatagcaaacacttactggggaaagaagctattaaacaaagacacctacagttactcggttatcaagttgttcagatcccctatcatgagattgggatgctaaaatcaagacgtgaattggtggaatatttacaaagaaaactgttttctcaaaacactgttcattggttgcaagaatgaatactgacttcagaactcaaacaatggaagaa

SEQ ID NO: 133267 - DNA, 597 bp, Homo sapiens
  Payload ID: 6041
  Gene Symbol: FASTKD3
  Gene Name: FAST kinase domains 3
  ENST ID: ENST00000507572
  CDS Start-End: 55-597
cacgacgcccaggcgcttccgcgaccacccggagtgattgcccggcagagcgcgatgcatagagctctggctgctttaaaaaataaacctctaaatcatgttcacaaggtagtcaaggagcgtctgtgcccttggttgtgttcacgacaacctgagcctttcggggtcaaattccatcatgcccattgtaaaaagtttcattcgaaaaatggaaatgaccttcatccactcggtggaccagtgttctctcaagtatctgactgcgacaggcttgaacaaaatgttaaaaatgaggagagtcagatgttttacaggagactgagcaacttgacttcatcagaagaagtgctaagttttataagcacgatggaaaccctgcctgacactatggcagcaggagctttacaacgaatttgtgaagtggaaaaaaaggatggtgatcaagggctgccaaaagaaatactggagaatagcatctttcaagctttatgctttcagtttgaaaaggagccctcacagctgtcaaacactagtttagtgactgctttgcaagctctgattctgttgcatgtggatcctcaaagtagcctgttgctg

SEQ ID NO: 133268 - DNA, 1551 bp, Homo sapiens
  Payload ID: 6041
  Gene Symbol: FASTKD3
  Gene Name: FAST kinase domains 3
  ENST ID: ENST00000511261
  CDS Start-End: 88-261
tgatgttgggtcaatcatgttctcaatgtatttaaccatgtgtttttaaattttttaatttagttatcaaattgagaatctgatggtatggcattaatcaccttgaggaagaacctttatcgtttatctgattttcagatgcatagagctctggctgctttaaaaaataaacctctaaatcatgttcacaaggtagtcaaggagcgtctgtgcccttggttgtgtgacactagaactcattataaatcaacttcaaggtgaaaaattggaaacatttaccccggaggatattgtggccctttatagaatcttgcaggcatgtactgaaaaagtggatgaacaccaaacatttttaaataagataaacaacttttccctatcaatagtttccaacctgagtcctaaattgattagccaaatgctcactgccctggtggttcttgatcaaagtcaagcatttcctctgattataaaattgggcaaatatgtcgtgaggcatgtcccacatttcactaacgaggagcttaggagagtcttggaggcgttcatatattttgggcaccatgacacattttttacaaaagccctagagcatcgtgtagctgcggtgtgcctcacgttggatcctgaagttgtctgcagggtcatggagtactgcagtagagaactgattctttcaaaacccatcctcaatgcagtggcagaaacttttgtttgccaaacagaaaaattttcacctcgtcagatttctgccttaatggaaccatttgggaaactcaattatttgccaccaaatgcctctgctttatttagaaagctggaaaacgtgctattcactcatttcaattattttccacccaaatcattattgaaacttcttcattcatgttcacttaatgaatgccatccagtcaactttctggcaaaaatattcaagcctcttttccttcaacggctgcaaggtaaagaatctcatttggacacattgagtcgggcacaactgacccaacttttcttagcctcagtcctggaatgccctttctataagggtccaaaactccttcctaaatatcaagtgaagtcatttcttaccccatgctgttccctggagacccctgtggattctcagctttatagatatgtgaagattgggctgactaaccttttaggagcaagattatattttgctccaaaagtgttgacaccctattgttatacaatagatgttgaaattaaattagatgaagaaggatttgtattgccatccacagctaatgaagatatccataaaaggatagcactgtgtattgatggtccaaaaaggttttgctccaatagcaaacacttactggggaaagaagctattaaacaaagacacctacagttactcggttatcaagttgttcagatcccctatcatgagattgggatgctaaaatcaagacgtgaattggtggaatatttacaaagaaaactgttttctcaaaacactgttcattggttgcaagaatgaatactgacttcagaactcaaacaatggaagaacttgca

SEQ ID NO: 133269 - DNA, 817 bp, Homo sapiens
  Payload ID: 6041
  Gene Symbol: FASTKD3
  Gene Name: FAST kinase domains 3
  ENST ID: ENST00000504695
  CDS Start-End: 84-817
aggcccacgacgcccaggcgcttccgcgaccacccggagtgattgcccggcagagcgcgttatcaaattgagaatctgatggtatggcattaatcaccttgaggaagaacctttatcgtttatctgattttcagatgcatagagctctggctgctttaaaaaataaacctctaaatcatgttcacaaggtagtcaaggagcgtctgtgcccttggttgtgttcacgacaacctgagcctttcggggtcaaattccatcatgcccattgtaaaaagtttcattcgaaaaatggaaatgaccttcatccactcggtggaccagtgttctctcaagtatctgactgcgacaggcttgaacaaaatgttaaaaatgaggagagtcagatgttttacaggagactgagcaacttgacttcatcagaagaagtgctaagttttataagcacgatggaaaccctgcctgacactatggcagcaggagctttacaacgaatttgtgaagtggaaaaaaaggatggtgatcaagggctgccaaaagaaatactggagaatagcatctttcaagctttatgctttcagtttgaaaaggagccctcacagctgtcaaacactagtttagtgactgctttgcaagctctgattctgttgcatgtggatcctcaaagtagcctgttgctgaacctggtggcagaatgccaaaatcgtctcagaaaaggtggcatggaagttcgcaatctttgtattcttggggaaagtctgattacactgcacagttcaggttgtgtgacactagaactcattataaatcaacttcaagg

SEQ ID NO: 133270 - DNA, 2874 bp, Homo sapiens
  Payload ID: 6042
  Gene Symbol: FASTKD5
  Gene Name: FAST kinase domains 5
  Uniprot ID: Q7L8L6
  ENST ID: ENST00000380266
  CDS Start-End: 323-2617
gcggaagtagcgggcagttggccggaagtggggctgtgaggctcggagtcgccggaggagccagtatctgtgtcgccgccgcccgcggcgtccccggtttggtgttgcggcgcccaccttcgggaggatcagtatctggcaccaattctgacccagtcatttgtgatccctggctcttgtgatatgctgaagatttccaggcagtttttgtggaacacctccccgtccagctctaatcaagcaccatataaacaagaaattgcctggtcaaatctgtgaggactgtattctgactgccaaagagatcaatactgacaccagaatggcagctactctcaagtcattaaaacttgtaagataccgagcattttgcagtccttctgcctttggtgcagtccgaagtgtgtcatactggaatgtgagcagcacacagcatgggggacaggaccctccagaacacattagcctctgccattctgccaaaaaagttaagaacatatgtagcaccttctcttctcggagaatcctgacaaccagcagtgcccacccaggtttggaattcagcaagacttcttcctctaaggccagtacattgcagctgggctcacccagggccacaggagttgatgaagaggacgtagaagtgtttgattcctttgaaaacatgcgagttttcctacagctaagaccagaataccgtgttcacagctataatgcatctgagacttctcagctcctgtctgtttcagaaggtgaactaattttgcacaaagtcagagttaatcaaaataatctccaggctcaagtcattgttgattatttgtgtaagctgagctctttgcctgcagagcagcatcctgtcttgctgggcagtaccagctttgctctgctctgccagctgagtgtgaagaagatacagctctttgatacccaagatctgatcaatgttttgaaagcttttgtcattttaggaatccctcactcccattcaatgctagatgtgtatgagaccaagtgttgccatcaggtatgggagatgaatatggatcagctccttttggtggctgatctctggaggtacttaggccgcaaagtacctaggtttttaaacattttttctagttatcttaatttgcactggaaggatctatccttgtctcagctagttcacttaatttatgttataggtgaaaatcgtcaggtatcccaggacctaatgcaaaaattggaatcattgatccttaaatatatagatttgatcaatttggaggaggttggtaccatctgtttggggttctttaaatcaagtactaatctctctgaatttgtcatgcggaaaattggagacttggcttgtgctaacattcagcatctgagtagtcgctccttagtgaatattgttaaaatgttccgtttcactcacgtggatcacatcaatttcatgaagcagattggagagatagctcctcagcgaattccttccctgggagttcaaggtgtcatgcacctgactctttactgctcggccttacgcttcctgaatgaaggagtaatgaatgcagtggctgcgtctttgcctcctagagtggcacactgtcgaagtaaagatgttgccaagattctgtggtcatttggaactctgaattataagccacccaatgcagaagaattttactccagcctgataagtgagattcacagaaagatgcctgaattcaaccagtacccagaacacctgcccacctgcctgctgggcctggcatttttggagtactttccagtagagttaattgatttcgctctcagtccagggtttgtcaggttagctcaggagagaactaagtttgacctccttaaggaactatataccctcgatggtacagttggcattgagtgtccagattacagaggcaatcgtcttagtactcaccttcagcaagaggggtctgaattgctgtggtatttagcagagaaggatatgaattcaaagcctgaattcttagaaactgtctttttactggagaccatgctgggggggccccagtacgtcaagcaccatatgattttgcctcatacccgatcttctgacttagaggtccagcttgatgttaacctgaagccattaccatttaatagagaagccacgccggctgaaaatgtagccaaattaaggcttgagcatgtgggagtcagccttacagatgatttgatgaataagttactaaaagggaaagcaagaggacatttccagggcaaaactgagtcagagcctgggcagcagcccatggagttggagaataaggcagctgtacctctggggggcttcctttgcaatgtagcagataaatcaggggccatggagatggctggcctgtgccccgcagcctgcatgcagaccccaagaatgaagctggctgttcagttcacaaacaggaaccagtattgctatggctccagggatctccttggactgcacaatatgaagaggcggcagctggctcggcttggctaccgtgtggtagagttatcctactgggaatggctcccactactgaaacgaactcgcttagaaaagttggcgtttcttcatgagaaagtattcacctctgctctctgaagggcatttaggggcatttctatggcaaagctataggtgtatactgtaccaggtgttgcaaaatgattataaaagccagaatgtaagtttggcgataaaatagtgtgttgaggagacttaattgtatccaaggcaggttagagctagtgtatgttactgtgaattgtaatgtagttggattgtacaaattactgcaaatgtatacatgttactcttagtaaataataaacatcttaatatgtcctacggtcaagtaa

SEQ ID NO: 133271 - DNA, 14786 bp, Homo sapiens
  Payload ID: 6043
  Gene Symbol: FAT1
  Gene Name: FAT atypical cadherin 1
  Uniprot ID: Q14517
  ENST ID: ENST00000441802
  CDS Start-End: 211-13977
agcgtgaggcgccggcgccgagctgggcggccgggcgcggggagagggcgcgggagcggctcgtgcggcaggtaccatgcggacgcgcgagcccggcgagggccccggcaggcccggtccctgctcgggggcgcgctgagacggcgggtgagctccacgagagcgccgtcgccacttcgggccaactttgcgattcccgacagttaagcaatggggagacatttggctttgctcctgcttctgctccttctcttccaacattttggagacagtgatggcagccaacgacttgaacagactcctctgcagtttacacacctcgagtacaacgtcaccgtgcaggagaactctgcagctaagacttatgtggggcatcctgtcaagatgggtgtttacattacacatccagcgtgggaagtaaggtacaaaattgtttccggagacagtgaaaacctgttcaaagctgaagagtacattctcggagacttttgctttctaagaataaggaccaaaggaggaaatacagctattcttaatagagaagtgaaggatcactacacattgatagtgaaagcacttgaaaaaaatactaatgtggaggcgcgaacaaaggtcagggtgcaggtgctggatacaaatgacttgagaccgttattctcacccacctcatacagcgtttctttacctgaaaacacagctataaggaccagtatcgcaagagtcagcgccacggatgcagacataggaaccaacggggaattttactacagttttaaagatcgaacagatatgtttgctattcacccaaccagtggtgtgatagtgttaactggtagacttgattacctagagaccaagctctatgagatggaaatcctcgctgcggaccgtggcatgaagttgtatgggagcagtggcatcagcagcatggccaagctaacggtgcacatcgaacaggccaatgaatgtgctccggtgataacagcagtgacattgtcaccatcagaactggacagggacccagcatatgcaattgtgacagtggatgactgcgatcagggtgccaatggtgacatagcatctttaagcatcgtggcaggtgaccttctccagcagtttagaacagtgaggtcctttccagggagtaaggagtataaagtcaaagccatcggtggcattgattgggacagtcatcctttcggctacaatctcacactacaggctaaagataaaggaactccgccccagttctcttctgttaaagtcattcacgtgacttctccacagttcaaagccgggccagtcaagtttgaaaaggatgtttacagagcagaaataagtgaatttgctcctcccaacacacctgtggtcatggtaaaggccattcctgcttattcccatttgaggtatgtttttaaaagtacacctggaaaagctaaattcagtttaaattacaacactggtctcatttctattttagaaccagttaaaagacagcaggcagcccattttgaacttgaagtaacaacaagtgacagaaaagcgtccaccaaggtcttggtgaaagtcttaggtgcaaatagcaatccccctgaatttacccagacagcgtacaaagctgcttttgatgagaacgtgcccattggtactactgtcatgagcctgagtgccgtagaccctgatgagggtgagaacgggtacgtgacatacagtatcgcaaatttaaatcatgtgccgtttgcgattgaccatttcactggtgccgtgagtacgtcagaaaacctggactacgaactgatgcctcgggtttatactctgaggattcgtgcatcagactggggcttgccgtaccgccgggaagtcgaagtccttgctacaattactctcaataacttgaatgacaacacacctttgtttgagaaaataaattgtgaagggacaattcccagagatctaggcgtgggagagcaaataaccactgtttctgctattgatgcagatgaacttcagttggtacagtatcagattgaagctggaaatgaactggatttctttagtttaaaccccaactcgggggtattgtcattaaagcgatcgctaatggatggcttaggtgcaaaggtgtctttccacagtctgagaatcacagctacagatggagaaaattttgccacaccattatatatcaacataacagtggctgccagtcacaagctggtaaacttgcagtgtgaagagactggtgttgccaaaatgctggcagagaagctcctgcaggcaaataaattacacaaccagggagaggtggaggatattttcttcgattctcactctgtcaatgctcacataccgcagtttagaagcactcttccgactggtattcaggtaaaggaaaaccagcctgtgggttccagtgtaattttcatgaactccactgaccttgacactggcttcaatggaaaactggtctatgctgtttctggaggaaatgaggatagttgcttcatgattgatatggaaacaggaatgctgaaaattttatctcctcttgaccgtgaaacaacagacaaatacaccctgaatattaccgtctatgaccttgggataccccagaaggctgcgtggcgtcttctacatgtcgtggttgtcgatgccaatgataatccacccgagtttttacaggagagctattttgtggaagtgagtgaagacaaggaggtacatagtgaaatcatccaggttgaagccacagataaagacctggggcccaacggacacgtgacgtactcaattgttacagacacagacacattttcaattgacagcgtgacgggtgttgttaacatcgcacgccctctggatcgagagctgcagcatgagcactccttaaagattgaggccagggaccaagccagagaagagcctcagctgttctccactgtcgttgtgaaagtatcactagaagatgttaatgacaacccacctacatttattccacctaattatcgtgtgaaagtccgagaggatcttccagaaggaaccgtcatcatgtggttagaagcccacgatcctgatttaggtcagtctggtcaggtgagatacagccttctggaccacggagaaggaaacttcgatgtggataaactcagtggagcagttaggatcgtccagcagttggactttgagaagaagcaagtgtataatctcactgtgagggccaaagacaagggaaagccagtttctctgtcttctacttgctatgttgaagttgaggtggttgatgtgaatgagaacctgcacccacccgtgttttccagctttgtggaaaaggggacagtgaaagaagatgcacctgttggttcattggtaatgacggtgtcggctcatgatgaggacgccagaagagatggggagatccgatactccattagagatggctctggcgttggtgttttcaaaataggtgaagagacaggtgtcatagagacgtcagatcgactggaccgtgaatcgacctcccattattggctaacagtctttgcaaccgatcagggtgtcgtgcctctttcatcgttcatagagatctacatagaggttgaggatgtcaatgacaatgcaccacagacatcagagcctgtttattacccagaaatcatggaaaattctcctaaagatgtatctgtggtccagatcgaggcatttgatccagattcgagctctaatgacaagctcatgtacaaaattacaagtggaaatccacaaggattcttttcaatacatcctaaaacaggtctcatcacaactacgtcaaggaagctagaccgagaacagcaagatgaacacatattagaggttactgtgacagacaatggtagtccccccaaatcaaccattgcaagagtcattgtgaaaatccttgatgaaaatgacaacaaacctcagtttctgcaaaagttctacaaaatcagactccctgagcgggaaaagccagaccgagaaagaaatgccagacgggagccgctctatcacgtcatagccaccgacaaggatgagggccccaatgcagaaatctcctacagcatcgaagacgggaatgagcatggcaaatttttcatcgaaccgaaaactggagtggtttcgtccaagaggttttcagcagctggagaatatgatattctttcaattaaggcagttgacaatggtcgccctcaaaagtcatcaaccaccagactccatattgaatggatctccaagcccaaaccgtccctggagcccatttcatttgaagaatcattttttacctttactgtgatggaaagtgaccccgttgctcacatgattggagtaatatctgtggagcctcctggcatacccctttggtttgacatcactggtggcaactacgacagtcacttcgatgtggacaagggaactggaaccatcattgttgccaaacctcttgatgcagaacagaagtcaaactacaacctcacagtcgaggctacagatggaaccaccactatcctcactcaggtattcatcaaagtaatagacacaaatgaccatcgtcctcagttttctacatcaaagtatgaagttgttattcctgaagatacagcgccagaaacagaaattttgcaaatcagtgctgtggatcaggatgagaaaaacaaactaatctacactctgcagagcagtagagatccactgagtctcaagaaatttcgtcttgatcctgcaaccggctctctctatacttctgagaaactggatcatgaagctgttcaccagcacaccctcacggtcatggtacgagatcaagatgtgcctgtaaaacgcaactttgcaaggattgtggtcaatgtcagcgacacgaatgaccacgccccgtggttcaccgcttcctcctacaaagggcgggtttatgaatcggcagccgttggctcagttgtgttgcaggtgacggctctggacaaggacaaagggaaaaatgctgaagtgctgtactcgatcgagtcaggaaatattggaaattcttttatgattgatcctgtcttgggctctattaaaactgccaaagaattagatcgaagtaaccaagcggagtatgatttaatggtaaaagctacagataagggcagtccaccaatgagtgaaataacttctgtgcgtatctttgtcacaattgctgacaacgcctctccgaagtttacatcaaaagaatattctgttgaacttagtgaaactgtcagcattgggagtttcgttgggatggttacagcccatagtcaatcatcagtggtgtatgaaataaaagatggaaatacaggtgatgcttttgatattaatccacattctggaactatcatcactcagaaagccctggactttgaaactttgcccatttacacattgataatacaaggaactaacatggctggtttgtccactaatacaacggttctagttcacttgcaggatgagaatgacaacgcgccagtttttatgcaggcagaatatacaggactcattagtgaatcagcctcaattaacagcgtggtcctaacagacaggaatgtcccactggtgattcgagcagctgatgctgataaagactcaaatgctttgcttgtatatcacattgttgaaccatctgtacacacatattttgctattgattctagcactggtgctattcatacagtactaagtctggactatgaagaaacaagtatttttcactttaccgtccaagtgcatgacatgggaaccccacgtttatttgctgagtatgcagcgaatgtaacagtacatgtaattgacattaatgactgcccccctgtgtttgccaagccattatatgaagcatctcttttgttaccaacatacaaaggagtaaaagtcatcacagtaaatgctacagatgctgattcaagtgcattctcacagttgatttactccatcaccgaaggcaacatcggggagaagttttctatggactacaagactggtgctctcactgtccaaaacacaactcagttaagaagccgctacgagctaaccgttagagcttccgatggcagatttgccggccttacctctgtcaaaattaatgtgaaagaaagcaaagaaagtcacctaaagtttacccaggatgtctactctgcggtagtgaaagagaattccaccgaggccgaaacattagctgtcattactgctattgggaatccaatcaatgagcctttgttttatcacatcctcaacccagatcgcagatttaaaataagccgcacttcaggagttctgtcaaccactggcacgcccttcgatcgtgagcagcaggaggcgtttgatgtggttgtagaagtgacagaggaacataagccttctgcagtggcccacgttgtcgtgaaggtcattgtagaagaccaaaatgataatgcgccggtgtttgtcaaccttccctactacgccgttgttaaagtggacactgaggtgggccatgtcattcgctatgtcactgctgtagacagagacagtggcagaaacggggaagtgcattactacctcaaggaacatcatgaacactttcaaattggacccttgggtgaaatttcactgaaaaagcaatttgagcttgacaccttaaataaagaatatcttgttacagtggttgcaaaagatggagggaacccggccttttcagcggaagttatcgttccgatcactgtcatgaataaagccatgcctgtgtttgaaaaacctttctacagtgcagagattgcagagagcatccaggtgcacagccctgtggtccacgtgcaggctaacagcccggaaggcctgaaagtgttctacagcatcacagacggagaccctttcagccagttcactattaacttcaatactggagttatcaatgtcatagctcctctggactttgaggcccacccggcatataagctgagcatacgcgcaactgactccttgacgggcgctcatgctgaagtatttgtggacatcatagtagacgacatcaatgataaccctcctgtgtttgctcagcagtcttatgcggtgaccctgtctgaggcatctgtaattggaacgtctgttgttcaagttagagccaccgattctgattcagaaccaaatagaggaatctcataccagatgtttgggaatcacagcaagagtcatgatcattttcatgtagacagcagcactggcctcatctcactactcagaaccctggattacgagcagtcccggcagcacacgatttttgtgagggcagttgatggtggtatgcccacgctgagcagtgatgtgattgtcacggtggacgttaccgacctcaatgataatccaccactctttgaacaacagatttatgaagccagaattagcgagcacgcccctcatgggcatttcgtgacctgtgtaaaagcctatgatgcagacagttcagacatagacaagttgcagtattccattctgtctggcaatgatcataaacattttgtcattgacagtgcaacagggattatcaccctctcaaacctgcaccggcacgccctgaagccattttacagtcttaacctgtcagtgtctgatggagtttttagaagttccacccaggttcatgtaactgtaattggaggcaatttgcacagtcctgctttccttcagaacgaatatgaagtggaactagctgaaaacgctcccctacataccctggtgatggaggtgaaaactacggatggggattctggtatttatggtcacgttacttaccatattgtaaatgactttgccaaagacagattttacataaatgagagaggacagatatttactttggaaaaacttgatcgagaaaccccggcggagaaagtgatctcagtccgtttaatggctaaggatgctggaggaaaagttgctttctgcaccgtgaatgtcatccttacagatgacaatgacaatgcaccacaatttcgagcaaccaaatacgaagtgaatatcgggtccagtgctgctaaagggacttcagtcgttaaagttcttgcaagtgatgccgatgagggctccaatgccgacatcacctatgccattgaagcagactctgaaagtgtaaaagagaatttggaaattaacaaactgtccggcgtaatcactacaaaggagagcctcattggcttggaaaatgaattcttcactttctttgttagagctgtggataatgggtctccatcaaaagaatctgttgttcttgtctatgttaaaatccttccaccggaaatgcagcttccaaaattttcagaacctttctatacctttacagtgtcagaggacgtgcctattggaacagagatagatctcatccgagcagaacatagtgggactgttctttacagcctggtcaaagggaatactccagaaagcaatagggatgagtcctttgtgattgacagacagagcgggagactgaagttggagaagagtcttgatcatgagacaactaagtggtatcagttttccatactggccaggtgcactcaagatgaccatgagatggtggcttctgtagatgttagtatccaagtgaaagatgcaaatgacaacagcccggtctttgaatctagtccatatgaggcattcattgttgaaaacctgccagggggaagtagagtaattcagatcagggcatctgatgctgactcaggaaccaacggccaagttatgtatagcctggatcagtcacaaagtgtggaagtcattgaatcctttgccattaacatggaaacaggctggattacaactttaaaggaacttgaccatgaaaagagagacaattaccagattaaagtggttgcatcagatcatggtgaaaagatccagctatcctccacagccattgtggatgttaccgtcaccgatgtcaacgatagtccaccacgattcacggccgagatctataaagggactgtgagtgaggatgacccccaaggtggggtgattgccatcttaagtaccacggatgctgattctgaagagatcaacagacaagttacatatttcataacaggaggggatcctttaggacagtttgccgttgaaactatacagaatgaatggaaggtatatgtgaagaaacctctagacagggaaaaaagggacaattaccttcttactatcacggcaactgatggcaccttctcatcaaaagcgatagttgaagtgaaagttctggatgcaaatgacaacagtccagtttgtgaaaagactttatattcagacactattcctgaagacgtccttcctggaaaattgatcatgcagatctctgctacagacgcagacatccgctctaacgctgaaattacttacacgttattgggttcaggtgcagaaaaattcaaactaaatccagacacaggtgaactgaaaacgtcaaccccccttgatcgtgaggagcaagctgtttatcatcttctcgtcagggccacagatggaggaggaagattctgccaagccagtattgtgctcacgctagaagatgtgaacgataacgcccccgaattctctgccgatccttatgccatcaccgtgtttgaaaacacagagccgggaacgctgctgacaagagtgcaggccacagatgccgacgcaggattaaatcggaagattttatactcactgattgactctgctgatgggcagttctccattaacgaattatctggaattattcagttagaaaaacctttggacagagaactccaggcagtatacaccctctctttgaaagctgtggatcaaggcttgccaaggaggctgactgccactggcactgtgattgtatcagttcttgacataaatgacaacccccctgtgtttgagtaccgtgaatatggtgccaccgtgtctgaggacattcttgttggaactgaagttcttcaagtgtatgcagcaagtcgggatattgaagcaaatgcagaaatcacctactcaataataagtggaaatgaacatgggaaattcagcatagattctaaaacaggggccgtatttatcattgagaatctggattatgagagctctcatgagtattacctaacagtagaggccactgatggaggcacgccttcactgagcgacgttgccactgtgaacgttaatgtaacagatatcaacgataatacccctgtgttcagccaagacacctacacgacagtcatcagtgaagatgccgttcttgagcagtctgtcatcacggttatggccgatgatgccgatggaccttccaacagccacatccactactcaattatagatggcaaccaaggaagctcgttcacaattgaccccgtcaggggagaagtcaaagtgaccaaacttctcgaccgagaaacgatttcaggttacacgctcacggttcaagcttctgataatggcagtccacccagagtcaacacgacgaccgtgaacatcgatgtgtccgatgtcaatgacaacgcgcccgtcttctccaggggaaactacagtgtcattatccaggaaaataagccagtgggcttcagcgtgctgcagctggtagtaacagatgaggattcttcccataacggtccacccttcttctttactattgtaactggaaatgatgagaaggcttttgaagttaacccgcaaggagtcctcctgacatcatctgccatcaagaggaaggagaaagatcattacttactgcaggtgaaggtggcagataatggaaagcctcagttgtcatctttgacatacattgacattagggtaattgaggagagcatctatccgcctgcgattttgcccctggagattttcatcacctcttctggagaagaatactcaggtggcgtcattgggaagatccatgccacagaccaggacgtgtatgatactctaacctacagtctcgaccctcagatggacaacctgttctctgtttccagcacagggggcaagctgatagcacacaaaaagctagacatagggcaataccttctcaatgtcagcgtaacagatgggaagttcacgacggtggccgacatcacagtgcatatcagacaagtcacacaggagatgttgaaccacaccatcgcgatccgctttgccaacctcactccggaagaattcgttggtgactactggcgcaacttccagcgagctttacggaacatcctgggtgtgaggaggaacgacatacagattgttagtttgcagtcctctgaacctcacccacatctggacgtcttactttttgtagagaaaccaggtagtgctcagatctcaacaaaacaacttctgcacaagattaactcttccgtgactgacattgaggaaatcattggagttaggatactgaatgtattccagaaactctgcgcgggactggactgcccctggaagttctgcgatgaaaaggtgtctgtggatgaaagtgtgatgtcaacacacagcacagccagactgagttttgtgactccccgccaccacagggcagcggtgtgtctctgcaaagagggaaggtgcccacctgtccaccatggctgtgaagatgatccgtgccctgagggatccgaatgtgtgtctgatccctgggaggagaaacacacctgtgtctgtcccagcggcaggtttggtcagtgcccagggagttcatctatgacactgactggaaacagctacgtgaaataccgtctgacggaaaatgaaaacaaattagagatgaaactgaccatgaggctcagaacatattccacgcatgcggttgtcatgtatgctcgaggaactgactatagcatcttggagattcatcatggaaggctgcagtacaagtttgactgtggaagtggccctggaattgtctctgttcagagcattcaggtcaatgatgggcagtggcacgcagtggccctggaagtgaatggaaactatgctcgcttggttctagaccaagttcatactgcatcgggcacagccccagggactctgaaaaccctgaacctggataactatgtgttttttggtggccacatccgtcagcagggaacaaggcatggaagaagtcctcaagttggtaatggtttcaggggttgtatggactccatttatttgaatgggcaggagctccctttaaacagcaaacccagaagctatgcacacatcgaagagtcggtggatgtatctccaggctgcttcctgacggccacggaagactgcgccagcaacccttgccagaatggaggcgtttgcaatccgtcacctgctggaggttattactgcaaatgcagtgccttgtacatagggacccactgtgagataagcgtcaatccgtgttcctccaagccatgcctctatgggggcacgtgtgttgtcgacaacggaggctttgtttgccagtgtagaggattatatactggtcagaggtgtcagcttagtccatactgcaaagatgaaccctgtaagaatggcggaacatgctttgacagtttggatggcgccgtttgtcagtgtgattcgggttttaggggagaaaggtgtcagagtgatatcgacgagtgctctggaaacccttgcctgcacggggccctctgtgagaacacgcacggctcctatcactgcaactgcagccacgagtacaggggacgtcactgcgaggatgctgcgcccaaccagtatgtgtccacgccgtggaacattgggttggcggaaggaattggaatcgttgtgtttgttgcagggatatttttactggtggtggtgtttgttctctgccgtaagatgattagtcggaaaaagaagcatcaggctgaacctaaagacaagcacctgggacccgctacggctttcttgcaaagaccgtattttgattccaagctaaataagaacatttactcagacataccaccccaggtgcctgtccggcctatttcctacaccccgagtattccaagtgactcaagaaacaatctggaccgaaattccttcgaaggatctgctatcccagagcatcccgaattcagcacttttaaccccgagtctgtgcacgggcaccgaaaagcagtggcggtctgcagcgtggcgccaaacctgcctcccccacccccttcaaactccccttctgacagcgactccatccagaagcctagctgggactttgactatgacacaaaagtggtggatcttgatccctgtctttccaagaagcctctagaggaaaagccttcccagccatacagtgcccgggaaagcctgtctgaagtgcagtctctgagctccttccagtccgaatcgtgcgatgacaatgggtatcactgggatacatcagattggatgccaagcgttcctctgccggacatacaagagttccccaactatgaggtgattgatgagcagacacccctgtactcagcagatccaaacgccatcgatacggactattaccctggaggctacgacatcgaaagtgattttcctccacccccagaagacttccccgcagctgatgagctaccaccgttaccgcccgaattcagcaatcagtttgaatccatccaccctcctagagacatgcctgccgcgggtagcttgggttcttcatcaagaaaccggcagaggttcaacttgaatcagtatttgcccaatttttatcccctcgatatgtctgaacctcaaacaaaaggcactggtgagaatagtacttgtagagaaccccatgccccttacccgccagggtatcaaagacacttcgaggcgcccgctgtcgagagcatgcccatgtctgtgtacgcctccaccgcctcctgctctgacgtgtcagcctgctgcgaagtggagtccgaggtcatgatgagtgactatgagagcggggacgacggccacttcgaagaggtgacgatcccgcccctggattcccagcagcacacggaagtctgactctcaactccccccaaagtgcctgactttagtgaacctagaggtgatgtgagtaatccgcgctgttctttgcagcagtgcttccaagctttttttggtgagccgaatgggcatggctgcgctggatcctgcgcctctggacgtgctagccatttccagtgtcccaactactgtcatcgtgaggttttcatcggctgtgccatttcccaacgtcttttgggatttacatctgtctgtgttaaaataatcaaacgaaaaatcagtcctgtgttgtcagcatgattcatgtatttatatagatttgattattttaattttcctgtctcttttttttgtaaattttatgtacagatttgatttttcatagttttaactagatttccaagatattttgtgcatttgtttcaactgaattttggtggtgtcagtgccattatctagcaccctgatttttttttttttactataaccagggtttcattctgtctttttccactgaagtgtgacattttgttagtacatttcagtgtagtcattcatttctagctgtacataggatgaaggagagatcagatacatgaacatgtcttacatgggttgctgtatttagaattataaacatttttcattattggaaagtgtaacggggaccttctgcatacctgtttagaaccaaaaccaccatgacacagtttttatagtgtctgtatatttgtgatgcaatggtcttgtaaaggtttttaatgaaaactaccattagccagtctttcttactgacaataaattattaataaaatacttgagcttta

SEQ ID NO: 133272 - DNA, 357 bp, Homo sapiens
  Payload ID: 6043
  Gene Symbol: FAT1
  Gene Name: FAT atypical cadherin 1
  ENST ID: ENST00000509927
  CDS Start-End: 1-357
ctttccaagaagcctctagaggaaaagccttcccagccatacagtgcccgggaaagcctgtctgaagtgcagtctctgagctccttccagtccgaatcgtgcgatgacaatgcttccatagtgaccgtaatgcaccttgtcaatgctgtggttgacacggtgagcacagaagaatctttggctgctcctgacctcagcaaaccaagagggtatcactgggatacatcagattggatgccaagcgttcctctgccggacatacaagagttccccaactatgaggtgattgatgagcagacacccctgtactcagcagatccaaacgccatcgatacggactattaccctggaggctac

SEQ ID NO: 133273 - DNA, 479 bp, Homo sapiens
  Payload ID: 6043
  Gene Symbol: FAT1
  Gene Name: FAT atypical cadherin 1
  ENST ID: ENST00000509537
  CDS Start-End: 49-207
gcctgtctgaagtgcagtctctgagctccttccagtccgaatcgtgcgatgacaatggctgtgattgtcagaaacaaggaaaagaaagtaatatttgagttttctggccaaatttctggttcctcattccgcagtcactttcctccacttccatattccattttatttgtggtacatacatttctcagccatttggaattgtcatagatactggcgtaaggacatgctgtatggctgattgggcctctggtatcactgggatacatcagattggatgccaagcgttcctctgccggacatacaagagttccccaactatgaggtgattgatgagcagacacccctgtactcagcagatccaaacgccatcgatacggactattaccctggaggctacgacatcgaaagtgattttcctccacccccagaagacttccccgcagctgatgagctaccaccgttaccgcccgaattcagca

SEQ ID NO: 133274 - DNA, 1852 bp, Homo sapiens
  Payload ID: 6043
  Gene Symbol: FAT1
  Gene Name: FAT atypical cadherin 1
  ENST ID: ENST00000509647
  CDS Start-End: 388-1852
aagggggagggagtggggaaagaggcagcgagtcgccgcagccggcggccgcaactcctcaactcggcggctggctgcctgggcacgtcctgacaaacttggctgctcccgggccctcgttccggccccgcgcactctcttttcgcctgcgtttggtgcttaagtttgccctggtcggaagcctccggagatgcggccgcctgggtcccggcggcacggacgttggcactctggttagggacatgctgaagatcccggggaggcaaagttggtacttcaaacccggctcttaacacatatctacaccgcgaggggatcacggagctgccgaggactttagagcccagggccgaggactcggctagactgattcccgacagttaagcaatggggagacatttggctttgctcctgcttctgctccttctcttccaacattttggagacagtgatggcagccaacgacttgaacagactcctctgcagtttacacacctcgagtacaacgtcaccgtgcaggagaactctgcagctaagacttatgtggggcatcctgtcaagatgggtgtttacattacacatccagcgtgggaagtaaggtacaaaattgtttccggagacagtgaaaacctgttcaaagctgaagagtacattctcggagacttttgctttctaagaataaggaccaaaggaggaaatacagctattcttaatagagaagtgaaggatcactacacattgatagtgaaagcacttgaaaaaaatactaatgtggaggcgcgaacaaaggtcagggtgcaggtgctggatacaaatgacttgagaccgttattctcacccacctcatacagcgtttctttacctgaaaacacagctataaggaccagtatcgcaagagtcagcgccacggatgcagacataggaaccaacggggaattttactacagttttaaagatcgaacagatatgtttgctattcacccaaccagtggtgtgatagtgttaactggtagacttgattacctagagaccaagctctatgagatggaaatcctcgctgcggaccgtggcatgaagttgtatgggagcagtggcatcagcagcatggccaagctaacggtgcacatcgaacaggccaatgaatgtgctccggtgataacagcagtgacattgtcaccatcagaactggacagggacccagcatatgcaattgtgacagtggatgactgcgatcagggtgccaatggtgacatagcatctttaagcatcgtggcaggtgaccttctccagcagtttagaacagtgaggtcctttccagggagtaaggagtataaagtcaaagccatcggtggcattgattgggacagtcatcctttcggctacaatctcacactacaggctaaagataaaggaactccgccccagttctcttctgttaaagtcattcacgtgacttctccacagttcaaagccgggccagtcaagtttgaaaaggatgtttacagagcagaaataagtgaatttgctcctcccaacacacctgtggtcatggtaaaggccattcctgcttattcccatttgaggtatgtttttaaaagtacacctggaaaagctaaattcagtttaaattacaacactggtctcatttctattttagaaccagttaaaagacagcaggcagcccattttgaacttgaagtaacaacaagtgacagaaaagcgtccaccaaggtcttggtgaaagtcttaggtgcaaatagcaatccccctgaatttacccagacagcgtacaaagctgcttttgatgagaacgtgcccattggtactactgtcatgagcctgagtgccgtag

SEQ ID NO: 133275 - DNA, 854 bp, Homo sapiens
  Payload ID: 6043
  Gene Symbol: FAT1
  Gene Name: FAT atypical cadherin 1
  ENST ID: ENST00000507105
  CDS Start-End: 1-854
gtcgacaacggaggctttgtttgccagtgtagaggattatatactggtcagaggtgtcagcttagtccatactgcaaagatgaaccctgtaagaatggcggaacatgctttgacagtttggatggcgccgtttgtcagtgtgattcgggttttaggggagaaaggtgtcagagtgatatcgacgagtgctctggaaacccttgcctgcacggggccctctgtgagaacacgcacggctcctatcactgcaactgcagccacgagtacaggggacgtcactgcgaggatgctgcgcccaaccacaaaagtggtggatcttgatccctgtctttccaagaagcctctagaggaaaagccttcccagccatacagtgcccgggaaagcctgtctgaagtgcagtctctgagctccttccagtccgaatcgtgcgatgacaatgggtatcactgggatacatcagattggatgccaagcgttcctctgccggacatacaagagttccccaactatgaggtgattgatgagcagacacccctgtactcagcagatccaaacgccatcgatacggactattaccctggaggctacgacatcgaaagtgattttcctccacccccagaagacttccccgcagctgatgagctaccaccgttaccgcccgaattcagcaatcagtttgaatccatccaccctcctagagacatgcctgccgcgggtagcttgggttcttcatcaagaaaccggcagaggttcaacttgaatcagtatttgcccaatttttatcccctcgatatgtctgaacctcaaacaaaaggcactggtgagaatagtacttgtagagaaccccatgccc

SEQ ID NO: 133276 - DNA, 1305 bp, Homo sapiens
  Payload ID: 6043
  Gene Symbol: FAT1
  Gene Name: FAT atypical cadherin 1
  ENST ID: ENST00000512772
  CDS Start-End: 1-1105
tgattccaagctaaataagaacatttactcagacataccaccccaggtgcctgtccggcctatttcctacaccccgagtattccaagtgactcaagaaacaatctggaccgaaattccttcgaaggatctgctatcccagagcatcccgaattcagcacttttaaccccgagtctgtgcacgggcaccgaaaagcagtggcggtctgcagcgtggcgccaaacctgcctcccccacccccttcaaactccccttctgacagcgactccatccagaagcctagctgggactttgactatgacacaaaagtggtggatcttgatccctgtctttccaagaagcctctagaggaaaagccttcccagccatacagtgcccgggaaagcctgtctgaagtgcagtctctgagctccttccagtccgaatcgtgcgatgacaatgaatctttggctgctcctgacctcagcaaaccaagagggtatcactgggatacatcagattggatgccaagcgttcctctgccggacatacaagagttccccaactatgaggtgattgatgagcagacacccctgtactcagcagatccaaacgccatcgatacggactattaccctggaggctacgacatcgaaagtgattttcctccacccccagaagacttccccgcagctgatgagctaccaccgttaccgcccgaattcagcaatcagtttgaatccatccaccctcctagagacatgcctgccgcgggtagcttgggttcttcatcaagaaaccggcagaggttcaacttgaatcagtatttgcccaatttttatcccctcgatatgtctgaacctcaaacaaaaggcactggtgagaatagtacttgtagagaaccccatgccccttacccgccagggtatcaaagacacttcgaggcgcccgctgtcgagagcatgcccatgtctgtgtacgcctccaccgcctcctgctctgacgtgtcagcctgctgcgaagtggagtccgaggtcatgatgagtgactatgagagcggggacgacggccacttcgaagaggtgacgatcccgcccctggattcccagcagcacacggaagtctgactctcaactccccccaaagtgcctgactttagtgaacctagaggtgatgtgagtaatccgcgctgttctttgcagcagtgcttccaagctttttttggtgagccgaatgggcatggctgcgctggatcctgcgcctctggacgtgctagccatttccagtgtcccaactactgtcatcgtgaggttttcatcggctgtgc

SEQ ID NO: 133277 - DNA, 14758 bp, Homo sapiens
  Payload ID: 6043
  Gene Symbol: FAT1
  Gene Name: FAT atypical cadherin 1
  ENST ID: ENST00000614102
  CDS Start-End: 189-13961
ctgggcggccgggcgcggggagagggcgcgggagcggctcgtgcggcaggtaccatgcggacgcgcgagcccggcgagggccccggcaggcccggtccctgctcgggggcgcgctgagacggcgggtgagctccacgagagcgccgtcgccacttcgggccaactttgcgattcccgacagttaagcaatggggagacatttggctttgctcctgcttctgctccttctcttccaacattttggagacagtgatggcagccaacgacttgaacagactcctctgcagtttacacacctcgagtacaacgtcaccgtgcaggagaactctgcagctaagacttatgtggggcatcctgtcaagatgggtgtttacattacacatccagcgtgggaagtaaggtacaaaattgtttccggagacagtgaaaacctgttcaaagctgaagagtacattctcggagacttttgctttctaagaataaggaccaaaggaggaaatacagctattcttaatagagaagtgaaggatcactacacattgatagtgaaagcacttgaaaaaaatactaatgtggaggcgcgaacaaaggtcagggtgcaggtgctggatacaaatgacttgagaccgttattctcacccacctcatacagcgtttctttacctgaaaacacagctataaggaccagtatcgcaagagtcagcgccacggatgcagacataggaaccaacggggaattttactacagttttaaagatcgaacagatatgtttgctattcacccaaccagtggtgtgatagtgttaactggtagacttgattacctagagaccaagctctatgagatggaaatcctcgctgcggaccgtggcatgaagttgtatgggagcagtggcatcagcagcatggccaagctaacggtgcacatcgaacaggccaatgaatgtgctccggtgataacagcagtgacattgtcaccatcagaactggacagggacccagcatatgcaattgtgacagtggatgactgcgatcagggtgccaatggtgacatagcatctttaagcatcgtggcaggtgaccttctccagcagtttagaacagtgaggtcctttccagggagtaaggagtataaagtcaaagccatcggtggcattgattgggacagtcatcctttcggctacaatctcacactacaggctaaagataaaggaactccgccccagttctcttctgttaaagtcattcacgtgacttctccacagttcaaagccgggccagtcaagtttgaaaaggatgtttacagagcagaaataagtgaatttgctcctcccaacacacctgtggtcatggtaaaggccattcctgcttattcccatttgaggtatgtttttaaaagtacacctggaaaagctaaattcagtttaaattacaacactggtctcatttctattttagaaccagttaaaagacagcaggcagcccattttgaacttgaagtaacaacaagtgacagaaaagcgtccaccaaggtcttggtgaaagtcttaggtgcaaatagcaatccccctgaatttacccagacagcgtacaaagctgcttttgatgagaacgtgcccattggtactactgtcatgagcctgagtgccgtagaccctgatgagggtgagaacgggtacgtgacatacagtatcgcaaatttaaatcatgtgccgtttgcgattgaccatttcactggtgccgtgagtacgtcagaaaacctggactacgaactgatgcctcgggtttatactctgaggattcgtgcatcagactggggcttgccgtaccgccgggaagtcgaagtccttgctacaattactctcaataacttgaatgacaacacacctttgtttgagaaaataaattgtgaagggacaattcccagagatctaggcgtgggagagcaaataaccactgtttctgctattgatgcagatgaacttcagttggtacagtatcagattgaagctggaaatgaactggatttctttagtttaaaccccaactcgggggtattgtcattaaagcgatcgctaatggatggcttaggtgcaaaggtgtctttccacagtctgagaatcacagctacagatggagaaaattttgccacaccattatatatcaacataacagtggctgccagtcacaagctggtaaacttgcagtgtgaagagactggtgttgccaaaatgctggcagagaagctcctgcaggcaaataaattacacaaccagggagaggtggaggatattttcttcgattctcactctgtcaatgctcacataccgcagtttagaagcactcttccgactggtattcaggtaaaggaaaaccagcctgtgggttccagtgtaattttcatgaactccactgaccttgacactggcttcaatggaaaactggtctatgctgtttctggaggaaatgaggatagttgcttcatgattgatatggaaacaggaatgctgaaaattttatctcctcttgaccgtgaaacaacagacaaatacaccctgaatattaccgtctatgaccttgggataccccagaaggctgcgtggcgtcttctacatgtcgtggttgtcgatgccaatgataatccacccgagtttttacaggagagctattttgtggaagtgagtgaagacaaggaggtacatagtgaaatcatccaggttgaagccacagataaagacctggggcccaacggacacgtgacgtactcaattgttacagacacagacacattttcaattgacagcgtgacgggtgttgttaacatcgcacgccctctggatcgagagctgcagcatgagcactccttaaagattgaggccagggaccaagccagagaagagcctcagctgttctccactgtcgttgtgaaagtatcactagaagatgttaatgacaacccacctacatttattccacctaattatcgtgtgaaagtccgagaggatcttccagaaggaaccgtcatcatgtggttagaagcccacgatcctgatttaggtcagtctggtcaggtgagatacagccttctggaccacggagaaggaaacttcgatgtggataaactcagtggagcagttaggatcgtccagcagttggactttgagaagaagcaagtgtataatctcactgtgagggccaaagacaagggaaagccagtttctctgtcttctacttgctatgttgaagttgaggtggttgatgtgaatgagaacctgcacccacccgtgttttccagctttgtggaaaaggggacagtgaaagaagatgcacctgttggttcattggtaatgacggtgtcggctcatgatgaggacgccagaagagatggggagatccgatactccattagagatggctctggcgttggtgttttcaaaataggtgaagagacaggtgtcatagagacgtcagatcgactggaccgtgaatcgacctcccattattggctaacagtctttgcaaccgatcagggtgtcgtgcctctttcatcgttcatagagatctacatagaggttgaggatgtcaatgacaatgcaccacagacatcagagcctgtttattacccagaaatcatggaaaattctcctaaagatgtatctgtggtccagatcgaggcatttgatccagattcgagctctaatgacaagctcatgtacaaaattacaagtggaaatccacaaggattcttttcaatacatcctaaaacaggtctcatcacaactacgtcaaggaagctagaccgagaacagcaagatgaacacatattagaggttactgtgacagacaatggtagtccccccaaatcaaccattgcaagagtcattgtgaaaatccttgatgaaaatgacaacaaacctcagtttctgcaaaagttctacaaaatcagactccctgagcgggaaaagccagaccgagaaagaaatgccagacgggagccgctctatcacgtcatagccaccgacaaggatgagggccccaatgcagaaatctcctacagcatcgaagacgggaatgagcatggcaaatttttcatcgaaccgaaaactggagtggtttcgtccaagaggttttcagcagctggagaatatgatattctttcaattaaggcagttgacaatggtcgccctcaaaagtcatcaaccaccagactccatattgaatggatctccaagcccaaaccgtccctggagcccatttcatttgaagaatcattttttacctttactgtgatggaaagtgaccccgttgctcacatgattggagtaatatctgtggagcctcctggcatacccctttggtttgacatcactggtggcaactacgacagtcacttcgatgtggacaagggaactggaaccatcattgttgccaaacctcttgatgcagaacagaagtcaaactacaacctcacagtcgaggctacagatggaaccaccactatcctcactcaggtattcatcaaagtaatagacacaaatgaccatcgtcctcagttttctacatcaaagtatgaagttgttattcctgaagatacagcgccagaaacagaaattttgcaaatcagtgctgtggatcaggatgagaaaaacaaactaatctacactctgcagagcagtagagatccactgagtctcaagaaatttcgtcttgatcctgcaaccggctctctctatacttctgagaaactggatcatgaagctgttccagcacacctcacggtcatggtacgagatcaagatgtgcctgtaaaacgcaactttgcaaggattgtggtcaatgtcagcgacacgaatgaccacgccccgtggttcaccgcttcctcctacaaagggcgggtttatgaatcggcagccgttggctcagttgtgttgcaggtgacggctctggacaaggacaaagggaaaaatgctgaagtgctgtactcgatcgagtcaggtacttttggaaatattggaaattcttttatgattgatcctgtcttgggctctattaaaactgccaaagaattagatcgaagtaaccaagcggagtatgatttaatggtaaaagctacagataagggcagtccaccaatgagtgaaataacttctgtgcgtatctttgtcacaattgctgacaacgcctctccgaagtttacatcaaaagaatattctgttgaacttagtgaaactgtcagcattgggagtttcgttgggatggttacagcccatagtcaatcatcagtggtgtatgaaataaaagatggaaatacaggtgatgcttttgatattaatccacattctggaactatcatcactcagaaagccctggactttgaaactttgcccatttacacattgataatacaaggaactaacatggctggtttgtccactaatacaacggttctagttcacttgcaggatgagaatgacaacgcgccagtttttatgcaggcagaatatacaggactcattagtgaatcagcctcaattaacagcgtggtcctaacagacaggaatgtcccactggtgattcgagcagctgatgctgataaagactcaaatgctttgcttgtatatcacattgttgaaccatctgtacacacatattttgctattgattctagcactggtgctattcatacagtactaagtctggactatgaagaaacaagtatttttcactttaccgtccaagtgcatgacatgggaaccccacgtttatttgctgagtatgcagcgaatgtaacagtacatgtaattgacattaatgactgcccccctgtgtttgccaagccattatatgaagcatctcttttgttaccaacatacaaaggagtaaaagtcatcacagtaaatgctacagatgctgattcaagtgcattctcacagttgatttactccatcaccgaaggcaacatcggggagaagttttctatggactacaagactggtgctctcactgtccaaaacacaactcagttaagaagccgctacgagctaaccgttagagcttccgatggcagatttgccggccttacctctgtcaaaattaatgtgaaagaaagcaaagaaagtcacctaaagtttacccaggatgtctactctgcggtagtgaaagagaattccaccgaggccgaaacattagctgtcattactgctattgggaatccaatcaatgagcctttgttttatcacatcctcaacccagatcgcagatttaaaataagccgcacttcaggagttctgtcaaccactggcacgcccttcgatcgtgagcagcaggaggcgtttgatgtggttgtagaagtgacagaggaacataagccttctgcagtggcccacgttgtcgtgaaggtcattgtagaagaccaaaatgataatgcgccggtgtttgtcaaccttccctactacgccgttgttaaagtggacactgaggtgggccatgtcattcgctatgtcactgctgtagacagagacagtggcagaaacggggaagtgcattactacctcaaggaacatcatgaacactttcaaattggacccttgggtgaaatttcactgaaaaagcaatttgagcttgacaccttaaataaagaatatcttgttacagtggttgcaaaagatggagggaacccggccttttcagcggaagttatcgttccgatcactgtcatgaataaagccatgcctgtgtttgaaaaacctttctacagtgcagagattgcagagagcatccaggtgcacagccctgtggtccacgtgcaggctaacagcccggaaggcctgaaagtgttctacagcatcacagacggagaccctttcagccagttcactattaacttcaatactggagttatcaatgtcatagctcctctggactttgaggcccacccggcatataagctgagcatacgcgcaactgactccttgacgggcgctcatgctgaagtatttgtggacatcatagtagacgacatcaatgataaccctcctgtgtttgctcagcagtcttatgcggtgaccctgtctgaggcatctgtaattggaacgtctgttgttcaagttagagccaccgattctgattcagaaccaaatagaggaatctcataccagatgtttgggaatcacagcaagagtcatgatcattttcatgtagacagcagcactggcctcatctcactactcagaaccctggattacgagcagtcccggcagcacacgatttttgtgagggcagttgatggtggtatgcccacgctgagcagtgatgtgattgtcacggtggacgttaccgacctcaatgataatccaccactctttgaacaacagatttatgaagccagaattagcgagcacgcccctcatgggcatttcgtgacctgtgtaaaagcctatgatgcagacagttcagacatagacaagttgcagtattccattctgtctggcaatgatcataaacattttgtcattgacagtgcaacagggattatcaccctctcaaacctgcaccggcacgccctgaagccattttacagtcttaacctgtcagtgtctgatggagtttttagaagttccacccaggttcatgtaactgtaattggaggcaatttgcacagtcctgctttccttcagaacgaatatgaagtggaactagctgaaaacgctcccctacataccctggtgatggaggtgaaaactacggatggggattctggtatttatggtcacgttacttaccatattgtaaatgactttgccaaagacagattttacataaatgagagaggacagatatttactttggaaaaacttgatcgagaaaccccggcggagaaagtgatctcagtccgtttaatggctaaggatgctggaggaaaagttgctttctgcaccgtgaatgtcatccttacagatgacaatgacaatgcaccacaatttcgagcaaccaaatacgaagtgaatatcgggtccagtgctgctaaagggacttcagtcgttaaagttcttgcaagtgatgccgatgagggctccaatgccgacatcacctatgccattgaagcagactctgaaagtgtaaaagagaatttggaaattaacaaactgtccggcgtaatcactacaaaggagagcctcattggcttggaaaatgaattcttcactttctttgttagagctgtggataatgggtctccatcaaaagaatctgttgttcttgtctatgttaaaatccttccaccggaaatgcagcttccaaaattttcagaacctttctatacctttacagtgtcagaggacgtgcctattggaacagagatagatctcatccgagcagaacatagtgggactgttctttacagcctggtcaaagggaatactccagaaagcaatagggatgagtcctttgtgattgacagacagagcgggagactgaagttggagaagagtcttgatcatgagacaactaagtggtatcagttttccatactggccaggtgcactcaagatgaccatgagatggtggcttctgtagatgttagtatccaagtgaaagatgcaaatgacaacagcccggtctttgaatctagtccatatgaggcattcattgttgaaaacctgccagggggaagtagagtaattcagatcagggcatctgatgctgactcaggaaccaacggccaagttatgtatagcctggatcagtcacaaagtgtggaagtcattgaatcctttgccattaacatggaaacaggctggattacaactttaaaggaacttgaccatgaaaagagagacaattaccagattaaagtggttgcatcagatcatggtgaaaagatccagctatcctccacagccattgtggatgttaccgtcaccgatgtcaacgatagtccaccacgattcacggccgagatctataaagggactgtgagtgaggatgacccccaaggtggggtgattgccatcttaagtaccacggatgctgattctgaagagatcaacagacaagttacatatttcataacaggaggggatcctttaggacagtttgccgttgaaactatacagaatgaatggaaggtatatgtgaagaaacctctagacagggaaaaaagggacaattaccttcttactatcacggcaactgatggcaccttctcatcaaaagcgatagttgaagtgaaagttctggatgcaaatgacaacagtccagtttgtgaaaagactttatattcagacactattcctgaagacgtccttcctggaaaattgatcatgcagatctctgctacagacgcagacatccgctctaacgctgaaattacttacacgttattgggttcaggtgcagaaaaattcaaactaaatccagacacaggtgaactgaaaacgtcaaccccccttgatcgtgaggagcaagctgtttatcatcttctcgtcagggccacagatggaggaggaagattctgccaagccagtattgtgctcacgctagaagatgtgaacgataacgcccccgaattctctgccgatccttatgccatcaccgtgtttgaaaacacagagccgggaacgctgctgacaagagtgcaggccacagatgccgacgcaggattaaatcggaagattttatactcactgattgactctgctgatgggcagttctccattaacgaattatctggaattattcagttagaaaaacctttggacagagaactccaggcagtatacaccctctctttgaaagctgtggatcaaggcttgccaaggaggctgactgccactggcactgtgattgtatcagttcttgacataaatgacaacccccctgtgtttgagtaccgtgaatatggtgccaccgtgtctgaggacattcttgttggaactgaagttcttcaagtgtatgcagcaagtcgggatattgaagcaaatgcagaaatcacctactcaataataagtggaaatgaacatgggaaattcagcatagattctaaaacaggggccgtatttatcattgagaatctggattatgagagctctcatgagtattacctaacagtagaggccactgatggaggcacgccttcactgagcgacgttgccactgtgaacgttaatgtaacagatatcaacgataatacccctgtgttcagccaagacacctacacgacagtcatcagtgaagatgccgttcttgagcagtctgtcatcacggttatggccgatgatgccgatggaccttccaacagccacatccactactcaattatagatggcaaccaaggaagctcgttcacaattgaccccgtcaggggagaagtcaaagtgaccaaacttctcgaccgagaaacgatttcaggttacacgctcacggttcaagcttctgataatggcagtccacccagagtcaacacgacgaccgtgaacatcgatgtgtccgatgtcaatgacaacgcgcccgtcttctccaggggaaactacagtgtcattatccaggaaaataagccagtgggcttcagcgtgctgcagctggtagtaacagatgaggattcttcccataacggtccacccttcttctttactattgtaactggaaatgatgagaaggcttttgaagttaacccgcaaggagtcctcctgacatcatctgccatcaagaggaaggagaaagatcattacttactgcaggtgaaggtggcagataatggaaagcctcagttgtcatctttgacatacattgacattagggtaattgaggagagcatctatccgcctgcgattttgcccctggagattttcatcacctcttctggagaagaatactcaggtggcgtcattgggaagatccatgccacagaccaggacgtgtatgatactctaacctacagtctcgaccctcagatggacaacctgttctctgtttccagcacagggggcaagctgatagcacacaaaaagctagacatagggcaataccttctcaatgtcagcgtaacagatgggaagttcacgacggtggccgacatcacagtgcatatcagacaagtcacacaggagatgttgaaccacaccatcgcgatccgctttgccaacctcactccggaagaattcgttggtgactactggcgcaacttccagcgagctttacggaacatcctgggtgtgaggaggaacgacatacagattgttagtttgcagtcctctgaacctcacccacatctggacgtcttactttttgtagagaaaccaggtagtgctcagatctcaacaaaacaacttctgcacaagattaactcttccgtgactgacattgaggaaatcattggagttaggatactgaatgtattccagaaactctgcgcgggactggactgcccctggaagttctgcgatgaaaaggtgtctgtggatgaaagtgtgatgtcaacacacagcacagccagactgagttttgtgactccccgccaccacagggcagcggtgtgtctctgcaaagagggaaggtgcccacctgtccaccatggctgtgaagatgatccgtgccctgagggatccgaatgtgtgtctgatccctgggaggagaaacacacctgtgtctgtcccagcggcaggtttggtcagtgcccagggagttcatctatgacactgactggaaacagctacgtgaaataccgtctgacggaaaatgaaaacaaattagagatgaaactgaccatgaggctcagaacatattccacgcatgcggttgtcatgtatgctcgaggaactgactatagcatcttggagattcatcatggaaggctgcagtacaagtttgactgtggaagtggccctggaattgtctctgttcagagcattcaggtcaatgatgggcagtggcacgcagtggccctggaagtgaatggaaactatgctcgcttggttctagaccaagttcatactgcatcgggcacagccccagggactctgaaaaccctgaacctggataactatgtgttttttggtggccacatccgtcagcagggaacaaggcatggaagaagtcctcaagttggtaatggtttcaggggttgtatggactccatttatttgaatgggcaggagctccctttaaacagcaaacccagaagctatgcacacatcgaagagtcggtggatgtatctccaggctgcttcctgacggccacggaagactgcgccagcaacccttgccagaatggaggcgtttgcaatccgtcacctgctggaggttattactgcaaatgcagtgccttgtacatagggacccactgtgagataagcgtcaatccgtgttcctccaagccatgcctctatgggggcacgtgtgttgtcgacaacggaggctttgtttgccagtgtagaggattatatactggtcagaggtgtcagcttagtccatactgcaaagatgaaccctgtaagaatggcggaacatgctttgacagtttggatggcgccgtttgtcagtgtgattcgggttttaggggagaaaggtgtcagagtgatatcgacgagtgctctggaaacccttgcctgcacggggccctctgtgagaacacgcacggctcctatcactgcaactgcagccacgagtacaggggacgtcactgcgaggatgctgcgcccaaccagtatgtgtccacgccgtggaacattgggttggcggaaggaattggaatcgttgtgtttgttgcagggatatttttactggtggtggtgtttgttctctgccgtaagatgattagtcggaaaaagaagcatcaggctgaacctaaagacaagcacctgggacccgctacggctttcttgcaaagaccgtattttgattccaagctaaataagaacatttactcagacataccaccccaggtgcctgtccggcctatttcctacaccccgagtattccaagtgactcaagaaacaatctggaccgaaattccttcgaaggatctgctatcccagagcatcccgaattcagcacttttaaccccgagtctgtgcacgggcaccgaaaagcagtggcggtctgcagcgtggcgccaaacctgcctcccccacccccttcaaactccccttctgacagcgactccatccagaagcctagctgggactttgactatgacacaaaagtggtggatcttgatccctgtctttccaagaagcctctagaggaaaagccttcccagccatacagtgcccgggaaagcctgtctgaagtgcagtctctgagctccttccagtccgaatcgtgcgatgacaatgggtatcactgggatacatcagattggatgccaagcgttcctctgccggacatacaagagttccccaactatgaggtgattgatgagcagacacccctgtactcagcagatccaaacgccatcgatacggactattaccctggaggctacgacatcgaaagtgattttcctccacccccagaagacttccccgcagctgatgagctaccaccgttaccgcccgaattcagcaatcagtttgaatccatccaccctcctagagacatgcctgccgcgggtagcttgggttcttcatcaagaaaccggcagaggttcaacttgaatcagtatttgcccaatttttatcccctcgatatgtctgaacctcaaacaaaaggcactggtgagaatagtacttgtagagaaccccatgccccttacccgccagggtatcaaagacacttcgaggcgcccgctgtcgagagcatgcccatgtctgtgtacgcctccaccgcctcctgctctgacgtgtcagcctgctgcgaagtggagtccgaggtcatgatgagtgactatgagagcggggacgacggccacttcgaagaggtgacgatcccgcccctggattcccagcagcacacggaagtctgactctcaactccccccaaagtgcctgactttagtgaacctagaggtgatgtgagtaatccgcgctgttctttgcagcagtgcttccaagctttttttggtgagccgaatgggcatggctgcgctggatcctgcgcctctggacgtgctagccatttccagtgtcccaactactgtcatcgtgaggttttcatcggctgtgccatttcccaacgtcttttgggatttacatctgtctgtgttaaaataatcaaacgaaaaatcagtcctgtgttgtcagcatgattcatgtatttatatagatttgattattttaattttcctgtctcttttttttgtaaattttatgtacagatttgatttttcatagttttaactagatttccaagatattttgtgcatttgtttcaactgaattttggtggtgtcagtgccattatctagcaccctgatttttttttttttactataaccagggtttcattctgtctttttccactgaagtgtgacattttgttagtacatttcagtgtagtcattcatttctagctgtacataggatgaaggagagatcagatacatgaacatgtcttacatgggttgctgtatttagaattataaacatttttcattattggaaagtgtaacggggaccttctgcatacctgtttagaaccaaaaccaccatgacacagtttttatagtgtctgtatatttgtgatgcaatggtcttgtaaaggtttttaatgaaaactaccattagccagtctttcttactgacaataaattattaataaaat

SEQ ID NO: 133278 - DNA, 14534 bp, Homo sapiens
  Payload ID: 6044
  Gene Symbol: FAT2
  Gene Name: FAT atypical cadherin 2
  Uniprot ID: Q9NYQ8
  ENST ID: ENST00000261800
  CDS Start-End: 14-13063
ggagttttccaccatgactattgccctgctgggttttgccatattcttgctccattgtgcgacctgtgagaagcctctagaagggattctctcctcctctgcttggcacttcacacactcccattacaatgccaccatctatgaaaattcttctcccaagacctatgtggagagcttcgagaaaatgggcatctacctcgcggagccacagtgggcagtgaggtaccggatcatctctggggatgtggccaatgtatttaaaactgaggagtatgtggtgggcaacttctgcttcctaagaataaggacaaagagcagcaacacagctcttctgaacagagaggtgcgagacagctacaccctcatcatccaagccacagagaagaccttggagttggaagctttgacccgtgtggtggtccacatcctggaccagaatgacctgaagcctctcttctctccaccttcgtacagagtcaccatctctgaggacatgcccctgaagagccccatctgcaaggtgactgccacagatgctgatctaggccagaatgctgagttctattatgcctttaacacaaggtcagagatgtttgccatccatcccaccagcggtgtggtcactgtggctgggaagcttaacgtcacctggcgaggaaagcatgagctccaggtgctagctgtggaccgcatgcggaaaatctctgagggcaatgggtttggcagcctggctgcacttgtggttcatgtggagcctgccctcaggaagcccccagccattgcttcggtggtggtgactccaccagacagcaatgatggtaccacctatgccactgtactggtcgatgcaaatagctcaggagctgaagtggagtcagtggaagttgttggtggtgaccctggaaagcacttcaaagccatcaagtcttatgcccggagcaatgagttcagtttggtgtctgtcaaagacatcaactggatggagtaccttcatgggttcaacctcagcctccaggccaggagtgggagcggcccttatttttattcccagatcaggggctttcacctaccaccttccaaactgtcttccctcaaattcgagaaggctgtttacagagtgcagcttagtgagttttcccctcctggcagccgcgtggtgatggtgagagtcaccccagccttccccaacctgcagtatgttctaaagccatcttcagagaatgtaggatttaaacttaatgctcgaactgggttgatcaccaccacaaagctcatggacttccacgacagagcccactatcagctacacatcagaacctcaccgggccaggcctccaccgtggtggtcattgacattgtggactgcaacaaccatgcccccctcttcaacaggtcttcctatgatggtaccttggatgagaacatccctccaggcaccagtgttttggctgtgactgccactgaccgggatcatggggaaaatggatatgtcacctattccattgctggaccaaaagctttgccattttctattgacccctacctggggatcatctccacctccaaacccatggactatgaactcatgaaaagaatttataccttccgggtaagagcatcagactggggatccccttttcgccgggagaaggaagtgtccatttttcttcagctcaggaacttgaatgacaaccagcctatgtttgaagaagtcaactgtacagggtctatccgccaagactggccagtagggaaatcgataatgactatgtcagccatagatgtggatgagcttcagaacctaaaatacgagattgtatcaggcaatgaactagagtattttgatctaaatcatttctccggagtgatatccctcaaacgcccttttatcaatcttactgctggtcaacccaccagttattccctgaagattacagcctcagatggcaaaaactatgcctcacccacaactttgaatattactgtggtgaaggaccctcattttgaagttcctgtaacatgtgataaaacaggggtattgacacaattcacaaagactatcctccactttattgggcttcagaaccaggagtccagtgatgaggaattcacttctttaagcacatatcagattaatcattacaccccacagtttgaggaccacttcccccaatccattgatgtccttgagagtgtccctatcaacacccccttggcccgcctagcagccactgaccctgatgctggttttaatggcaaactggtctatgtgattgcagatggcaatgaggagggctgctttgacatagagctggagacagggctgctcactgtagctgctcccttggactatgaagccaccaatttctacatcctcaatgtaacagtatatgacctgggcacaccccagaagtcctcctggaagctgctgacagtgaatgtgaaagactggaatgacaacgcacccagatttcctcccggtgggtaccagttaaccatctcggaggacacagaagttggaaccacaattgcagagctgacaaccaaagatgctgactcggaagacaatggcagggttcgctacaccctgctaagtcccacagagaagttctccctccaccctctcactggggaactggttgttacaggacacctggaccgcgaatcagagcctcggtacatactcaaggtggaggccagggatcagcccagcaaaggccaccagctcttctctgtcactgacctgataatcacattggaggatgtcaacgacaactctccccagtgcatcacagaacacaacaggctgaaggttccagaggacctgccccccgggactgtcttgacatttctggatgcctctgatcctgacctgggccccgcaggtgaagtgcgatatgttctgatggatggcgcccatgggaccttccgggtggacctgatgacaggggcgctcattctggagagagagctggactttgagaggcgagctgggtacaatctgagcctgtgggccagtgatggtgggaggcccctagcccgcaggactctctgccatgtggaggtgatcgtcctggatgtgaatgagaatctccaccctccccactttgcctccttcgtgcaccagggccaggtgcaggagaacagcccctcgggaactcaggtgattgtagtggctgcccaggacgatgacagtggcttggatggggagctccagtacttcctgcgtgctggcactggactcgcagccttcagcatcaaccaagatacaggaatgattcagactctggcacccctggaccgagaatttgcatcttactactggttgacggtattagcagtggacaggggttctgtgcccctctcttctgtaactgaagtctacatcgaggttacggatgccaatgacaacccaccccagatgtcccaagctgtgttctacccctccatccaggaggatgctcccgtgggcacctctgtgcttcaactggatgcctgggacccagactccagctccaaagggaagctgaccttcaacatcaccagtgggaactacatgggattctttatgattcaccctgttacaggtctcctatctacagcccagcagctggacagagagaacaaggatgaacacatcctggaggtgactgtgctggacaatggggaaccctcactgaagtccacctccagggtggtggtaggcatcttggacgtcaatgacaatccacctatattctcccacaagctcttcaatgtccgccttccagagaggctgagccctgtgtcccctgggcctgtgtacaggctggtggcttcagacctggatgagggtcttaatggcagagtcacctacagtatcgaggacagcgatgaggaggccttcagtatcgacctggtcacaggtgtggtttcatccagcagcacttttacagctggagagtacaacatcctaacgatcaaggcaacagacagtgggcagccaccactctcagccagtgtccggctacacattgagtggatcccttggccccggccgtcctccatccctctggcctttgatgagacctactacagctttacggtcatggagacggaccctgtgaaccacatggtgggggtcatcagcgtagagggcagacccggactcttctggttcaacatctcaggtggggataaggacatggactttgacattgagaagaccacaggcagcatcgtcattgccaggcctcttgataccaggagaaggtcgaactataacttgactgttgaggtgacagatgggtcccgcaccattgccacacaggtccacatcttcatgattgccaacattaaccaccatcggccccagtttctggaaactcgttatgaagtcagagttccccaggacaccgtgccaggggtagagctcctgcgagtccaggccatagatcaagacaagggcaaaagcctcatctataccatacatggcagccaagacccaggaagtgccagcctcttccagctggacccaagcagtggtgtcctggtaacggtgggaaaattggacctcggctcggggccctcccagcacacactgacagtcatggtccgagaccaggaaatacctatcaagaggaacttcgtgtgggtgaccattcatgtggaggatggaaacctccacccaccccgcttcactcagctccattatgaggcaagtgttcctgacaccatagcccccggcacagagctgctgcaggtccgagccatggatgctgaccggggagtcaatgctgaggtccactactccctcctgaaagggaacagcgaaggtttcttcaacatcaatgccctgctaggcatcattactctagctcaaaagcttgatcaggcaaatcatgccccacatactctgacagtgaaggcagaagatcaaggctccccacaatggcatgacctggctacagtgatcattcatgtctatccctcagataggagtgcccccatcttttcaaaatctgagtactttgtagagatccctgaatcaatccctgttggttccccaatcctccttgtctctgctatgagcccctctgaagttacctatgagttaagagagggaaataaggatggagtcttctctatgaactcatattctggccttatttccacccagaagaaattggaccatgagaaaatctcgtcttaccagctgaaaatccgaggcagcaatatggcaggtgcatttactgatgtcatggtggtggttgacataattgatgaaaatgacaatgctcctatgttcttaaagtcaacttttgtgggccaaattagtgaagcagctccactgtatagcatgatcatggataaaaacaacaacccctttgtgattcatgcctctgacagtgacaaagaagctaattccttgttggtctataaaattttggagccggaggccttgaagtttttcaaaattgatcccagcatgggaaccctaaccattgtatcagagatggattatgagagcatgccctctttccaattctgtgtctatgtccatgaccaaggaagccctgtattatttgcacccagacctgcccaagtcatcattcatgtcagagatgtgaatgattcccctcccagattctcagaacagatatatgaggtagcaatagtcgggcctatccatccaggcatggagcttctcatggtgcgggccagcgatgaagactcagaagtcaattatagcatcaaaactggcaatgctgatgaagctgttaccatccatcctgtcactggtagcatatctgtgctgaatcctgctttcctgggactctctcggaagctcaccatcagggcttctgatggcttgtatcaagacactgcgctggtaaaaatttctttgacccaagtgcttgacaaaagcttgcagtttgatcaggatgtctactgggcagctgtgaaggagaacttgcaggacagaaaggcactggtgattcttggtgcccagggcaatcatttgaatgacaccctttcctactttctcttgaatggcacagatatgtttcatatggtccagtcagcaggtgtgttgcagacaagaggtgtggcgtttgaccgggagcagcaggacactcatgagttggcagtggaagtgagggacaatcggacacctcagcgggtggctcagggtttggtcagagtctctattgaggatgtcaatgacaatccccccaaatttaagcatctgccctattacacaatcatccaagatggcacagagccaggggatgtcctctttcaggtatctgccactgatgaggacttggggacaaatggggctgttacatatgaatttgcagaagattacacatatttccgaattgacccctatcttggggacatatcactcaagaaaccctttgattatcaagctttaaataaatatcacctcaaagtcattgctcgggatggaggaacgccatccctccagagtgaggaagaggtacttgtcactgtgagaaataaatccaacccactgtttcagagtccttattacaaagtcagagtacctgaaaatatcaccctctataccccaattctccacacccaggcccggagtccagagggactccggctcatctacaacattgtggaggaagaacccttgatgctgttcaccactgacttcaagactggtgtcctaacagtaacagggcctttggactatgagtccaagaccaaacatgtgttcacagtcagagccacggatacagctctggggtcattttctgaagccacagtggaagtcctagtggaggatgtcaatgataaccctcccactttttcccaattggtctataccacttccatctcagaaggcttgcctgctcagacccctgtgatccaactgttggcttctgaccaggactcagggcggaaccgtgacgtctcttatcagattgtggaggatggctcagatgtttccaagttcttccagatcaatgggagcacaggggagatgtccacagttcaagaactggattatgaagcccaacaacactttcatgtgaaagtcagggccatggataaaggagatcccccactcactggtgaaacccttgtggttgtcaatgtgtctgatatcaatgacaaccccccagagttcagacaacctcaatatgaagccaatgtcagtgaactggcaacctgtggacacctggttcttaaagtccaggctattgaccctgacagcagagacacctcccgcctggagtacctgattctttctggcaatcaggacaggcacttcttcattaacagctcatcgggaataatttctatgttcaacctttgcaaaaagcacctggactcttcttacaatttgagggtaggtgcttctgatggagtcttccgagcaactgtgcctgtgtacatcaacactacaaatgccaacaagtacagcccagagttccagcagcacctttatgaggcagaattagcagagaatgcaatggttggaaccaaggtgattgatttgctagccatagacaaagatagtggtccctatggcactatagattatactatcatcaataaactagcaagtgagaagttctccataaaccccaatggccagattgccactctgcagaaactggatcgggaaaattcaacagagagagtcattgctattaaggtcatggctcgggatggaggaggaagagtagccttctgcacggtgaagatcatcctcacagatgaaaatgacaaccccccacagttcaaagcatctgagtacacagtatccattcaatccaatgtcagtaaagactctccggttatccaggtgttggcctatgatgcagatgaaggtcagaacgcagatgtcacctactcagtgaacccagaggacctagttaaagatgtcattgaaattaacccagtcactggtgtggtcaaggtgaaagacagcctggtgggattggaaaatcagacccttgacttcttcatcaaagcccaagatggaggccctcctcactggaactctctggtgccagtacgacttcaggtggttcctaaaaaagtatccttaccgaaattttctgaacctttgtatactttctctgcacctgaagaccttccagaggggtctgaaattgggattgttaaagcagtggcagctcaagatccagtcatctacagtctagtgcggggcactacacctgagagcaacaaggatggtgtcttctccctagacccagacacaggggtcataaaggtgaggaagcccatggaccacgaatccaccaaattgtaccagattgatgtgatggcacattgccttcagaacactgatgtggtgtccttggtctctgtcaacatccaagtgggagacgtcaatgacaataggcctgtatttgaggctgatccatataaggctgtcctcactgagaatatgccagtggggacctcagtcattcaagtgactgccattgacaaggacactgggagagatggccaggtgagctacaggctgtctgcagaccctggtagcaatgtccatgagctctttgccattgacagtgagagtggttggatcaccacactccaggaacttgactgtgagacctgccagacttatcattttcatgtggtggcctatgaccacggacagaccatccagctatcctctcaggccctggttcaggtctccattacagatgagaatgacaatgctccccgatttgcttctgaagagtacagaggatctgtggttgagaacagtgagcctggcgaactggtggcgactctaaagaccctggatgctgacatttctgagcagaacaggcaggtcacctgctacatcacagagggagaccccctgggccagtttggcatcagccaagttggagatgagtggaggatttcctcaaggaagaccctggaccgcgagcatacagccaagtacttgctcagagtcacagcatctgatggcaagttccaggcttcggtcactgtggagatctttgtcctggacgtcaatgataacagcccacagtgttcacagcttctctatactggcaaggttcatgaagatgtatttccaggacacttcattttgaaggtttctgccacagacttggacactgataccaatgctcagatcacatattctctgcatggccctggggcgcatgaattcaagctggatcctcatacaggggagctgaccacactcactgccctagaccgagaaaggaaggatgtgttcaaccttgttgccaaggcgacggatggaggtggccgatcgtgccaggcagacatcaccctccatgtggaggatgtgaatgacaatgccccgcggttcttccccagccactgtgctgtggctgtcttcgacaacaccacagtgaagacccctgtggctgtagtatttgcccgggatcccgaccaaggcgccaatgcccaggtggtttactctctgccggattcagccgaaggccacttttccatcgacgccaccacgggggtgatccgcctggaaaagccgctgcaggtcaggccccaggcaccactggagctcacggtccgtgcctctgacctgggcaccccaataccgctgtccacgctgggcaccgtcacagtctcggtggtgggcctagaagactacctgcccgtgttcctgaacaccgagcacagcgtgcaggtgcccgaggacgccccacctggcacggaggtgctgcagctggccaccctcactcgcccgggcgcagagaagaccggctaccgcgtggtcagcgggaacgagcaaggcaggttccgcctggatgctcgcacagggatcctgtatgtcaacgcaagcctggactttgagacaagccccaagtacttcctgtccattgagtgcagccggaagagctcctcttccctcagtgacgtgaccacagtcatggtcaacatcactgatgtcaatgaacaccggccccaattcccccaagatccatatagcacaagggtcttagagaatgcccttgtgggtgacgtcatcctcacggtatcagcgactgatgaagatggacccctaaatagtgacattacctatagcctcataggagggaaccagcttgggcacttcaccattcaccccaaaaagggggagctacaggtggccaaggccctggaccgggaacaggcctctagttattccctgaagctccgagccacagacagtgggcagcctccactgcatgaggacacagacatcgctatccaagtggctgatgtcaatgataacccaccgagattcttccagctcaactacagcaccactgtccaggagaactcccccattggcagcaaagtcctgcagctgatcctgagtgacccagattctccagagaatggccccccctactcgtttcgaatcaccaaggggaacaacggctctgccttccgagtgaccccggatggatggctggtgactgctgagggcctaagcaggagggctcaggaatggtatcagcttcagatccaggcgtcagacagtggcatccctcccctctcgtctttgacgtctgtccgtgtccatgtcacagagcagagccactatgcaccttctgctctcccactggagatcttcatcactgttggagaggatgagttccagggtggcatggtgggtaagatccatgccacagaccgagacccccaggacacgctgacctatagcctggcagaagaggagaccctgggcaggcacttctcagtgggtgcgcctgatggcaagattatcgccgcccagggcctgcctcgtggccactactcgttcaacgtcacggtcagcgatgggaccttcaccacgactgctggggtccatgtgtacgtgtggcatgtggggcaggaggctctgcagcaggccatgtggatgggcttctaccagctcacccccgaggagctggtgagtgaccactggcggaacctgcagaggttcctcagccataagctggacatcaaacgggctaacattcacttggccagcctccagcctgcagaggccgtggctggtgtggatgtgctcctggtctttgaggggcattctggaaccttctacgagtttcaggagctagcatccatcatcactcactcagccaaggagatggagcattcagtgggggttcagatgcggtcagctatgcccatggtgccctgccaggggccaacctgccagggtcaaatctgccataacacagtgcatctggaccccaaggttgggcccacgtacagcaccgccaggctcagcatcctaaccccgcggcaccacctgcagaggagctgctcctgcaatggtactgctacaaggttcagtggtcagagctatgtgcggtacagggccccagcggctcggaactggcacatccatttctatctgaaaacactccagccacaggccattcttctattcaccaatgaaacagcgtccgtctccctgaagctggccagtggagtgccccagctggaataccactgtctgggtggtttctatggaaacctttcctcccagcgccatgtgaatgaccacgagtggcactccatcctggtggaggagatggacgcttccattcgcctgatggttgacagcatgggcaacacctcccttgtggtcccagagaactgccgtggtctgaggcccgaaaggcacctcttgctgggcggcctcattctgttgcattcttcctcgaatgtctcccagggctttgaaggctgcctggatgctgtcgtggtcaacgaagaggctctagatctgctggcccctggcaagacggtggcaggcttgctggagacacaagccctcacccagtgctgcctccacagtgactactgcagccagaacacatgcctcaatggtgggaagtgctcatggacccatggggcaggctatgtctgcaaatgtcccccacagttctctgggaagcactgtgaacaaggaagggagaactgtacttttgcaccctgcctggaaggtggaacttgcatcctctcccccaaaggagcttcctgtaactgccctcatccttacacaggagacaggtgtgaaatggaggcgaggggttgttcagaaggacactgcctagtcactcccgagatccaaaggggggactgggggcagcaggagttactgatcatcacagtggccgtggcgttcattatcataagcactgtcgggcttctcttctactgccgccgttgcaagtctcacaagcctgtggccatggaggacccagacctcctggccaggagtgttggtgttgacacccaagccatgcctgccatcgagctcaacccattgagtgccagctcctgcaacaacctcaaccaaccggaacccagcaaggcctctgttccaaatgaactcgtcacatttggacccaattctaagcaacggccagtggtctgcagtgtgccccccagactcccgccagctgcggtcccttcccactctgacaatgagcctgtcattaagagaacctggtccagcgaggagatggtgtaccctggcggagccatggtctggccccctacttactccaggaacgaacgctgggaatacccccactccgaagtgactcagggccctctgccgccctcggctcaccgccactcaaccccagtcgtgatgccagagcctaatggcctctatgggggcttccccttccccctggagatggaaaacaagcgggcacctctcccaccccgttacagcaaccagaacctggaagatctgatgccctctcggccccctagtccccgggagcgcctggttgccccctgtctcaatgagtacacggccatcagctactaccactcgcagttccggcagggagggggagggccctgcctggcagacgggggctacaagggggtgggtatgcgcctcagccgagctgggccctcttatgctgtctgtgaggtggagggggcacctcttgcaggccagggccagccccgggtgccccccaactatgagggctctgacatggtggagagtgattatggcagctgtgaggaggtcatgttctagcttcccattcccagagcaaggcaggcgggaggccaaggactggacttggcttatttcttcctgtctcgtagggggtgagttgagtgtggctgggagagtgggagggaagccctcagcccaggctgttgtcccttgaaatgtgctcttccaatcccccacctagtccctgagggtggagggaagctgaggatagagctccagaaacagcactagggtcccaggagaggggcatttctagagcagtgaccctggaaaaccaggaacaattgactcccggggtgggcgagagacaggagggctccctgatctgccggctctcagtccccggggcagagcctgattgactgtgctggctcaacttcaccaagatgcattctcatacctgcccacagctccattttggaggcaggcaggttggtgcctgacagacaaccactacgcgggccgtacagaggagctctagagggctgcgtggcatcctcctaggggctgagaggtgagcagcaggggagcgggcacagtcccctctgcccctgcctcagtcgagcactcactgtgtctttgtcaagtgtctgctccacgtcaggcactgtgctttgcaccggggagaaaatggtgatggagggcaacaaggactccgaggagcaccaccaggcctcgggccccagaggtcccactcctcagcctacacgcagaggaacgggcccacctcagagtcacaccactggctgccagtcagggcctgccaggagtctacacagctctgaaccttctttgttaaagaattcagacctcatggaactctgggttcttcatcccaagtttcccaggcacttttggccaaaggaaggaaggaactaattcttcattttaaaaattcttaggcactttttgaccttgctgtctggatgagtttcctcaatgggatttttcttccctagacacaaggaagtctgaactcctatttagggccggttggaagcagggagctggaccgcagtgtccaggctggacacctgccattgcctcctctccattgcagacgcctgcccatcaagtattacctgcggcgactcaaccctatgcatggagggtcaatgtgggcacatgtctacacatgtgggtgcccatggatagtacgtgtgtacacatgtgtagagtgtatgtagccaggagtggtggggaccagaagcctctgtggcctttggtgacctcaccactccctcccacccagtccctccctctggtccactgccttttcatatgtgttgtttctggagacagaagtcaaaaggaagagcagtggagccttgcccacagggctgctgcttcatgcgagagggagatgtgtgggcgagagccaatttgtgtgagtggtttgtggctgtgtgtgtgactgtgagtgtgagtgacagatacatagtttcattggtcattttttttttaacaataaagtatctttttttactgt

SEQ ID NO: 133279 - DNA, 4839 bp, Homo sapiens
  Payload ID: 6044
  Gene Symbol: FAT2
  Gene Name: FAT atypical cadherin 2
  ENST ID: ENST00000520200
  CDS Start-End: 1-3367
aggcgccaatgcccaggtggtttactctctgccggattcagccgaaggccacttttccatcgacgccaccacgggggtgatccgcctggaaaagccgctgcaggtcaggccccaggcaccactggagctcacggtccgtgcctctgacctgggcaccccaataccgctgtccacgctgggcaccgtcacagtctcggtggtgggcctagaagactacctgcccgtgttcctgaacaccgagcacagcgtgcaggtgcccgaggacgccccacctggcacggaggtgctgcagctggccaccctcactcgcccgggcgcagagaagaccggctaccgcgtggtcagcgggaacgagcaaggcaggttccgcctggatgctcgcacagggatcctgtatgtcaacgcaagcctggactttgagacaagccccaagtacttcctgtccattgagtgcagccggaagagctcctcttccctcagtgacgtgaccacagtcatggtcaacatcactgatgtcaatgaacaccggccccaattcccccaagatccatatagcacaagggtcttagagaatgcccttgtgggtgacgtcatcctcacggtatcagcgactgatgaagatggacccctaaatagtgacattacctatagcctcataggagggaaccagcttgggcacttcaccattcaccccaaaaagggggagctacaggtggccaaggccctggaccgggaacaggcctctagttattccctgaagctccgagccacagacagtgggcagcctccactgcatgaggacacagacatcgctatccaagtggctgatgtcaatgataacccaccgagattcttccagctcaactacagcaccactgtccaggagaactcccccattggcagcaaagtcctgcagctgatcctgagtgacccagattctccagagaatggccccccctactcgtttcgaatcaccaaggggaacaacggctctgccttccgagtgaccccggatggatggctggtgactgctgagggcctaagcaggagggctcaggaatggtatcagcttcagatccaggcgtcagacagtggcatccctcccctctcgtctttgacgtctgtccgtgtccatgtcacagagcagagccactatgcaccttctgctctcccactggagatcttcatcactgttggagaggatgagttccagggtggcatggtgggtaagatccatgccacagaccgagacccccaggacacgctgacctatagcctggcagaagaggagaccctgggcaggcacttctcagtgggtgcgcctgatggcaagattatcgccgcccagggcctgcctcgtggccactactcgttcaacgtcacggtcagcgatgggaccttcaccacgactgctggggtccatgtgtacgtgtggcatgtggggcaggaggctctgcagcaggccatgtggatgggcttctaccagctcacccccgaggagctggtgagtgaccactggcggaacctgcagaggttcctcagccataagctggacatcaaacgggctaacattcacttggccagcctccagcctgcagaggccgtggctggtgtggatgtgctcctggtctttgaggggcattctggaaccttctacgagtttcaggagctagcatccatcatcactcactcagccaaggagatggagcattcagtgggggttcagatgcggtcagctatgcccatggtgccctgccaggggccaacctgccagggtcaaatctgccataacacagtgcatctggaccccaaggttgggcccacgtacagcaccgccaggctcagcatcctaaccccgcggcaccacctgcagaggagctgctcctgcaatggtactgctacaaggttcagtggtcagagctatgtgcggtacagggccccagcggctcggaactggcacatccatttctatctgaaaacactccagccacaggccattcttctattcaccaatgaaacagcgtccgtctccctgaagggctttgaaggctgcctggatgctgtcgtggtcaacgaagaggctctagatctgctggcccctggcaagacggtggcaggcttgctggagacacaagccctcacccagtgctgcctccacagtgactactgcagccagaacacatgcctcaatggtgggaagtgctcatggacccatggggcaggctatgtctgcaaatgtcccccacagttctctgggaagcactgtgaacaaggaagggagaactgtacttttgcaccctgcctggaaggtggaacttgcatcctctcccccaaaggagcttcctgtaactgccctcatccttacacaggagacaggtgtgaaatggaggcgaggggttgttcagaaggacactgcctagtcactcccgagatccaaaggggggactgggggcagcaggagttactgatcatcacagtggccgtggcgttcattatcataagcactgtcgggcttctcttctactgccgccgttgcaagtctcacaagcctgtggccatggaggacccagacctcctggccaggagtgttggtgttgacacccaagccatgcctgccatcgagctcaacccattgagtgccagctcctgcaacaacctcaaccaaccggaacccagcaaggcctctgttccaaatgaactcgtcacatttggacccaattctaagcaacggccagtggtctgcagtgtgccccccagactcccgccagctgcggtcccttcccactctgacaatgagcctgtcattaagagaacctggtccagcgaggagatggtgtaccctggcggagccatggtctggccccctacttactccaggaacgaacgctgggaatacccccactccgaagtgactcagggccctctgccgccctcggctcaccgccactcaaccccagtcgtgatgccagagcctaatggcctctatgggggcttccccttccccctggagatggaaaacaagcgggcacctctcccaccccgttacagcaaccagaacctggaagatctgatgccctctcggccccctagtccccgggagcgcctggttgccccctgtctcaatgagtacacggccatcagctactaccactcgcagttccggcagggagggggagggccctgcctggcagacgggggctacaagggggtgggtatgcgcctcagccgagctgggccctcttatgctgtctgtgaggtggagggggcacctcttgcaggccagggccagccccgggtgccccccaactatgagggctctgacatggtggagagtgattatggcagctgtgaggaggtcatgttctagcttcccattcccagagcaaggcaggcgggaggccaaggactggacttggcttatttcttcctgtctcgtagggggtgagttgagtgtggctgggagagtgggagggaagccctcagcccaggctgttgtcccttgaaatgtgctcttccaatcccccacctagtccctgagggtggagggaagctgaggatagagctccagaaacagcactagggtcccaggagaggggcatttctagagcagtgaccctggaaaaccaggaacaattgactcccggggtgggcgagagacaggagggctccctgatctgccggctctcagtccccggggcagagcctgattgactgtgctggctcaacttcaccaagatgcattctcatacctgcccacagctccattttggaggcaggcaggttggtgcctgacagacaaccactacgcgggccgtacagaggagctctagagggctgcgtggcatcctcctaggggctgagaggtgagcagcaggggagcgggcacagtcccctctgcccctgcctcagtcgagcactcactgtgtctttgtcaagtgtctgctccacgtcaggcactgtgctttgcaccggggagaaaatggtgatggagggcaacaaggactccgaggagcaccaccaggcctcgggccccagaggtcccactcctcagcctacacgcagaggaacgggcccacctcagagtcacaccactggctgccagtcagggcctgccaggagtctacacagctctgaaccttctttgttaaagaattcagacctcatggaactctgggttcttcatcccaagtttcccaggcacttttggccaaaggaaggaaggaactaattcttcattttaaaaattcttaggcactttttgaccttgctgtctggatgagtttcctcaatgggatttttcttccctagacacaaggaagtctgaactcctatttagggccggttggaagcagggagctggaccgcagtgtccaggctggacacctgccattgcctcctctccattgcagacgcctgcccatcaagtattacctgcggcgactcaaccctatgcatggagggtcaatgtgggcacatgtctacacatgtgggtgcccatggatagtacgtgtgtacacatgtgtagagtgtatgtagccaggagtggtggggaccagaagcctctgtggcctttggtgacctcaccactccctcccacccagtccctccctctggtccactgccttttcatatgtgttgtttctggagacagaagtcaaaaggaagagcagtggagccttgcccacagggctgctgcttcatgcgagagggagatgtgtgggcgagagccaatttgtgtgagtggtttgtggctgtgtgtgtgactgtgagtgtgagtgacagatacatagtttcattggtcattttttttttaacaataaagtatctttttttactgtt

SEQ ID NO: 133280 - DNA, 19030 bp, Homo sapiens
  Payload ID: 6045
  Gene Symbol: FAT3
  Gene Name: FAT atypical cadherin 3
  Uniprot ID: Q8TDW7
  ENST ID: ENST00000409404
  CDS Start-End: 18-13691
gatggaagtatgatgtgatggatataattatgggacactgtgtgggcacacggcctcctgcttgttgcctcatcctcctgcttttcaagcttttggccactgtctcccaggggctgccagggactggacccctgggcttccacttcacacattccatttataatgctaccgtgtatgagaactcagcagcaaggacctacgtcaacagccagagtagaatgggcatcaccttaatagatctatcctgggatatcaaatacagaatagtgtccggagacgaggaaggctttttcaaagcagaggaagtcatcattgcagatttctgttttctcagaataagaactaaaggtggcaattctgccatattaaatagggaaatccaggataattatttattgatagtaaaaggttctgtcagaggagaggatttggaagcatggaccaaagtgaatatacaggttttagatatgaatgatctgagacctttgttttcacccacaacatactctgttaccatagcagaaagcacacctctaaggactagtgttgcccaggtgactgcaacagacgcagatattggttccaatggagaattctactactactttaaaaataaagttgatctcttttcagttcaccccacgagtggtgtcatctccttaagtggtcgattaaattatgatgaaaagaataggtatgatctggaaattttggctgtggaccggggaatgaaactgtatgggaacaatggagtgagcagtactgcaaagctttatgttcacattgagcgcataaatgaacatgccccaacaatccatgtagtcactcatgttcctttctcgttggaaaaagagccaacatatgcagtggtgacagttgatgacttagatgatggagcgaatggagagatcgaatctgtttccattgtggctggggatcctttagatcagttcttcctggctaaggaaggaaagtggttgaatgagtacaagattaaggagaggaagcagattgactgggagagctttccctatggctacaatctcactcttcaagcaaaagacaagggatctcctcaaaaatgttcagcattaaaggcagtctacattggcaaccccacaagagacactgtccccattagatttgaaaaagaagtgtacgatgtgagcataagtgaattttcccctcctggtgtcgtggttgctatagtaaaattaagtcctgaaccgatagatgtggaatacaaattatctcctggtgaggatgcagtgtactttaaaattaatcctcggtcgggtctgattgttacagcacggccactgaatactgttaagaaggaggtttataaactggaggtgacaaacaaggaaggagatttaaaagcacaggtcaccatcagcatagaagatgcaaatgaccacaccccagaatttcagcaaccactgtatgatgcttatgtgaatgaaagtgtcccagtgggaaccagcgttctaacagtttcagcttctgataaggataaaggagaaaatgggtacatcacctatagtatcgctagcctgaatttgttaccatttgtcattaatcagtttacaggtgttattagcacaactgaagaactggattttgaatcctccccagaaatttacagattcattgttagagcctctgactggggttcaccataccgccatgaaagtgaggtcaatgtgactattcgaataggaaatgtcaacgacaacagccctctctttgaaaaagtggcttgccagggagttatttcatatgactttccagttggtggtcacatcacagcagtctcagcgatcgatatcgatgaacttgaacttgtaaagtacaaaatcatttctggaaatgaacttggcttcttttatttaaacccagattctggtgttttacagcttaaaaaatcactgacaaattctggcattaaaaatggcaattttgccctcagaattacagcaactgatggagagaatcttgcagaccccatgtctattaacatttcagtcctacatgggaaagtgtcttcaaagagcttcagttgcagagaaactcgtgtggctcaaaagctggcagagaaactactcattaaggcaaaagcaaatgggaaactgaatctggaagatggatttcttgacttttattcaattaatagacagggaccatattttgacaagtcttttccttctgatgtggctgtaaaggaggatctgccagttggtgctaacattctgaagattaaagcctatgatgccgactctggcttcaatggaaaagtgctatttacaatatcagatggaaatacggatagttgctttaatattgatatggagactgggcagcttaaagtccttatgcccatggatcgagaacacacagacctctatctccttaatatcaccatctatgacttaggtaatccacagaaatcgtcatggagactgctgaccatcaatgtggaggatgctaatgacaatagcccagtttttattcaagacagttactcagttaacattcttgaaagttcaggcattggtactgaaatcattcaagtggaagccagagacaaagacttaggttctaatggtgaagtgacttactcagtcttgacagatacacagcagtttgccatcaatagctcaactggaatcgtttatgtagccgaccagttggaccgggaatccaaagccaattattctttgaaaatagaagccagggacaaggcagagagtggtcagcagctgttttcagttgtcactcttaaagtttttttagatgatgtcaatgactgctccccagctttcattcccagtagctatagtgtgaaggttcttgaagatctccctgttggcactgtcattgcttggcttgagacccatgatccagatcttggactggggggtcaagtgcgctattctttggtcaatgactataatgggagatttgaaatagataaagcaagtggtgccatccgcttgagcaaagagcttgattatgagaaacagcagttctataaccttactgtgcgggccaaagacaaagggcggcctgtctctctgtcatctgtttcctttgttgaggtggaagtggtggatgtcaatgaaaacctccacactccctatttcccagactttgctgttgttggatctgtaaaggaaaactcacgcattggaacaagcgtgctgcaggtgactgctcgagatgaagactccggaagggatggagagatccagtactccatcagggatggcagtggtcttggaaggttcagtatagacgacgagagtggggtcatcactgccgcagacattcttgatcgggagacaatggggtcatactggctaacagtgtatgccacagacaggggcgttgttccactctactccaccattgaggtctacattgaagttgaagatgtgaatgacaatgccccgctgacctcagaacctatatattatcctgttgtcatggaaaactctccaaaggacgtatctgtcattcagatccaggctgaagatcctgactccagttccaatgaaaaactgacatacaggattacaagtggaaatcctcagaatttttttgccatcaatatcaaaacaggtctgattacaacaacttcaaggaaattggatcgagaacagcaggcagaacattttctggaggtgactgtgacagatggtggtccctctccaaaacagtcaaccatttgggtggtggttcaggttctagatgaaaatgacaacaagccccagttcccagagaaggtctaccagatcaagctgccagaacgtgaccgaaagaagagaggagaaccgatttacagggcttttgcatttgatagagatgagggccccaacgcagaaatctcctacagtattgtggatgggaatgatgacggaaagttctttattgaccctaaaactgggatggtttcttctagaaagcagtttacagcaggcagttatgacatcctaacgataaaggcagtggacaatgggcgcccacagaaatcctccacggcccgcctccacattgaatggattaagaaaccacccccttcacctataccattgaccttcgatgagccgttttataacttcacagtcatggaaagtgatagagtgactgaaattgtaggggtggtgtctgtgcagccagctaacacccctctgtggtttgacatagttggggggaattttgacagcgcttttgatgcagagaagggtgttgggacaattgtcatcgcaaaacctttggatgcagagcagaggtccatctataatatgagtgtggaagtcaccgatgggacaaatgttgctgttactcaggtatttatcaaagtgctggataataatgataatggcccagaattctctcagccgaattacgatgtgacaatttccgaggatgtgcttccagacacggagatcctgcagattgaagccacagatagagatgagaagcacaagctgagctacactgttcatagcagcatcgactccatcagcatgagaaaattccggattgaccctagcactggcgtgctctatactgccgagaggctggaccatgaggcccaggacaagcacattctcaacataatggtcagagatcaggagtttccttatcgaagaaacttggcccgagtcattgtgaatgtggaggatgctaatgatcacagtccttattttaccaacccactgtatgaagcgtctgtgtttgaatctgctgctctgggatcagctgttctgcaagtgacggctctggacaaagacaaaggagaaaatgcagaactcatatataccatagaagcagggaacactgggaacatgtttaagatcgaaccggtcctaggcatcatcaccatttgcaaagaaccagacatgacgacgatgggtcagtttgtcctatccatcaaagtcacagatcagggatccccgccaatgtctgctactgcaattgtgcgcatttccgtcaccatgtctgacaattctcaccccaagttcattcacaaagactaccaagcagaagtaaatgaaaatgttgacattggaacatcagtcattctaatctctgccatcagtcaatctaccctcatttatgaagtcaaagatggagacattaatgggatctttaccataaatccatattctggagtcatcaccactcagaaggccctggattatgagcgcacatcctcttatcaactcatcattcaggccaccaatatggcaggaatggcttccaatgctacagtcaatattcagattgttgatgaaaatgataatgccccagtttttctcttttctcaatactcaggcagcctaagtgaggctgccccaattaatagcattgtcaggagcttggataacagcccactggtgattcgagccacagatgctgacagcaaccggaatgctctgcttgtgtatcagattgtggagtcaacagcaaaaaagtttttcacggtggactccagtacaggtgcaatcagaacaattgccaacctggaccatgaaaccattgcccatttccattttcatgtgcatgtgagagacagtggtagcccccaactgactgcagagagtcccgttgaagtcaacattgaggtgacagatgtgaatgataacccacctgtttttactcaggctgtgtttgagactatcttacttctacctacctatgttggagtggaggttctgaaagttagtgccacagatcctgactctgaggtaccccctgaactgacatacagcctaatggaaggcagtttggatcattttttaattgactcaaacagtggagtacttaccataaaaaacaacaacctctccaaggatcactacatgctgatagttaaggtgtctgatggaaagttctacagtacctccatggtcaccatcatggttaaagaagccatggacagcggcctccactttacacaaagcttctattccacctcaatctcagagaacaacactaacataaccaaagttgctattgtcaatgcagttggaaatcgccttaatgagcccttaaaatacagcatcttaaacccaggaaataagttcaagataaaatctacctcaggggtcattcagacgactggagtcccctttgaccgtgaagaacaagagttatatgagctggtggtagaagccagccgtgagctggaccatctgcgtgtggccagagtggtggtcagggttaacattgaagacataaatgacaattctccagtctttgtgggcctcccatactatgctgctgttcaagtggatgcggaacccgggactctgatttatcaggtgacagccattgacaaagataaaggtccaaatggagaagtgacctatgtcctgcaggatgactatggccactttgaaattaaccctaattcagggaatgttattttaaaggaagcattcaactctgacttgtccaacattgagtatggagtcaccatcctagccaaggatggcggaaaaccttctttgtctacatctgtggagcttcccatcactattgtcaacaaagcaatgcctgtgtttgataagcccttttatacagcatctgtcaatgaagacatcagaatgaacacacccatcctaagcatcaatgccaccagtccagaaggccaaggcatcatatatatcattatcgatggggacccttttaaacagtttaacattgactttgacactggggtcctgaaagttgttagccctttggattatgaagttacatctgcttacaagctgacaataagagccagcgacgcccttactggtgctagggctgaagtcactgttgacttgctagttaatgatgtaaatgacaacccccctattttcgatcagcctacatacaatacaacactatcagaagcatctcttattgggacacctgttttacaagttgtctctattgatgcagactcagaaaacaataaaatggtacattatcagattgtccaggatacctacaatagcacagattattttcacatagatagctcaagtggcttaatcctgacagcacgaatgctggaccatgagttagtacaacactgcactttgaaagtcagatcaatagatagtggcttcccatcactgagcagtgaggttctcgttcatatctacatctctgatgtaaatgacaaccctccagtttttaatcagctcatttatgagtcatatgtgagtgaattagccccccggggccattttgtaacctgtgtacaagcctctgatgcagacagctctgattttgaccggttggaatatagcattttatctgggaatgaccggacgagctttctgatggacagcaagagtggagttatcacattgtccaaccatcggaagcagcggatggagcctctgtacagtctcaatgtgtctgtctctgatgggttgttcaccagcactgcacaggtgcatattagggtacttggggctaacttgtacagccctgccttttcacaaagcacatacgtagctgaggtgagagagaacgtggctgcaggaacaaaggtaattcatgttcgagccacagatggtgatccagggacttatgggcagatcagctatgccatcatcaatgactttgccaaggatcgattcctcatagacagcaatgggcaggtcatcaccacagaaaggctagaccgggaaaaccctctagaaggggatgttagtatttttgtgagggcccttgatggtggagggagaacaactttctgcactgtgagagtgattgttgtggatgaaaatgacaatgctccccagttcatgacagtggaatatagagccagtgtcagggcagatgttggaaggggccacttggtcactcaagttcaagccatagatcccgatgatggagcaaattcaaggattacttattccctctatagcgaggcctctgtttcagtggccgacctcctggaaatcgatcctgacaatggctggatggtcacaaagggtaattttaaccagctgaaaaatacagtgctttcgttctttgtcaaagcagtagatgggggcatcccagtaaagcactccctcattcctgtctatatccacgtcttgccccctgaaacgttcttgccatcattcacccagtctcagtattcctttaccattgcagaagatacagccattgggagtacagtggacaccctgaggattttgcccagtcagaatgtctggttcagcacagttaatggggaacggccagaaaataacaaagggggcatattcgtcatagaacaggaaacaggcactattaagcttgacaaacgccttgaccgtgaaaccagcccagctttccactttaaagtagcagccactatacccctggacaaagtagacattgtgtttactgtggatgtagatatcaaggtattggatttgaatgacaacaagccagtctttgaaacttcaagctatgacaccattataatggaagggatgcctgttggcaccaaactcacacaagtgagagctattgatatggactggggagccaatggacaagtcacttactccctccactcggattcccagcccgaaaaggtaatggaagcattcaatattgacagcaacacgggctggatcagtaccttgaaggacctagatcacgagacagaccccacattcaccttctctgtggtggcctctgaccttggagaggcattctctctttcctccacggccttggtctctgtcagagtgacagatataaatgacaatgcaccagtcttcgcgcaggaagtgtaccgagggaatgtgaaggagagcgacccaccgggcgaggtggtagccgtcctcagcacctgggacagagacacatccgacgttaatcgccaagtgagctaccatattacaggaggaaaccctcgaggaaggtttgctctgggcctggtgcaaagtgagtggaaggtctatgtgaagaggcctctagacagagaagaacaggacatttactttctcaatatcactgccactgatgggctttttgtcacacaggccatggtggaagtgagcgtcagtgatgtgaatgacaatagcccagtgtgtgatcaggttgcatatacagcattacttcctgaagacattccatcaaataaaatcatcctgaaagtcagtgcaaaggatgctgatattggatccaatggatatatacgatactcactctatggatctggaaacagtgaattttttctagatccagaaagtggcgagttaaaaaccttggctctgttggaccgggagaggatccccgtgtacagcctgatggccaaggccactgacgggggtggcaggttctgccagtccaacatccacctaatcctggaggatgtgaatgataacccccctgtgttttcttctgaccactacaacacctgtgtctatgagaacacagccaccaaggctctgttgaccagagttcaagccgtggaccccgacattggcatcaataggaaggtcgtgtactccctggcagactcagctggtggggtcttctccattgacagctcatctggcatcatcatcctggagcagccactggaccgtgagcagcagtcttcgtacaacatcagcgtgcgggccactgaccagagtcctggacagtccctgtcctctctcactactgtcaccatcaccgttctggacattaatgacaacccccctgtgtttgagaggagggactacctggtgacggtgcctgaggacacctcccctggcacccaagtccttgctgtttttgccaccagcaaagatattggcacaaatgctgagatcacttatctcatccggtctgggaacgaacaagggaaatttaagatcaaccccaagacagggggtatttctgtctctgaagtcctggactatgaattatgcaaaaggttttacctggtagtggaagccaaagatgggggcaccccagctctcagcgctgtggccactgtcaacatcaacctcacagatgttaatgacaaccctcccaagttcagccaagacgtctacagtgcggttatcagtgaagacgccttggtgggagactctgtcattttgctaatagcagaagatgtagacagccagcccaacggacagattcatttttccattgtgaatggagatcgggacaatgaatttactgtagatcctgtcttgggacttgtgaaagttaagaagaaattggaccgggaacgggtgtctggatactctctgcttgtccaggccgtagacagtggcattcctgcaatgtcatcaactgcaactgtcaacattgatatttctgatgtgaatgacaacagcccggtgtttacacctgccaactatactgctgtgattcaggaaaataagccagtgggcaccagcatcttgcagctggtggtgacagacagagactcctttcacaatgggcctcccttttcattctctattttgtcgggaaatgaagaggaggagtttgtgttggaccctcatgggatcttgcggtcggctgtggtcttccagcacacagagtctctggaatacgtgttgtgtgtccaggcaaaggattcaggcaaaccccagcaagtttctcacacttacatccgcgtgcgagtcattgaggaaagcacccacaagcccacagccattcccctggaaattttcattgtcaccatggaggatgactttcctggtggggtcattgggaagattcatgccacagatcaagacatgtatgatgtgctcacatttgccctgaaatcggagcagaaaagcttatttaaagtgaacagtcacgatgggaaaatcatcgccctgggaggcctggacagcggcaagtatgtcctgaatgtgtctgtgagtgatggtcgcttccaggtacccattgatgtggtcgtgcatgtggagcagttggtgcatgagatgctgcagaacactgtcaccatccgctttgaaaatgtgtcccctgaggacttcgtggggctgcacatgcatgggttccggcgcaccctgcggaatgcagtcctcacccagaagcaggacagcctgcgcatcatcagcatccagcccgtggcaggcaccaaccaactggacatgctgtttgcggtggagatgcacagcagcgagttctacaagccagcctacctgatccagaagctgtccaatgctagaagacacctggagaatatcatgcgcatctcagccatcttggagaagaactgctcagggctggactgtcaggaacagcattgtgagcaaggcttgtcactcgattcccacgcgctcatgacctacagcacggctcgcatcagctttgtgtgtccgcgtttctacaggaacgtgcgttgcacctgcaatggaggactgtgtccggggtccaacgatccttgtgtggagaagccgtgtccaggggacatgcagtgtgtcagttatgaagccagcaggagaccgttcctctgccagtgtccaccagggaagctcggagagtgctcagggcacacttctctcagctttgctggaaacagttacatcaaatatcggctttctgaaaatagcaaagaagaggatttcaaactagctctgcgtcttcgaacactgcaaagcaatgggattataatgtacaccagagcaaatccctgcataattctgaagattgtggatggcaagctgtggttccagctggactgcggcagcggccctggaatcttgggcatctcgggccgtgctgtcaacgacgggagctggcactcggtcttcctggagctcaaccgcaatttcacgagcctgtccctggatgacagctacgtggagcggcgccgggcgcccctctacttccagacgctgagcactgagagtagcatctacttcggcgccctggtgcaagcggataacatccgcagcctgactgacacgcgggtcacgcaggtgctcagcggcttccagggctgcctggactcggtgatactgaataacaatgagctgccgctgcagaacaagcgcagcagcttcgcggaggtggtgggcctgacggagctgaagctgggctgcgtgctctatcccgacgcctgcaagcgcagcccgtgccagcacgggggcagctgcactggcctgccatcggggggctatcagtgtacctgtctctcacagtttacggggagaaactgtgaatctgagattacagcctgcttcccaaacccctgccggaatggaggatcctgcgatccaataggaaacactttcatctgcaattgtaaagctgggctcactggagtcacgtgtgaggaggacatcaatgagtgcgaacgagaggagtgtgagaacggaggctcctgcgtgaacgtgttcggctccttcctctgcaactgcacgccgggctacgtgggccagtactgcgggctgcgccccgtggtggtacccaatatccaggctggccactcctacgtggggaaggaggagctcatcggcatcgccgtggtcctcttcgtcatcttcatcctggtggttctcttcatagtcttccgcaagaaggtcttccgcaagaactactcccgcaacaacatcacgctagtgcaggacccggccaccgccgccctgcttaacaagagcaatggcatcccgttccggaacctgcgcggcagtggggacggccgcaacgtctaccaggaggtggggcccccgcaggtccccgtgcgccccatggcctacacaccctgcttccagagtgactccaggagcaacctggataagatcgtggacgggctgggaggcgagcaccaggaaatgaccacgtttcaccctgagtcgccccgcatcctgacagcccggcggggcgtggtcgtgtgcagtgtggcccccaacctccccgccgtgtcaccctgccgctccgactgcgactccatccggaagaatggctgggacgcgggaactgagaacaaaggggttgatgacccgggagaagtgacctgctttgcaggtagtaataaaggcagcaactctgaagttcagtccctcagctccttccagtcagattctggtgacgacaatgcctatcactgggacacctctgattggatgccaggggcccgcctgtcggacatagaggaagtgcccaactatgagaaccaggatggagggtctgcacaccaggggagcacacgggagctggagagcgattactacctgggtggttatgacattgacagtgaatacccaccccctcatgaagaggagttcttgagtcaggaccagctgcctcctcctctcccggaggacttcccagaccaatatgaggccctgccaccctcccagcctgtctccctggccagcacactgagcccagactgcaggagaaggccccagtttcatcctagccagtatctccctcctcacccattccccaacgaaacggatttggtgggcccgcctgccagctgtgaatttagtacttttgctgtgagcatgaaccagggcacagagcccacaggcccagcagacagcgtgtctctgtccttgcacaattccagaggcacctcatcctcggatgtgtctgccaactgcggctttgacgattccgaagtagccatgagtgactacgagagcgtgggagagctcagcctcgccagccttcacattccctttgtggagactcagcatcagactcaagtgtagacatcacatcttgggtacttcaccctgtttgttacagaaaagtggaagcagattggctgggcttctgtcccagtggagcattgtctgtggaatgagaagggaatactgtatttttccactagaaacttcttcacaagtcatactgtcccaacaagcaagcttgattccagttgggtgaaaatgaaaggctcagaaattgtttttgagaggtgactggtaatccttgatgtaggtacctatgttcacagctaaaaatgcaaagagggaaaaattatttcacccactaagttatacagccagtcttgtatggctttgtgcagtattgtgccctggaaagtgttacagcatcagtccttgcagtattaaaaactggcaacaatcaaagaggcattgttgcatgtaattttgagccaatgaaatgaaaatagtagtaatgattgttggaaaagttagtctcttaggcgaaagagaagagaaacaaatattattaaacaaaccagaaaatgggctgaagccttttaaatcaactctatttttttgataagctgcccaattttcagctataaaattaggcttgaataacatgtttagtatgctcagttatttctgtttgtttgtgttaagcatccaatctaatatagttgggttttatgatcttcaagaaaggtatcaatgaagagcaacatgaggctttttgggttccatttggtgggtgggggaggaagttaaagttgtttgaacattagaaagaatgtgattatctggttggttttgtgttttctggtaaatattccagttggtaaatctaacattgctacagaagttggctttgttcatatagcttctctacaattagatatttttagaagtttaagcaaaactcacaaattcaggggggaaaaaagaaaaaacgataccttcaaagtttgcggcctagataatcacaattcttcataatgcagaggaaaggtgtctgttattctaaatcggtagcatcaccattataaatacaattatgttaagaaaagaggaaagtagactagttattgtgtataaattataatagtgtgtgtgtgtctgggcctatgtacaaatatgtgcttgcactcagtaaggctgctcttgaggaaagctaatgtgaaggttttgggaaatggaccatgttgaaaattctgccggcgagcatggcatacctttcaatttctctgatctctatggtgttagagaaacatcaaatgccatattttactctggttcagttaactttattttggtactgccaataaagcaaaattgtgcttttttttttttttctcaagacagagtcttgctctgtcacccaggctagagtgcaatggcatgatctcagctcactgcaatctccacctcctgggttcaagcgattctcctgcctcagcctcccaggttgctggggttacaggtgtgtgccaccacgcctggctaattttttgtatttttagtagagatggggtttcaccatgttggccaggctggtctcaaactcctgacctcgtaatccacctgccgtggcctcccaaagtgctgggattacaggcatgagccaccgtgcccagcccaaaactgtgctttttaaaaacagtattttgttataattttccagaacttacctctgttttaaaagtgtgtaatgtttgattacaccctgggattcccttctcatctgtgggctttggccatgatttccaaaattaacaggagaatcattccactggaaatataacaatccagtcctcaaaactgaaagttgacaggttgagggactttccttttttgcttcaatcagattacggccgcctgtgcagtggccatggtaaatatatgcatatttgcactatctgcttaatgagcaaatctgtgtccacagtttctgatgacatatggcattggtgtgtaaattgtactgtccctagtctgtgcattattcactcagacatatttttagttatttcaattgcgtttaatccacttcttttttatgagtcagtgtttctgaatgtttatgcaaaaaaaaaaatcctttttcattcccaaactttctaagtaagtggatacactacacttcacaagttttccagcctttctcttcctgtctcttggtcagacctactcatggaggtattatccacactgtgatcttgaaataaatgaatttcactaaggctgctttcgagaacaaagtctttggtatttttcttatgtaagaagcacatttgcaagaatcatggaaaaaaatgacaaactaatggcctagaatagagtgactgctacactttaagtaatgcaatgacataaaaaccatcaaagtaaaaccaacatgtcatttcctgcccccaggaaatattagaatgagattaatgctgatgagtccctactgcttacacagcatctctttgagggagaatgcctgactgacacagtaatgaaagaataaatagatcctaatgcagtcatgaagccactgaagaaaattgtgcccaccctttgctgtgacctatataaaatatctctttctttgggatatcatcccctgattttctgcagaatagctctgcagctaaatatataccaggcaagcatgtattgtgttttgatttattatctttaaacacatgatatctcttcactttttggaaagttagatttctctgtagattatgaaatgctttgcagtcaggccaagatgctactaggtggggatgatcactaattcaaaaaagctggaagaatcctatttgctagtccaaactccttattttatcaaagaggaaacatacccagagtgggaaagagacttgcccaagcccacagaggaagttaattcgcttaacaaggagtagaacccatccatctagccaatattctttttacatcatattgttcacccctacactgccttgagcatgggagtcacctggttctgatggaccctctgacttccaccattccttctttggaatatgctataaaagaaaattcatggagaatatttttctgaaagcctcatgatcttatgtttccttgcagtccccctagggagaggggttatagaattcatacatttctgtagacattcatcgaaatgctgcttttgccaaatgaatgtttgtataatagggatgaaatgataattacagagttcagctcagaccagtcatcagttgtagtgaaactttgattatactgttacctactggttgcatttttggttttggttttgcatttttttcttcccacaaacactggctactctttgtcctaccccctccaccatgatgaaccatgtggaaactatttaaatcaattaatgtctttctcatttttcgaacatgtatgtgccacctcctggaagccatttcccataatctgttgtaggcactttactagtattgcacacattctggttaggttgagaatagctagactcttggtgctcgtcatatagtaagcaagaacttgggagtaataaaaggtgaataaaatgcatgcttcatttattccctttcctctatgaatattttgctgctgcattctagtctatgccagctttccatgtacccttggcctgcctattcatgaaatgccatataaaagacttaggaacatgagtaggtggtccatgctttgaggttcatccaattagggaataaatgtgaaaggctggaaagggaactagtttctgggatttgcctggaacttcccttggacattactagcacattctggaaaaaaagcaagttgaacatatctaccatcagtcctctcctacttacttcccaccccaccctatccactacccccactgatgctatgtttgcatcatcaaagtcaggggaattgagaaaagagattatcaaaataaattattaaaatccagaaaacagttttatgtgaagtaattcaggaagatctagtgttcattttgcatggattgtccagataattggctcttcactccgctgccttcccagtgcacaggtattgctaaagtggttaggctttaatgttttatgtttttagtttcaaactatgggaaatggagatttgaagaggcatttattccttgtcatcattttgtgtgctctgtgagaaggtggttatatgtttttgctggtttgtgtcccacagtgttcaactgcacattattctgatgaaaatccacaatgtctttgagcttctggttgtgtaatgctggggtttaaagtcaccatttgtgggtttggcatcaattaatatttagccagctggctaagagataggaaaagaatatgatatttctttccttatgtaataatgaaaagcaataattacaagtaggtaataatacacaaaggccataattagtctcttctagtgtttagaatgcacttgagaatcgtagagtcatttggagcgtgtttggaccaattagtatgtactgtagtacccttctggcaaacaaataactgaattgctactatttaacaatcttatgagcccacactactgcattttgggagtggcaaatgtgtttggaaatggaagcagttctttttaagcactgtatcagagagattgtcttgtacgtttgcctgttgcaaacaggctggtttgtaaaagatgtatgttttggtgtttgaaatgtttataaaattgtatataaatggtttcaattttccaggcttttgtagatactatatttgatgcctatcaggatgctttaatttggggggtcgaatataattgtaagtcatccacgctgttggtctgcaaacttttgaggtaactacacacacacacacacacacaaggattttagatttgaaaatgatgttttttactcatttcaaaatgtactgtaacctttctttggttcttactgttttcatttaactttctctgttttcaagaaaaattgtctttattgacatttgtaaaaaagaatgtgttttgcccagttattaagtattttatttttatgcaatttcagaatcacaatgaggtatgccatttcttcatatacatgcacattcacctcaacttgcacacacatcacacaccaaaccttatgcaaaggggaaagctaacacttagagtggattttgtcccttaaggaaatggattgttcctgcatatattgctggtggcagtattcagtcttgtgttctttttctaaaaaaaaagaaaagaaaagaaaaaaaaaacaaaagcaaacaaaaaaaaagacagccaaaaaaaagaaacaacaacaacaaaaaaaaacacaacagtgtacaggtttgtaactgccaaaatttgatggttaaaacaagttttcaagt

SEQ ID NO: 133281 - DNA, 18699 bp, Homo sapiens
  Payload ID: 6045
  Gene Symbol: FAT3
  Gene Name: FAT atypical cadherin 3
  ENST ID: ENST00000525166
  CDS Start-End: 23-13342
agtgaatatacaggttttagatatgaatgatctgagacctttgttttcacccacaacatactctgttaccatagcagaaagcacacctctaaggactagtgttgcccaggtgactgcaacagacgcagatattggttccaatggagaattctactactactttaaaaataaagttgatctcttttcagttcaccccacgagtggtgtcatctccttaagtggtcgattaaattatgatgaaaagaataggtatgatctggaaattttggctgtggaccggggaatgaaactgtatgggaacaatggagtgagcagtactgcaaagctttatgttcacattgagcgcataaatgaacatgccccaacaatccatgtagtcactcatgttcctttctcgttggaaaaagagccaacatatgcagtggtgacagttgatgacttagatgatggagcgaatggagagatcgaatctgtttccattgtggctggggatcctttagatcagttcttcctggctaaggaaggaaagtggttgaatgagtacaagattaaggagaggaagcagattgactgggagagctttccctatggctacaatctcactcttcaagcaaaagacaagggatctcctcaaaaatgttcagcattaaaggcagtctacattggcaaccccacaagagacactgtccccattagatttgaaaaagaagtgtacgatgtgagcataagtgaattttcccctcctggtgtcgtggttgctatagtaaaattaagtcctgaaccgatagatgtggaatacaaattatctcctggtgaggatgcagtgtactttaaaattaatcctcggtcgggtctgattgttacagcacggccactgaatactgttaagaaggaggtttataaactggaggtgacaaacaaggaaggagatttaaaagcacaggtcaccatcagcatagaagatgcaaatgaccacaccccagaatttcagcaaccactgtatgatgcttatgtgaatgaaagtgtcccagtgggaaccagcgttctaacagtttcagcttctgataaggataaaggagaaaatgggtacatcacctatagtatcgctagcctgaatttgttaccatttgtcattaatcagtttacaggtgttattagcacaactgaagaactggattttgaatcctccccagaaatttacagattcattgttagagcctctgactggggttcaccataccgccatgaaagtgaggtcaatgtgactattcgaataggaaatgtcaacgacaacagccctctctttgaaaaagtggcttgccagggagttatttcatatgactttccagttggtggtcacatcacagcagtctcagcgatcgatatcgatgaacttgaacttgtaaagtacaaaatcatttctggaaatgaacttggcttcttttatttaaacccagattctggtgttttacagcttaaaaaatcactgacaaattctggcattaaaaatggcaattttgccctcagaattacagcaactgatggagagaatcttgcagaccccatgtctattaacatttcagtcctacatgggaaagtgtcttcaaagagcttcagttgcagagaaactcgtgtggctcaaaagctggcagagaaactactcattaaggcaaaagcaaatgggaaactgaatctggaagatggatttcttgacttttattcaattaatagacagggaccatattttgacaagtcttttccttctgatgtggctgtaaaggaggatctgccagttggtgctaacattctgaagattaaagcctatgatgccgactctggcttcaatggaaaagtgctatttacaatatcagatggaaatacggatagttgctttaatattgatatggagactgggcagcttaaagtccttatgcccatggatcgagaacacacagacctctatctccttaatatcaccatctatgacttaggtaatccacagaaatcgtcatggagactgctgaccatcaatgtggaggatgctaatgacaatagcccagtttttattcaagacagttactcagttaacattcttgaaagttcaggcattggtactgaaatcattcaagtggaagccagagacaaagacttaggttctaatggtgaagtgacttactcagtcttgacagatacacagcagtttgccatcaatagctcaactggaatcgtttatgtagccgaccagttggaccgggaatccaaagccaattattctttgaaaatagaagccagggacaaggcagagagtggtcagcagctgttttcagttgtcactcttaaagtttttttagatgatgtcaatgactgctccccagctttcattcccagtagctatagtgtgaaggttcttgaagatctccctgttggcactgtcattgcttggcttgagacccatgatccagatcttggactggggggtcaagtgcgctattctttggtcaatgactataatgggagatttgaaatagataaagcaagtggtgccatccgcttgagcaaagagcttgattatgagaaacagcagttctataaccttactgtgcgggccaaagacaaagggcggcctgtctctctgtcatctgtttcctttgttgaggtggaagtggtggatgtcaatgaaaacctccacactccctatttcccagactttgctgttgttggatctgtaaaggaaaactcacgcattggaacaagcgtgctgcaggtgactgctcgagatgaagactccggaagggatggagagatccagtactccatcagggatggcagtggtcttggaaggttcagtatagacgacgagagtggggtcatcactgccgcagacattcttgatcgggagacaatggggtcatactggctaacagtgtatgccacagacaggggcgttgttccactctactccaccattgaggtctacattgaagttgaagatgtgaatgacaatgccccgctgacctcagaacctatatattatcctgttgtcatggaaaactctccaaaggacgtatctgtcattcagatccaggctgaagatcctgactccagttccaatgaaaaactgacatacaggattacaagtggaaatcctcagaatttttttgccatcaatatcaaaacaggtctgattacaacaacttcaaggaaattggatcgagaacagcaggcagaacattttctggaggtgactgtgacagatggtggtccctctccaaaacagtcaaccatttgggtggtggttcaggttctagatgaaaatgacaacaagccccagttcccagagaaggtctaccagatcaagctgccagaacgtgaccgaaagaagagaggagaaccgatttacagggcttttgcatttgatagagatgagggccccaacgcagaaatctcctacagtattgtggatgggaatgatgacggaaagttctttattgaccctaaaactgggatggtttcttctagaaagcagtttacagcaggcagttatgacatcctaacgataaaggcagtggacaatgggcgcccacagaaatcctccacggcccgcctccacattgaatggattaagaaaccacccccttcacctataccattgaccttcgatgagccgttttataacttcacagtcatggaaagtgatagagtgactgaaattgtaggggtggtgtctgtgcagccagctaacacccctctgtggtttgacatagttggggggaattttgacagcgcttttgatgcagagaagggtgttgggacaattgtcatcgcaaaacctttggatgcagagcagaggtccatctataatatgagtgtggaagtcaccgatgggacaaatgttgctgttactcaggtatttatcaaagtgctggataataatgataatggcccagaattctctcagccgaattacgatgtgacaatttccgaggatgtgcttccagacacggagatcctgcagattgaagccacagatagagatgagaagcacaagctgagctacactgttcatagcagcatcgactccatcagcatgagaaaattccggattgaccctagcactggcgtgctctatactgccgagaggctggaccatgaggcccaggacaagcacattctcaacataatggtcagagatcaggagtttccttatcgaagaaacttggcccgagtcattgtgaatgtggaggatgctaatgatcacagtccttattttaccaacccactgtatgaagcgtctgtgtttgaatctgctgctctgggatcagctgttctgcaagtgacggctctggacaaagacaaaggagaaaatgcagaactcatatataccatagaagcagggaacactgggaacatgtttaagatcgaaccggtcctaggcatcatcaccatttgcaaagaaccagacatgacgacgatgggtcagtttgtcctatccatcaaagtcacagatcagggatccccgccaatgtctgctactgcaattgtgcgcatttccgtcaccatgtctgacaattctcaccccaagttcattcacaaagactaccaagcagaagtaaatgaaaatgttgacattggaacatcagtcattctaatctctgccatcagtcaatctaccctcatttatgaagtcaaagatggagacattaatgggatctttaccataaatccatattctggagtcatcaccactcagaaggccctggattatgagcgcacatcctcttatcaactcatcattcaggccaccaatatggcaggaatggcttccaatgctacagtcaatattcagattgttgatgaaaatgataatgccccagtttttctcttttctcaatactcaggcagcctaagtgaggctgccccaattaatagcattgtcaggagcttggataacagcccactggtgattcgagccacagatgctgacagcaaccggaatgctctgcttgtgtatcagattgtggagtcaacagcaaaaaagtttttcacggtggactccagtacaggtgcaatcagaacaattgccaacctggaccatgaaaccattgcccatttccattttcatgtgcatgtgagagacagtggtagcccccaactgactgcagagagtcccgttgaagtcaacattgaggtgacagatgtgaatgataacccacctgtttttactcaggctgtgtttgagactatcttacttctacctacctatgttggagtggaggttctgaaagttagtgccacagatcctgactctgaggtaccccctgaactgacatacagcctaatggaaggcagtttggatcattttttaattgactcaaacagtggagtacttaccataaaaaacaacaacctctccaaggatcactacatgctgatagttaaggtgtctgatggaaagttctacagtacctccatggtcaccatcatggttaaagaagccatggacagcggcctccactttacacaaagcttctattccacctcaatctcagagaacaacactaacataaccaaagttgctattgtcaatgcagttggaaatcgccttaatgagcccttaaaatacagcatcttaaacccaggaaataagttcaagataaaatctacctcaggggtcattcagacgactggagtcccctttgaccgtgaagaacaagagttatatgagctggtggtagaagccagccgtgagctggaccatctgcgtgtggccagagtggtggtcagggttaacattgaagacataaatgacaattctccagtctttgtgggcctcccatactatgctgctgttcaagtggatgcggaacccgggactctgatttatcaggtgacagccattgacaaagataaaggtccaaatggagaagtgacctatgtcctgcaggatgactatggccactttgaaattaaccctaattcagggaatgttattttaaaggaagcattcaactctgacttgtccaacattgagtatggagtcaccatcctagccaaggatggcggaaaaccttctttgtctacatctgtggagcttcccatcactattgtcaacaaagcaatgcctgtgtttgataagcccttttatacagcatctgtcaatgaagacatcagaatgaacacacccatcctaagcatcaatgccaccagtccagaaggccaaggcatcatatatatcattatcgatggggacccttttaaacagtttaacattgactttgacactggggtcctgaaagttgttagccctttggattatgaagttacatctgcttacaagctgacaataagagccagcgacgcccttactggtgctagggctgaagtcactgttgacttgctagttaatgatgtaaatgacaacccccctattttcgatcagcctacatacaatacaacactatcagaagcatctcttattgggacacctgttttacaagttgtctctattgatgcagactcagaaaacaataaaatggtacattatcagattgtccaggatacctacaatagcacagattattttcacatagatagctcaagtggcttaatcctgacagcacgaatgctggaccatgagttagtacaacactgcactttgaaagtcagatcaatagatagtggcttcccatcactgagcagtgaggttctcgttcatatctacatctctgatgtaaatgacaaccctccagtttttaatcagctcatttatgagtcatatgtgagtgaattagccccccggggccattttgtaacctgtgtacaagcctctgatgcagacagctctgattttgaccggttggaatatagcattttatctgggaatgaccggacgagctttctgatggacagcaagagtggagttatcacattgtccaaccatcggaagcagcggatggagcctctgtacagtctcaatgtgtctgtctctgatgggttgttcaccagcactgcacaggtgcatattagggtacttggggctaacttgtacagccctgccttttcacaaagcacatacgtagctgaggtgagagagaacgtggctgcaggaacaaaggtaattcatgttcgagccacagatggtgatccagggacttatgggcagatcagctatgccatcatcaatgactttgccaaggatcgattcctcatagacagcaatgggcaggtcatcaccacagaaaggctagaccgggaaaaccctctagaaggggatgttagtatttttgtgagggcccttgatggtggagggagaacaactttctgcactgtgagagtgattgttgtggatgaaaatgacaatgctccccagttcatgacagtggaatatagagccagtgtcagggcagatgttggaaggggccacttggtcactcaagttcaagccatagatcccgatgatggagcaaattcaaggattacttattccctctatagcgaggcctctgtttcagtggccgacctcctggaaatcgatcctgacaatggctggatggtcacaaagggtaattttaaccagctgaaaaatacagtgctttcgttctttgtcaaagcagtagatgggggcatcccagtaaagcactccctcattcctgtctatatccacgtcttgccccctgaaacgttcttgccatcattcacccagtctcagtattcctttaccattgcagaagatacagccattgggagtacagtggacaccctgaggattttgcccagtcagaatgtctggttcagcacagttaatggggaacggccagaaaataacaaagggggcatattcgtcatagaacaggaaacaggcactattaagcttgacaaacgccttgaccgtgaaaccagcccagctttccactttaaagtagcagccactatacccctggacaaagtagacattgtgtttactgtggatgtagatatcaaggtattggatttgaatgacaacaagccagtctttgaaacttcaagctatgacaccattataatggaagggatgcctgttggcaccaaactcacacaagtgagagctattgatatggactggggagccaatggacaagtcacttactccctccactcggattcccagcccgaaaaggtaatggaagcattcaatattgacagcaacacgggctggatcagtaccttgaaggacctagatcacgagacagaccccacattcaccttctctgtggtggcctctgaccttggagaggcattctctctttcctccacggccttggtctctgtcagagtgacagatataaatgacaatgcaccagtcttcgcgcaggaagtgtaccgagggaatgtgaaggagagcgacccaccgggcgaggtggtagccgtcctcagcacctgggacagagacacatccgacgttaatcgccaagtgagctaccatattacaggaggaaaccctcgaggaaggtttgctctgggcctggtgcaaagtgagtggaaggtctatgtgaagaggcctctagacagagaagaacaggacatttactttctcaatatcactgccactgatgggctttttgtcacacaggccatggtggaagtgagcgtcagtgatgtgaatgacaatagcccagtgtgtgatcaggttgcatatacagcattacttcctgaagacattccatcaaataaaatcatcctgaaagtcagtgcaaaggatgctgatattggatccaatggatatatacgatactcactctatggatctggaaacagtgaattttttctagatccagaaagtggcgagttaaaaaccttggctctgttggaccgggagaggatccccgtgtacagcctgatggccaaggccactgacgggggtggcaggttctgccagtccaacatccacctaatcctggaggatgtgaatgataacccccctgtgttttcttctgaccactacaacacctgtgtctatgagaacacagccaccaaggctctgttgaccagagttcaagccgtggaccccgacattggcatcaataggaaggtcgtgtactccctggcagactcagctggtggggtcttctccattgacagctcatctggcatcatcatcctggagcagccactggaccgtgagcagcagtcttcgtacaacatcagcgtgcgggccactgaccagagtcctggacagtccctgtcctctctcactactgtcaccatcaccgttctggacattaatgacaacccccctgtgtttgagaggagggactacctggtgacggtgcctgaggacacctcccctggcacccaagtccttgctgtttttgccaccagcaaagatattggcacaaatgctgagatcacttatctcatccggtctgggaacgaacaagggaaatttaagatcaaccccaagacagggggtatttctgtctctgaagtcctggactatgaattatgcaaaaggttttacctggtagtggaagccaaagatgggggcaccccagctctcagcgctgtggccactgtcaacatcaacctcacagatgttaatgacaaccctcccaagttcagccaagacgtctacagtgcggttatcagtgaagacgccttggtgggagactctgtcattttgctaatagcagaagatgtagacagccagcccaacggacagattcatttttccattgtgaatggagatcgggacaatgaatttactgtagatcctgtcttgggacttgtgaaagttaagaagaaattggaccgggaacgggtgtctggatactctctgcttgtccaggccgtagacagtggcattcctgcaatgtcatcaactgcaactgtcaacattgatatttctgatgtgaatgacaacagcccggtgtttacacctgccaactatactgctgtgattcaggaaaataagccagtgggcaccagcatcttgcagctggtggtgacagacagagactcctttcacaatgggcctcccttttcattctctattttgtcgggaaatgaagaggaggagtttgtgttggaccctcatgggatcttgcggtcggctgtggtcttccagcacacagagtctctggaatacgtgttgtgtgtccaggcaaaggattcaggcaaaccccagcaagtttctcacacttacatccgcgtgcgagtcattgaggaaagcacccacaagcccacagccattcccctggaaattttcattgtcaccatggaggatgactttcctggtggggtcattgggaagattcatgccacagatcaagacatgtatgatgtgctcacatttgccctgaaatcggagcagaaaagcttatttaaagtgaacagtcacgatgggaaaatcatcgccctgggaggcctggacagcggcaagtatgtcctgaatgtgtctgtgagtgatggtcgcttccaggtacccattgatgtggtcgtgcatgtggagcagttggtgcatgagatgctgcagaacactgtcaccatccgctttgaaaatgtgtcccctgaggacttcgtggggctgcacatgcatgggttccggcgcaccctgcggaatgcagtcctcacccagaagcaggacagcctgcgcatcatcagcatccagcccgtggcaggcaccaaccaactggacatgctgtttgcggtggagatgcacagcagcgagttctacaagccagcctacctgatccagaagctgtccaatgctagaagacacctggagaatatcatgcgcatctcagccatcttggagaagaactgctcagggctggactgtcaggaacagcattgtgagcaaggcttgtcactcgattcccacgcgctcatgacctacagcacggctcgcatcagctttgtgtgtccgcgtttctacaggaacgtgcgttgcacctgcaatggaggactgtgtccggggtccaacgatccttgtgtggagaagccgtgtccaggggacatgcagtgtgtcagttatgaagccagcaggagaccgttcctctgccagtgtccaccagggaagctcggagagtgctcagggcacacttctctcagctttgctggaaacagttacatcaaatatcggctttctgaaaatagcaaagaagaggatttcaaactagctctgcgtcttcgaacactgcaaagcaatgggattataatgtacaccagagcaaatccctgcataattctgaagattgtggatggcaagctgtggttccagctggactgcggcagcggccctggaatcttgggcatctcgggccgtgctgtcaacgacgggagctggcactcggtcttcctggagctcaaccgcaatttcacgagcctgtccctggatgacagctacgtggagcggcgccgggcgcccctctacttccagacgctgagcactgagagtagcatctacttcggcgccctggtgcaagcggataacatccgcagcctgactgacacgcgggtcacgcaggtgctcagcggcttccagggctgcctggactcggtgatactgaataacaatgagctgccgctgcagaacaagcgcagcagcttcgcggaggtggtgggcctgacggagctgaagctgggctgcgtgctctatcccgacgcctgcaagcgcagcccgtgccagcacgggggcagctgcactggcctgccatcggggggctatcagtgtacctgtctctcacagtttacggggagaaactgtgaatctgagattacagcctgcttcccaaacccctgccggaatggaggatcctgcgatccaataggaaacactttcatctgcaattgtaaagctgggctcactggagtcacgtgtgaggaggacatcaatgagtgcgaacgagaggagtgtgagaacggaggctcctgcgtgaacgtgttcggctccttcctctgcaactgcacgccgggctacgtgggccagtactgcgggctgcgccccgtggtggtacccaatatccaggctggccactcctacgtggggaaggaggagctcatcggcatcgccgtggtcctcttcgtcatcttcatcctggtggttctcttcatagtcttccgcaagaaggtcttccgcaagaactactcccgcaacaacatcacgctagtgcaggacccggccaccgccgccctgcttaacaagagcaatggcatcccgttccggaacctgcgcggcagtggggacggccgcaacgtctaccaggaggtggggcccccgcaggtccccgtgcgccccatggcctacacaccctgcttccagagtgactccaggagcaacctggataagatcgtggacgggctgggaggcgagcaccaggaaatgaccacgtttcaccctgagtcgccccgcatcctgacagcccggcggggcgtggtcgtgtgcagtgtggcccccaacctccccgccgtgtcaccctgccgctccgactgcgactccatccggaagaatggctgggacgcgggaactgagaacaaaggggttgatgacccgggagaagtgacctgctttgcaggtagtaataaaggcagcaactctgaagttcagtccctcagctccttccagtcagattctggtgacgacaatgcctccatagtgactgtcattcagcttgtcaacaatgtagttgacactatagagaatgaagtgtctgtcatggaccaaggacagaactacaaccgagcctatcactgggacacctctgattggatgccaggggcccgcctgtcggacatagaggaagtgcccaactatgagaaccaggatggagggtctgcacaccaggggagcacacgggagctggagagcgattactacctgggtggttatgacattgacagtgaatacccaccccctcatgaagaggagttcttgagtcaggaccagctgcctcctcctctcccggaggacttcccagaccaatatgaggccctgccaccctcccagcctgtctccctggccagcacactgagcccagactgcaggagaaggccccagtttcatcctagccagtatctccctcctcacccattccccaacgaaacggatttggtgggcccgcctgccagctgtgaatttagtacttttgctgtgagcatgaaccagggcacagagcccacaggcccagcagacagcgtgtctctgtccttgcacaattccagaggcacctcatcctcggatgtgtctgccaactgcggctttgacgattccgaagtagccatgagtgactacgagagcgtgggagagctcagcctcgccagccttcacattccctttgtggagactcagcatcagactcaagtgtagacatcacatcttgggtacttcaccctgtttgttacagaaaagtggaagcagattggctgggcttctgtcccagtggagcattgtctgtggaatgagaagggaatactgtatttttccactagaaacttcttcacaagtcatactgtcccaacaagcaagcttgattccagttgggtgaaaatgaaaggctcagaaattgtttttgagaggtgactggtaatccttgatgtaggtacctatgttcacagctaaaaatgcaaagagggaaaaattatttcacccactaagttatacagccagtcttgtatggctttgtgcagtattgtgccctggaaagtgttacagcatcagtccttgcagtattaaaaactggcaacaatcaaagaggcattgttgcatgtaattttgagccaatgaaatgaaaatagtagtaatgattgttggaaaagttagtctcttaggcgaaagagaagagaaacaaatattattaaacaaaccagaaaatgggctgaagccttttaaatcaactctatttttttgataagctgcccaattttcagctataaaattaggcttgaataacatgtttagtatgctcagttatttctgtttgtttgtgttaagcatccaatctaatatagttgggttttatgatcttcaagaaaggtatcaatgaagagcaacatgaggctttttgggttccatttggtgggtgggggaggaagttaaagttgtttgaacattagaaagaatgtgattatctggttggttttgtgttttctggtaaatattccagttggtaaatctaacattgctacagaagttggctttgttcatatagcttctctacaattagatatttttagaagtttaagcaaaactcacaaattcaggggggaaaaaagaaaaaacgataccttcaaagtttgcggcctagataatcacaattcttcataatgcagaggaaaggtgtctgttattctaaatcggtagcatcaccattataaatacaattatgttaagaaaagaggaaagtagactagttattgtgtataaattataatagtgtgtgtgtgtctgggcctatgtacaaatatgtgcttgcactcagtaaggctgctcttgaggaaagctaatgtgaaggttttgggaaatggaccatgttgaaaattctgccggcgagcatggcatacctttcaatttctctgatctctatggtgttagagaaacatcaaatgccatattttactctggttcagttaactttattttggtactgccaataaagcaaaattgtgcttttttttttttttctcaagacagagtcttgctctgtcacccaggctagagtgcaatggcatgatctcagctcactgcaatctccacctcctgggttcaagcgattctcctgcctcagcctcccaggttgctggggttacaggtgtgtgccaccacgcctggctaattttttgtatttttagtagagatggggtttcaccatgttggccaggctggtctcaaactcctgacctcgtaatccacctgccgtggcctcccaaagtgctgggattacaggcatgagccaccgtgcccagcccaaaactgtgctttttaaaaacagtattttgttataattttccagaacttacctctgttttaaaagtgtgtaatgtttgattacaccctgggattcccttctcatctgtgggctttggccatgatttccaaaattaacaggagaatcattccactggaaatataacaatccagtcctcaaaactgaaagttgacaggttgagggactttccttttttgcttcaatcagattacggccgcctgtgcagtggccatggtaaatatatgcatatttgcactatctgcttaatgagcaaatctgtgtccacagtttctgatgacatatggcattggtgtgtaaattgtactgtccctagtctgtgcattattcactcagacatatttttagttatttcaattgcgtttaatccacttcttttttatgagtcagtgtttctgaatgtttatgcaaaaaaaaaaatcctttttcattcccaaactttctaagtaagtggatacactacacttcacaagttttccagcctttctcttcctgtctcttggtcagacctactcatggaggtattatccacactgtgatcttgaaataaatgaatttcactaaggctgctttcgagaacaaagtctttggtatttttcttatgtaagaagcacatttgcaagaatcatggaaaaaaatgacaaactaatggcctagaatagagtgactgctacactttaagtaatgcaatgacataaaaaccatcaaagtaaaaccaacatgtcatttcctgcccccaggaaatattagaatgagattaatgctgatgagtccctactgcttacacagcatctctttgagggagaatgcctgactgacacagtaatgaaagaataaatagatcctaatgcagtcatgaagccactgaagaaaattgtgcccaccctttgctgtgacctatataaaatatctctttctttgggatatcatcccctgattttctgcagaatagctctgcagctaaatatataccaggcaagcatgtattgtgttttgatttattatctttaaacacatgatatctcttcactttttggaaagttagatttctctgtagattatgaaatgctttgcagtcaggccaagatgctactaggtggggatgatcactaattcaaaaaagctggaagaatcctatttgctagtccaaactccttattttatcaaagaggaaacatacccagagtgggaaagagacttgcccaagcccacagaggaagttaattcgcttaacaaggagtagaacccatccatctagccaatattctttttacatcatattgttcacccctacactgccttgagcatgggagtcacctggttctgatggaccctctgacttccaccattccttctttggaatatgctataaaagaaaattcatggagaatatttttctgaaagcctcatgatcttatgtttccttgcagtccccctagggagaggggttatagaattcatacatttctgtagacattcatcgaaatgctgcttttgccaaatgaatgtttgtataatagggatgaaatgataattacagagttcagctcagaccagtcatcagttgtagtgaaactttgattatactgttacctactggttgcatttttggttttggttttgcatttttttcttcccacaaacactggctactctttgtcctaccccctccaccatgatgaaccatgtggaaactatttaaatcaattaatgtctttctcatttttcgaacatgtatgtgccacctcctggaagccatttcccataatctgttgtaggcactttactagtattgcacacattctggttaggttgagaatagctagactcttggtgctcgtcatatagtaagcaagaacttgggagtaataaaaggtgaataaaatgcatgcttcatttattccctttcctctatgaatattttgctgctgcattctagtctatgccagctttccatgtacccttggcctgcctattcatgaaatgccatataaaagacttaggaacatgagtaggtggtccatgctttgaggttcatccaattagggaataaatgtgaaaggctggaaagggaactagtttctgggatttgcctggaacttcccttggacattactagcacattctggaaaaaaagcaagttgaacatatctaccatcagtcctctcctacttacttcccaccccaccctatccactacccccactgatgctatgtttgcatcatcaaagtcaggggaattgagaaaagagattatcaaaataaattattaaaatccagaaaacagttttatgtgaagtaattcaggaagatctagtgttcattttgcatggattgtccagataattggctcttcactccgctgccttcccagtgcacaggtattgctaaagtggttaggctttaatgttttatgtttttagtttcaaactatgggaaatggagatttgaagaggcatttattccttgtcatcattttgtgtgctctgtgagaaggtggttatatgtttttgctggtttgtgtcccacagtgttcaactgcacattattctgatgaaaatccacaatgtctttgagcttctggttgtgtaatgctggggtttaaagtcaccatttgtgggtttggcatcaattaatatttagccagctggctaagagataggaaaagaatatgatatttctttccttatgtaataatgaaaagcaataattacaagtaggtaataatacacaaaggccataattagtctcttctagtgtttagaatgcacttgagaatcgtagagtcatttggagcgtgtttggaccaattagtatgtactgtagtacccttctggcaaacaaataactgaattgctactatttaacaatcttatgagcccacactactgcattttgggagtggcaaatgtgtttggaaatggaagcagttctttttaagcactgtatcagagagattgtcttgtacgtttgcctgttgcaaacaggctggtttgtaaaagatgtatgttttggtgtttgaaatgtttataaaattgtatataaatggtttcaattttccaggcttttgtagatactatatttgatgcctatcaggatgctttaatttggggggtcgaatataattgtaagtcatccacgctgttggtctgcaaacttttgaggtaactacacacacacacacacacacaaggattttagatttgaaaatgatgttttttactcatttcaaaatgtactgtaacctttctttggttcttactgttttcatttaactttctctgttttcaagaaaaattgtctttattgacatttgtaaaaaagaatgtgttttgcccagttattaagtattttatttttatgcaatttcagaatcacaatgaggtatgccatttcttcatatacatgcacattcacctcaacttgcacacacatcacacaccaaaccttatgcaaaggggaaagctaacacttagagtggattttgtcccttaaggaaatggattgttcctgcatatattgctggtggcagtattcagtcttgtgttctttttctaaaaaaaaagaaaagaaaagaaaaaaaaaacaaaagcaaacaaaaaaaaagacagccaaaaaaaagaaacaacaacaacaaaaaaaaacacaacagtgtacaggtttgtaactgccaaaatttgatggttaaaacaagttttcaagtaaaaagaaaaaaatgaaa

SEQ ID NO: 133282 - DNA, 7894 bp, Homo sapiens
  Payload ID: 6045
  Gene Symbol: FAT3
  Gene Name: FAT atypical cadherin 3
  ENST ID: ENST00000533797
  CDS Start-End: 24-2702
ctgaggacttcgtggggctgcacatgcatgggttccggcgcaccctgcggaatgcagtcctcacccagaagcaggacagcctgcgcatcatcagcatccagcccgtggcaggcaccaaccaactggacatgctgtttgcggtggagatgcacagcagcgagttctacaagccagcctacctgatccagaagctgtccaatgctagaagacacctggagaatatcatgcgcatctcagccatcttggagaagaactgctcagggctggactgtcaggaacagcattgtgagcaaggcttgtcactcgattcccacgcgctcatgacctacagcacggctcgcatcagctttgtgtgtccgcgtttctacaggaacgtgcgttgcacctgcaatggaggactgtgtccggggtccaacgatccttgtgtggagaagccgtgtccaggggacatgcagtgtgtcagttatgaagccagcaggagaccgttcctctgccagtgtccaccagggaagctcggagagtgctcagggcacacttctctcagctttgctggaaacagttacatcaaatatcggctttctgaaaatagcaaagaagaggatttcaaactagctctgcgtcttcgaacactgcaaagcaatgggattataatgtacaccagagcaaatccctgcataattctgaagattgtggatggcaagctgtggttccagctggactgcggcagcggccctggaatcttgggcatctcgggccgtgctgtcaacgacgggagctggcactcggtcttcctggagctcaaccgcaatttcacgagcctgtccctggatgacagctacgtggagcggcgccgggcgcccctctacttccagacgctgagcactgagagtagcatctacttcggcgccctggtgcaagcggataacatccgcagcctgactgacacgcgggtcacgcaggtgctcagcggcttccagggctgcctggactcggtgatactgaataacaatgagctgccgctgcagaacaagcgcagcagcttcgcggaggtggtgggcctgacggagctgaagctgggctgcgtgctctatcccgacgcctgcaagcgcagcccgtgccagcacgggggcagctgcactggcctgccatcggggggctatcagtgtacctgtctctcacagtttacggggagaaactgtgaatctgagattacagcctgcttcccaaacccctgccggaatggaggatcctgcgatccaataggaaacactttcatctgcaattgtaaagctgggctcactggagtcacgtgtgaggaggacatcaatgagtgcgaacgagaggagtgtgagaacggaggctcctgcgtgaacgtgttcggctccttcctctgcaactgcacgccgggctacgtgggccagtactgcgggctgcgccccgtggtggtacccaatatccaggctggccactcctacgtggggaaggaggagctcatcggcatcgccgtggtcctcttcgtcatcttcatcctggtggttctcttcatagtcttccgcaagaaggtcttccgcaagaactactcccgcaacaacatcacgctagtgcaggacccggccaccgccgccctgcttaacaagagcaatggcatcccgttccggaacctgcgcggcagtggggacggccgcaacgtctaccaggaggtggggcccccgcaggtccccgtgcgccccatggcctacacaccctgcttccagagtgactccaggagcaacctggataagatcgtggacgggctgggaggcgagcaccaggaaatgaccacgtttcaccctgagtcgccccgcatcctgacagcccggcggggcgtggtcgtgtgcagtgtggcccccaacctccccgccgtgtcaccctgccgctccgactgcgactccatccggaagaatggctgggacgcgggaactgagaacaaaggggttgatgacccgggagaagtgacctgctttgcaggtagtaataaaggcagcaactctgaagttcagtccctcagctccttccagtcagattctggtgacgacaatgcctatcactgggacacctctgattggatgccaggggcccgcctgtcggacatagaggaagtgcccaactatgagaaccaggatggagggtctgcacaccaggggagcacacgggagctggagagcgattactacctgggtggttatgacattgacagtgaatacccaccccctcatgaagaggagttcttgagtcaggaccagctgcctcctcctctcccggaggacttcccagaccaatatgaggccctgccaccctcccagcctgtctccctggccagcacactgagcccagactgcaggagaaggccccagtttcatcctagccagtatctccctcctcacccattccccaacgaaacggatttggtgggcccgcctgccagctgtgaatttagtacttttgctgtgagcatgaaccagggcacagagcccacaggcccagcagacagcgtgtctctgtccttgcacaattccagaggcacctcatcctcggatgtgtctgccaactgcggctttgacgattccgaagtagccatgagtgactacgagagcgtgggagagctcagcctcgccagccttcacattccctttgtggagactcagcatcagactcaagtgtagacatcacatcttgggtacttcaccctgtttgttacagaaaagtggaagcagattggctgggcttctgtcccagtggagcattgtctgtggaatgagaagggaatactgtatttttccactagaaacttcttcacaagtcatactgtcccaacaagcaagcttgattccagttgggtgaaaatgaaaggctcagaaattgtttttgagaggtgactggtaatccttgatgtaggtacctatgttcacagctaaaaatgcaaagagggaaaaattatttcacccactaagttatacagccagtcttgtatggctttgtgcagtattgtgccctggaaagtgttacagcatcagtccttgcagtattaaaaactggcaacaatcaaagaggcattgttgcatgtaattttgagccaatgaaatgaaaatagtagtaatgattgttggaaaagttagtctcttaggcgaaagagaagagaaacaaatattattaaacaaaccagaaaatgggctgaagccttttaaatcaactctatttttttgataagctgcccaattttcagctataaaattaggcttgaataacatgtttagtatgctcagttatttctgtttgtttgtgttaagcatccaatctaatatagttgggttttatgatcttcaagaaaggtatcaatgaagagcaacatgaggctttttgggttccatttggtgggtgggggaggaagttaaagttgtttgaacattagaaagaatgtgattatctggttggttttgtgttttctggtaaatattccagttggtaaatctaacattgctacagaagttggctttgttcatatagcttctctacaattagatatttttagaagtttaagcaaaactcacaaattcaggggggaaaaaagaaaaaacgataccttcaaagtttgcggcctagataatcacaattcttcataatgcagaggaaaggtgtctgttattctaaatcggtagcatcaccattataaatacaattatgttaagaaaagaggaaagtagactagttattgtgtataaattataatagtgtgtgtgtgtctgggcctatgtacaaatatgtgcttgcactcagtaaggctgctcttgaggaaagctaatgtgaaggttttgggaaatggaccatgttgaaaattctgccggcgagcatggcatacctttcaatttctctgatctctatggtgttagagaaacatcaaatgccatattttactctggttcagttaactttattttggtactgccaataaagcaaaattgtgcttttttttttttttctcaagacagagtcttgctctgtcacccaggctagagtgcaatggcatgatctcagctcactgcaatctccacctcctgggttcaagcgattctcctgcctcagcctcccaggttgctggggttacaggtgtgtgccaccacgcctggctaattttttgtatttttagtagagatggggtttcaccatgttggccaggctggtctcaaactcctgacctcgtaatccacctgccgtggcctcccaaagtgctgggattacaggcatgagccaccgtgcccagcccaaaactgtgctttttaaaaacagtattttgttataattttccagaacttacctctgttttaaaagtgtgtaatgtttgattacaccctgggattcccttctcatctgtgggctttggccatgatttccaaaattaacaggagaatcattccactggaaatataacaatccagtcctcaaaactgaaagttgacaggttgagggactttccttttttgcttcaatcagattacggccgcctgtgcagtggccatggtaaatatatgcatatttgcactatctgcttaatgagcaaatctgtgtccacagtttctgatgacatatggcattggtgtgtaaattgtactgtccctagtctgtgcattattcactcagacatatttttagttatttcaattgcgtttaatccacttcttttttatgagtcagtgtttctgaatgtttatgcaaaaaaaaaaatcctttttcattcccaaactttctaagtaagtggatacactacacttcacaagttttccagcctttctcttcctgtctcttggtcagacctactcatggaggtattatccacactgtgatcttgaaataaatgaatttcactaaggctgctttcgagaacaaagtctttggtatttttcttatgtaagaagcacatttgcaagaatcatggaaaaaaatgacaaactaatggcctagaatagagtgactgctacactttaagtaatgcaatgacataaaaaccatcaaagtaaaaccaacatgtcatttcctgcccccaggaaatattagaatgagattaatgctgatgagtccctactgcttacacagcatctctttgagggagaatgcctgactgacacagtaatgaaagaataaatagatcctaatgcagtcatgaagccactgaagaaaattgtgcccaccctttgctgtgacctatataaaatatctctttctttgggatatcatcccctgattttctgcagaatagctctgcagctaaatatataccaggcaagcatgtattgtgttttgatttattatctttaaacacatgatatctcttcactttttggaaagttagatttctctgtagattatgaaatgctttgcagtcaggccaagatgctactaggtggggatgatcactaattcaaaaaagctggaagaatcctatttgctagtccaaactccttattttatcaaagaggaaacatacccagagtgggaaagagacttgcccaagcccacagaggaagttaattcgcttaacaaggagtagaacccatccatctagccaatattctttttacatcatattgttcacccctacactgccttgagcatgggagtcacctggttctgatggaccctctgacttccaccattccttctttggaatatgctataaaagaaaattcatggagaatatttttctgaaagcctcatgatcttatgtttccttgcagtccccctagggagaggggttatagaattcatacatttctgtagacattcatcgaaatgctgcttttgccaaatgaatgtttgtataatagggatgaaatgataattacagagttcagctcagaccagtcatcagttgtagtgaaactttgattatactgttacctactggttgcatttttggttttggttttgcatttttttcttcccacaaacactggctactctttgtcctaccccctccaccatgatgaaccatgtggaaactatttaaatcaattaatgtctttctcatttttcgaacatgtatgtgccacctcctggaagccatttcccataatctgttgtaggcactttactagtattgcacacattctggttaggttgagaatagctagactcttggtgctcgtcatatagtaagcaagaacttgggagtaataaaaggtgaataaaatgcatgcttcatttattccctttcctctatgaatattttgctgctgcattctagtctatgccagctttccatgtacccttggcctgcctattcatgaaatgccatataaaagacttaggaacatgagtaggtggtccatgctttgaggttcatccaattagggaataaatgtgaaaggctggaaagggaactagtttctgggatttgcctggaacttcccttggacattactagcacattctggaaaaaaagcaagttgaacatatctaccatcagtcctctcctacttacttcccaccccaccctatccactacccccactgatgctatgtttgcatcatcaaagtcaggggaattgagaaaagagattatcaaaataaattattaaaatccagaaaacagttttatgtgaagtaattcaggaagatctagtgttcattttgcatggattgtccagataattggctcttcactccgctgccttcccagtgcacaggtattgctaaagtggttaggctttaatgttttatgtttttagtttcaaactatgggaaatggagatttgaagaggcatttattccttgtcatcattttgtgtgctctgtgagaaggtggttatatgtttttgctggtttgtgtcccacagtgttcaactgcacattattctgatgaaaatccacaatgtctttgagcttctggttgtgtaatgctggggtttaaagtcaccatttgtgggtttggcatcaattaatatttagccagctggctaagagataggaaaagaatatgatatttctttccttatgtaataatgaaaagcaataattacaagtaggtaataatacacaaaggccataattagtctcttctagtgtttagaatgcacttgagaatcgtagagtcatttggagcgtgtttggaccaattagtatgtactgtagtacccttctggcaaacaaataactgaattgctactatttaacaatcttatgagcccacactactgcattttgggagtggcaaatgtgtttggaaatggaagcagttctttttaagcactgtatcagagagattgtcttgtacgtttgcctgttgcaaacaggctggtttgtaaaagatgtatgttttggtgtttgaaatgtttataaaattgtatataaatggtttcaattttccaggcttttgtagatactatatttgatgcctatcaggatgctttaatttggggggtcgaatataattgtaagtcatccacgctgttggtctgcaaacttttgaggtaactacacacacacacacacacacaaggattttagatttgaaaatgatgttttttactcatttcaaaatgtactgtaacctttctttggttcttactgttttcatttaactttctctgttttcaagaaaaattgtctttattgacatttgtaaaaaagaatgtgttttgcccagttattaagtattttatttttatgcaatttcagaatcacaatgaggtatgccatttcttcatatacatgcacattcacctcaacttgcacacacatcacacaccaaaccttatgcaaaggggaaagctaacacttagagtggattttgtcccttaaggaaatggattgttcctgcatatattgctggtggcagtattcagtcttgtgttctttttct

SEQ ID NO: 133283 - DNA, 9669 bp, Homo sapiens
  Payload ID: 6046
  Gene Symbol: FAT4
  Gene Name: FAT atypical cadherin 4
  Uniprot ID: Q6V0I7
  ENST ID: ENST00000335110
  CDS Start-End: 1-9669
atggtaacaacggtagtggcagtgggtgataccttagctcaaccattagctgcagctgaagtgtttattgtagaaataacacttcaggatatcaatgacaatccaccagtatttccaacggacatgctggatctcacggtagaggagaacattggagatggctctaagattatgcagctgacagccatggatgctgatgagggtgcaaatgctctcgtcacatacactatcattagtggagctgatgatagttttcgcatcgacccagaatccggagatctgatagcaaccaggcggttggacagggaacgccgctccaaatattcactgctagttcgtgctgatgatggtcttcagtcctcggatatgagaattaatatcactgtcagtgatgtgaatgaccatacacccaaattttccagacccgtgtactcttttgacattcctgaggacacaatccctggttctttggtagcagccattttagccacggatgatgactctggtgtgaatggagaaattacatatattgtgaatgaagatgatgaagatggcatctttttcctgaatcctattactggggtctttaatttgactcgattattagattatgaagtacagcaatattatatcctcactgttcgagcagaagatggtgggggacaatttactaccatcagagtttatttcaatattctagatgtaaatgataatccacctattttcagcttgaattcatacagcacatctttaatggagaatctacctgtgggatctactgttcttgtgtttaatgttactgatgcagatgatggcatcaactctcaattgacttatagcattgcttcaggtgatagccttgggcagtttactgttgacaagaatggtgtactcaaagtcctaaaagctttggatcgggaaagtcagtccttctacaacttggttgttcaagtgcatgacctgccacagattccagcctccagattcacaagcactgctcaagtctccattattttgttggatgtaaatgataacccaccgacatttctttcccctaaattgacatacattccagaaaatacacctattgatactgttgttttcaaagctcaagcaactgacccagatagtggcccaaacagctatattgagtacactctgctgaaccctttgggaaacaagttcagtattgggaccattgatggtgaagtgaggctcactggagaactggacagagaagaagtttctaattatactctaacagtggtggctacagacaaaggtcaaccatctctctcttcatctacagaggttgtagttatggtacttgacatcaatgataacaaccccatctttgcacaagctttgtataaagtggagattaatgaaaacacacttactggaacagatataatacaagtgttcgcagcagatggagatgaaggcacaaatggacaggttcgctatggcattgttaatggtaataccaatcaggaatttcggatagactctgtcacaggtgccatcactgtcgctaaacctttggatagagaaaagacccctacctaccatttaactgttcaggcaacagatcgaggcagcacacccagaactgatacctccacggtcagcattgttctactggatattaatgactttgttcctgtatttgagctatctccatattctgtaaatgtccctgagaatttagggacactacccagaacaattcttcaggtggtggcaagagatgatgatcgaggatctaacagcaaactctcatatgttctgtttggtggtaatgaagacaatgcttttactctctcagccagtggagaacttggagtaacacagagtctggatcgggaaacaaaagagcgctttgtcttaatgattacagctacagattcaggatcccctgccttgactggaactggaacaatcaacgtcatagtagatgatgtcaatgacaatgtccccacatttgccagtaaagcgtatttcacaacaattcctgaggatgcaccaactggaacagatgttttattggtaaatgcctcagatgctgatgcttcaaagaatgcagttataaggatcatcggtggaaactctcagttcacgatcaacccatcgacaggacaaatcatcaccagcgcattgttagatagggaaacaaaagataattatactttggtagtggtctgcagtgatgcgggatccccagagcctctttccagttccaccagtgtgcttgtcactgtgactgatgtcaatgacaatccaccaagatttcagcatcacccatatgtcactcacatcccatctcctactcttccaggttcctttgtctttgcggttacagtcacagatgctgatattggaccaaattctgaactgcattattctctttcgggtagaaattctgaaaaatttcacattgacccactgaggggagccattatggccgccggaccactaaacggagcttcagaagtgacattttctgtgcatgtaaaagatggtggctcatttccaaagacagattctacaacagtgactgttagattcgtgaataaggccgatttccctaaagtgagagccaaagaacaaacgttcatgtttcctgaaaaccaaccagtcagctctcttgtcaccaccatcacaggatcctctttaagaggagaacctatgtcatattatatcgcaagtgggaatcttggcaatactttccagattgatcagttaacagggcaggtgtctattagtcaacctctggattttgaaaagatacaaaaatatgttgtatggatagaggccagagacggtggtttccctcctttctcctcttacgagaaacttgatataacagtattagatgtcaatgataatgccccaatttttaaggaagacccatttatatctgaaatattggaaaacctttcccctcgaaaaatacttactgtttcggcaatggacaaggacagtggacccaatggacagttagattatgaaattgttaatggcaacatggaaaatagtttcagtatcaatcatgctactggtgaaattagaagcgttagacctttggacagggaaaaagtatctcattatgtcctaaccataaaatcatcagacaaagggtccccgtctcagagtacttcagtaaaagtcatgattaacattttagatgaaaatgataatgcccctaggttttctcagatatttagtgcccatgttcctgaaaattcccccttaggatacacagttacccgtgtcacaacttctgatgaagacattgggatcaatgcaattagtagatattctataatggatgcaagtcttccatttacaattaatcccagcacaggggatattgtcataagcagacctttaaatagggaagatacagaccgttacagaattcgagtttccgcacatgattctgggtggactgtaagtacagatgtcacaatatttgtgacagacatcaatgacaatgctccaagatttagcagaacttcctattatttagattgccctgaacttactgagattggctccaaagtaactcaggtatttgcaacagatcctgatgagggatcaaatggacaagtgttttatttcataaaatcccaatcagaatatttcaggattaatgccaccactggagagattttcaataaacagatcttaaaataccaaaatgtcactggcttcagtaatgtgaatatcaacaggcatagttttatagtgacatcttcagatcgaggtaaaccttccttaattagtgagacaacagttaccatcaatatagtggacagtaatgacaatgcacctcaatttcttaaaagtaaatatttcactccagtcaccaaaaatgttaaggttggtacgaagttaatcagagttacagcaatagatgacaaagattttggactgaattcagaagtggagtatttcatttctaatgataaccatttaggaaaatttaagttggacaatgatacggggtggatttcagtagcatcctccctgatttctgacttgaaccaaaacttttttatcacagtcactgcaaaggataagggaaaccctccactttcttcccaagcaactgttcacataactgtcactgaggaaaactaccatacacctgaattctctcaaagccacatgagtgcaaccatccctgagagccatagcattgggtccattgtcagaactgtttctgcaagagatagagatgcagcgatgaatggcttgattaagtacagcatttcttcaggaaatgaagaaggcatttttgcaatcaattcttctacaggtatattaacactagccaaagctcttgattatgagctatgccagaaacacgaaatgacgattagtgctatagatggaggatgggttgcaagaactggttactgcagtgtgaccgtaaatgtgattgatgtgaatgataattctccagtattcctctctgatgactatttccctactgttttggaaaatgccccaagtggaacaacagttatccacctaaatgcaacagatgctgactctggaacaaatgctgtgattgcgtatactgtacagtcatctgacagtgacctctttgtcattgaccctaacacaggagtcataaccactcaaggcttcttggattttgaaaccaagcagagctaccatcttactgtgaaagccttcaatgtccccgatgaggaaaggtgtagctttgccactgttaatatacaattaaaagggacaaatgaatatgtgccccgttttgtttccaaactttactattttgaaatctcagaagcagctcctaaaggtactattgttggagaagtgtttgctagcgaccgtgatttgggcactgatggggaggtacactatttgatttttggtaatagtcgaaagaagggtttccagatcaataagaagactggacagatttatgtttctggaattcttgatcgagaaaaagaagaaagggtgtctttgaaggtattggccaagaactttggcagcattagaggtgcagatatagatgaggtcactgtaaatgtcaccgtgcttgatgcaaatgacccacccatttttactctaaacatctacagtgtgcagatcagtgaaggggtcccaataggaactcatgtgacctttgtcagtgcctttgactcagactccatccccagctggagcaggttttcttacttcatcggatcagggaatgaaaatggtgccttttctattaatccgcagacaggacagatcaccgttactgcagaattagatcgagaaacccttcccatctataatctctcagttttggctgttgattcagggaccccctcagctacaggtagtgcctctttattagtcaccctggaagatataaatgataacgggcccatgctgactgtcagtgaaggagaagtcatggaaaacaaacggccaggcactttggtgatgacccttcagtccactgaccctgatctccctccaaatcaaggtccctttacttattacttgctgagcacaggtcctgccaccagttatttcagtctgagcactgctggagttctgagcacaaccagagagattgacagagagcagattgcagacttctatctgtctgtggttaccaaggattctggtgttcctcaaatgtcttccacaggaactgtgcatatcacagttatagaccaaaatgacaatccttcacagtctcggacggtggagatatttgttaattattatggtaacttgtttcccggtgggattttaggctctgtgaagccacaggatccagatgtgttagacagcttccactgctcccttacttcaggagttaccagcctcttcagtattccagggggtacttgtgatctgaattcccagccaaggtccacagatggcacgtttgatctgactgtccttagcaatgatggagttcacagcacagtcacgagcaacatccgagttttctttgctggattttccaatgccacagtggataacagcatcttacttcgtctcggcgtaccaacagtaaaggacttcttgaccaaccactatcttcattttttacgcattgccagctcacagctgacaggcttagggactgctgtgcaactgtacagtgcatatgaagagaacaatagaacgtttcttttggcagctgtgaagcgaaatcataatcagtatgtgaatcccagtggcgtagccaccttctttgaaagcatcaaagagatccttctccggcagagtggagtaaaggtggaatctgtggatcatgactcctgtgtgcatggcccatgtcagaatggagggagctgtctacgaagattggctgtgagctccgtattaaaaagccgtgagagtcttccagtcatcatcgtggcaaatgaacctctgcagcctttcttatgcaagtgtctgccaggatatgcgggtagctggtgtgaaatagatatagatgaatgtcttccatcaccttgccacagtggtggaacctgtcacaatttagtgggaggattttcatgcagctgcccagatggcttcactggtagggcgtgtgagagagatatcaatgagtgcctgcagagtccttgcaagaatggtgccatctgccagaattttccaggaagcttcaactgtgtttgcaaaactggatacacaggtgtctttggaaaacactgcgagttgaacagttatggatttgaggagttatcatacatggaatttccaagcttggaccccaataacaactatatttatgtcaaatttgccacgattaaaagtcatgccttattgctttacaactatgacaaccagacaggcgaccgggctgagtttttggcccttgaaattgccgaagaaagactaagattctcttataatttaggcagtggtacatataagctcaccaccatgaagaaggtgtcagatggacattttcacactgtgattgccaggagagcaggaatggcagcctccttaactgtggactcctgttctgagaaccaagagccaggatattgtactgtcagtaatgtggcagtttcagatgactggactcttgatgttcagccaaatagagttacagttggaggtatcagatctctagaaccaatccttcagagaagaggacacgtggaaagccatgattttgttgggtgtataatggagtttgcagtcaatggaaggcctctggaacccagccaagctttggcagcacaaggcatcctagatcagtatggcgattttatttcttactgttttaaagaaaaaaaatgcaaaaaagtatgcttcactgttactcctgacactgccttatcattagaaggcaaagggcgcttggactaccacatgagtcagaatgagaagcgggaatatttgttaaggcaaagcttacgaggtgccatgttggagccttttggtgtgaacagtctggaagtaaaatttaggaccagaagcgagaatggcgttttaatccatatccaagaaagcagcaattacactactgtgaagattaagaatggcaaagtatattttacatccgatgcaggaattgctgggaaagtggagagaaatattcctgaagtatatgttgcagacggccactggcacacttttctaattgggaaaaatggaacagcaacagtattgtctgttgacagaatatataacagagatattatccaccctactcaggacttcggtggccttgatgtgcttactatatcacttggaggaattccacccaatcaagcacatcgagatgcccaaacagcaggttttgatggctgcattgcttctatgtggtatggtggagaaagtcttcctttcagcgggaagcatagcttggcctccatctcaaaaacagatccctcagtgaagattggctgccgtggcccgaacatttgtgccagcaacccctgctggggtgatttgctgtgcattaatcagtggtatgcctacaggtgtgtccctcctggggactgtgcctcccacccgtgccagaatggtggcagctgtgagccaggcctgcactccggcttcacctgtagctgcccagactcgcacacgggaaggacctgtgagatggtggtggcctgtcttggcgtcctctgtcctcaggggaaggtgtgcaaagctggaagtcctgcggggcatgtctgtgttctgagtcagggccctgaagagatctctctgcctttgtgggctgtgcctgccatcgtgggcagctgcgcaaccgtcttggccctcctggtccttagcctgatcctgtgtaaccagtgcagggggaagaaggccaaaaatcccaaagaggagaagaaaccgaaggagaagaagaaaaagggaagtgagaacgttgcttttgatgaccctgacaatatccctccctatggggatgacatgactgtgaggaagcagcctgaagggaacccaaaaccagatatcattgaaagggaaaacccctaccttatctatgatgaaactgatattcctcacaactcagaaaccatccccagcgcccctttggcatctccagagcaggagatagagcactatgacattgacaacgccagcagcatcgccccttcggatgcagacatcattcaacactacaagcagttccgcagccacacaccaaaattttcaatccagaggcacagtcccctaggctttgcaaggcaatcccccatgcccttaggagcaagcagtttgacttaccagccttcatatggtcaaggtttgagaaccagctccctaagccactcagcatgcccaactcccaaccctctgtctcgacacagtccagcccctttctccaaatcttctacgttctatagaaacagcccagcaagggaattgcatcttcctataagggatggtaatactttggaaatgcatggtgacacctgccaacctggcattttcaactatgccacaaggctgggaaggagaagcaagagtcctcaggccatggcatcacatggttctagaccagggagtcgcctaaagcagccgattgggcagattccactggaatcttctcctccagtcggactttctattgaagaagtggagaggctcaacacacctcgccctagaaacccaagtatctgcagtgcagaccatgggaggtcttcttcagaggaggactgcagaaggccactgtctagaacaaggaatccagcggatggcattccagctccagaatcctcttctgatagtgactcccatgaatctttcacttgctcagaaatggaatatgacagggagaagccaatggtatatacttccagaatgcccaaattatctcaagtcaatgaatctgatgcagatgatgaagataattatggagccagactgaagcctcgaaggtaccacggtcgcagggccgagggaggacctgtgggcacccaggcagcagcaccaggcactgctgacaacacactgcccatgaagctagggcagcaagcagggactttcaactgggacaaccttttgaactggggccctggctttggccattatgtagatgtttttaaagatttggcatctcttccagaaaaagcagcagcaaatgaagaaggcaaagctgggacaactaaaccagtccccaaagatggggaagcagaacagtatgtgtga

SEQ ID NO: 133284 - DNA, 16123 bp, Homo sapiens
  Payload ID: 6046
  Gene Symbol: FAT4
  Gene Name: FAT atypical cadherin 4
  Uniprot ID: Q6V0I7
  ENST ID: ENST00000394329
  CDS Start-End: 14-14959
gggagccaggaccatggacttagcaccagacagggctactggccgcccgtggctcccgttgcacactctatcagtatctcagctccttcgagtgttttggctactgtcattgcttccggggcaggcctgggtccacggggccgagccgcgccaggtgttccaagtgctggaagagcaacctccaggcactctggtaggcaccatccagacgcgccccggcttcacctacaggctcagcgaaagccacgccctgtttgccataaacagtagcaccggagccctgtacaccacctccaccatcgaccgcgagagcctgcccagcgacgtgatcaacctggtggtcctttccagcgcgcccacctaccccaccgaagtgcgagtgctggtgcgggacctcaatgacaacgcccccgttttcccggacccctctatcgtggtcactttcaaggaagacagtagcagcggacgccaagtcatcttagacaccgccaccgactcggacatcggctcaaacggtgtggaccaccgctcctaccgcatcatccgcggcaatgaggcggggcgcttccgtctggacatcaccctgaacccgagcggcgagggagcgttcctgcatctggtgtccaagggcggactggaccgtgaggtcactccgcagtaccagctcctggttgaggtggaggacaagggtgagcctaagcggcggggctaccttcaggtaaacgtgactgtgcaagacattaatgacaaccccccggtttttggcagttctcactaccaggcgggggtgcctgaggacgcggttgtgggttccagcgtcctccaggtggcggcggcggacgcggacgagggcaccaacgcggacatccgctatcgcctgcaggacgaggggacccccttccaaatggaccctgagacgggacttatcacggtgcgggagcccctggacttcgaagctcggcgccaatactcgcttacggtgcaggcgatggacagaggcgtgccttccctcactgggcgcgccgaggcgctgattcagctgctggacgtgaatgacaatgacccggtagtgaagttccgctacttcccggccacctcgcgctacgcctcggtagatgagaatgctcaagtgggcaccgtggtggctctgctcaccgtgacggacgcagattctcccgcggccaacgggaacatctccgtgcaaattctcgggggcaatgagcagcgccactttgaagtgcaaagcagcaaagtgccgaacctgagcctaatcaaggtggccagcgccttggaccgcgagcgcatcccttcctacaacctcacagtttccgtctctgataactacggggcgccccctggcgcagcagtccaggcgcgctcttctgtggcaagcctggtgatttttgttaatgacatcaatgaccatcctcctgtcttttcacagcaagtgtacagagtgaacctgagcgaggaggcgcctccgggaagctatgtgagtgggatatctgccactgatggcgactctggtctcaatgctaatctgcgttacagcattgtctctggcaatggactgggatggttccatatcagtgaacatagcggcctcgtgaccactgggtcctctgggggcctggaccgtgaacttgcttcccagattgttctgaatataagtgcccgggaccagggagttcaccccaaggtgtcctatgcccagcttgtagtaactctcctagatgtgaatgatgaaaagccagtatttagccagccagaagggtatgatgtgtctgtggttgagaatgccccaacagggacagaactgttgatgctcagggcaactgacggggacctgggtgacaacggaacagtgcgcttctccttacaagaggcagagactgaccggaggtccttccgtctggatcctgtgtctgggaggttgagtactatttcctccttggacagagaagagcaagccttctactccctgttggttctggccacagatctgggctcccctccccagtcatcaatggctcgcataaatgtgagtcttctggatataaatgataacagccctgtcttctacccggtccaatactttgctcacattaaggagaatgagcctggaggtagctacatcaccactgtgtctgccactgacccagacttgggtaccaatggtactgtcaaatatagcatatctgctggggacaggtctcggtttcaggtcaatgctcagagtggggttatttctacaagaatggccctagacagagaagaaaaaacagcttatcagttgcaaatagtagctactgatggtggcaatttacaatctcccaaccaggcaatagtaaccatcactgtattggacactcaagacaacccacctgtattcagtcaggttgcctacagctttgtggtttttgagaacgtggcgctgggatatcatgtgggtagtgtgtctgcatccaccatggatctcaattccaacatcagttatctcattactactggggatcagaaaggtatgtttgctatcaaccaggtcactgggcagcttaccacagcaaatgtgattgatagagaagagcaatccttttatcagctgaaggtagtggccagtgggggcacagtgactggagacactatggttaacataacagttaaggatttgaatgacaactctccccatttccttcaggcaatagagagtgtaaatgtggtggagaattggcaggcaggtcacagcattttccaggccaaagctgtggaccctgatgaaggtgtcaatggcatggtactctatagtctgaagcaaaaccccaagaacctgtttgctatcaatgaaaagaatggcactattagtctgcttgggcccctggatgttcatgctggctcctaccaaatagagatcttggcatctgacatgggtgtcccacagctctcctctagtgtcatcttaacagtttatgtccatgatgtaaatgacaattcaccagtgtttgaccaactctcttatgaagtcaccctttctgagtcagaacctgtgaattctcgattctttaaagtacaagcttctgataaggattcaggagcaaatggtgaaattgcatacaccattgctgaaggaaatacaggggatgcttttggcatattcccagatggtcaattgtatataaaaagtgaactggaccgtgaacttcaagacagatatgttttaatggttgttgcttctgacagagcagtggaaccccttagtgctactgtgaatgttactgtaattttagaagatgtaaatgataacagacctctttttaacagtaccaattacacattttacttcgaagaagagcagagggctgggtcgtttgtgggcaaagtaagtgctgtagataaagactttgggccaaatggagaagtaaggtattcttttgaaatggtgcagccagattttgagttgcatgccatcagtggggaaattacaaatactcatcagtttgacagggagtctcttatgaggcggagagggactgctgtgtttagctttacagtcatagcaacagatcaggggatccctcagcctctcaaggatcaggccactgtacatgtttacatgaaggatataaatgataatgctcccaaatttttaaaagacttttaccaagctacaatatcagaatcagcagccaatctgacacaagtgttaagagtatctgcctcagatgttgatgaaggtaataatggacttattcactattctataataaaaggaaatgaagaaagacagtttgctatagacagtacctctggtcaggtaacactaattggcaaattagactatgaagcaacacctgcctattcccttgtaattcaagcagtggattcagggacaatccccctcaattcaacgtgtactttaaatattgatattttagatgaaaatgacaataccccttctttccctaaatcaacactctttgttgatgttttggaaaacatgagaattggtgaactcgtgtcctctgttactgcaactgattccgattcaggtgacaatgctgatttatattacagtattactgggactaacaaccacggaacttttagcattagcccaaacactgggagtatttttcttgccaaaaaactggactttgaaacacagtctttgtataaattaaatataacagcaaaagaccaaggaagacctcctcgttcatctacaatgtcagtggttattcacgtgagggactttaatgacaatcctcctagctttcctcctggagatattttcaagtctattgttgagaacattcccatcggtacatctgtcatttcagtgactgcacatgaccctgatgcagacattaatggtcaactatcctacacaatcattcaacagatgccaagaggcaaccactttaccatagatgaagtcaaagggactatatatactaatgctgaaatagatcgggaatttgctaatctctttgagttgactgtaaaagccaatgatcaagctgtgccaatagaaactagacggtatgctttgaagaacgtgaccattttggttacagacctcaatgacaatgtcccaatgtttatatcacaaaacgcccttgctgcagacccatcagctgtgattggttccgttctgacaacaattatggctgctgacccagatgaaggtgctaatggagaaatagagtatgagatcatcaatggggacacagacaccttcattgttgatcgttatagtggagacctgagagtggcttcagcgttggtgccttcacagttgatctacaatctcatagtttcagcaacagaccttgggcctgaaaggaggaaatcgaccactgaattgaccatcattcttcagggccttgatggacctgtttttactcaacccaaatatataactattttgaaggaaggagaacccattggcacaaacgtgatatcaatagaagcagctagccccagaggatctgaggccccagtggagtattatattgtttcagttcgttgtgaagaaaaaactgttggacgcctctttactattggacgacatactggtataattcagaccgcagccattctggaccgggagcaaggagcatgtctttacctggtggatgtttatgccatagaaaaatcaactgcttttcccagaacacagagagcagaggtagaaataacacttcaggatatcaatgacaatccaccagtatttccaacggacatgctggatctcacggtagaggagaacattggagatggctctaagattatgcagctgacagccatggatgctgatgagggtgcaaatgctctcgtcacatacactatcattagtggagctgatgatagttttcgcatcgacccagaatccggagatctgatagcaaccaggcggttggacagggaacgccgctccaaatattcactgctagttcgtgctgatgatggtcttcagtcctcggatatgagaattaatatcactgtcagtgatgtgaatgaccatacacccaaattttccagacccgtgtactcttttgacattcctgaggacacaatccctggttctttggtagcagccattttagccacggatgatgactctggtgtgaatggagaaattacatatattgtgaatgaagatgatgaagatggcatctttttcctgaatcctattactggggtctttaatttgactcgattattagattatgaagtacagcaatattatatcctcactgttcgagcagaagatggtgggggacaatttactaccatcagagtttatttcaatattctagatgtaaatgataatccacctattttcagcttgaattcatacagcacatctttaatggagaatctacctgtgggatctactgttcttgtgtttaatgttactgatgcagatgatggcatcaactctcaattgacttatagcattgcttcaggtgatagccttgggcagtttactgttgacaagaatggtgtactcaaagtcctaaaagctttggatcgggaaagtcagtccttctacaacttggttgttcaagtgcatgacctgccacagattccagcctccagattcacaagcactgctcaagtctccattattttgttggatgtaaatgataacccaccgacatttctttcccctaaattgacatacattccagaaaatacacctattgatactgttgttttcaaagctcaagcaactgacccagatagtggcccaaacagctatattgagtacactctgctgaaccctttgggaaacaagttcagtattgggaccattgatggtgaagtgaggctcactggagaactggacagagaagaagtttctaattatactctaacagtggtggctacagacaaaggtcaaccatctctctcttcatctacagaggttgtagttatggtacttgacatcaatgataacaaccccatctttgcacaagctttgtataaagtggagattaatgaaaacacacttactggaacagatataatacaagtgttcgcagcagatggagatgaaggcacaaatggacaggttcgctatggcattgttaatggtaataccaatcaggaatttcggatagactctgtcacaggtgccatcactgtcgctaaacctttggatagagaaaagacccctacctaccatttaactgttcaggcaacagatcgaggcagcacacccagaactgatacctccacggtcagcattgttctactggatattaatgactttgttcctgtatttgagctatctccatattctgtaaatgtccctgagaatttagggacactacccagaacaattcttcaggtggtggcaagagatgatgatcgaggatctaacagcaaactctcatatgttctgtttggtggtaatgaagacaatgcttttactctctcagccagtggagaacttggagtaacacagagtctggatcgggaaacaaaagagcgctttgtcttaatgattacagctacagattcaggatcccctgccttgactggaactggaacaatcaacgtcatagtagatgatgtcaatgacaatgtccccacatttgccagtaaagcgtatttcacaacaattcctgaggatgcaccaactggaacagatgttttattggtaaatgcctcagatgctgatgcttcaaagaatgcagttataaggatcatcggtggaaactctcagttcacgatcaacccatcgacaggacaaatcatcaccagcgcattgttagatagggaaacaaaagataattatactttggtagtggtctgcagtgatgcgggatccccagagcctctttccagttccaccagtgtgcttgtcactgtgactgatgtcaatgacaatccaccaagatttcagcatcacccatatgtcactcacatcccatctcctactcttccaggttcctttgtctttgcggttacagtcacagatgctgatattggaccaaattctgaactgcattattctctttcgggtagaaattctgaaaaatttcacattgacccactgaggggagccattatggccgccggaccactaaacggagcttcagaagtgacattttctgtgcatgtaaaagatggtggctcatttccaaagacagattctacaacagtgactgttagattcgtgaataaggccgatttccctaaagtgagagccaaagaacaaacgttcatgtttcctgaaaaccaaccagtcagctctcttgtcaccaccatcacaggatcctctttaagaggagaacctatgtcatattatatcgcaagtgggaatcttggcaatactttccagattgatcagttaacagggcaggtgtctattagtcaacctctggattttgaaaagatacaaaaatatgttgtatggatagaggccagagacggtggtttccctcctttctcctcttacgagaaacttgatataacagtattagatgtcaatgataatgccccaatttttaaggaagacccatttatatctgaaatattggaaaacctttcccctcgaaaaatacttactgtttcggcaatggacaaggacagtggacccaatggacagttagattatgaaattgttaatggcaacatggaaaatagtttcagtatcaatcatgctactggtgaaattagaagcgttagacctttggacagggaaaaagtatctcattatgtcctaaccataaaatcatcagacaaagggtccccgtctcagagtacttcagtaaaagtcatgattaacattttagatgaaaatgataatgcccctaggttttctcagatatttagtgcccatgttcctgaaaattcccccttaggatacacagttacccgtgtcacaacttctgatgaagacattgggatcaatgcaattagtagatattctataatggatgcaagtcttccatttacaattaatcccagcacaggggatattgtcataagcagacctttaaatagggaagatacagaccgttacagaattcgagtttccgcacatgattctgggtggactgtaagtacagatgtcacaatatttgtgacagacatcaatgacaatgctccaagatttagcagaacttcctattatttagattgccctgaacttactgagattggctccaaagtaactcaggtatttgcaacagatcctgatgagggatcaaatggacaagtgttttatttcataaaatcccaatcagaatatttcaggattaatgccaccactggagagattttcaataaacagatcttaaaataccaaaatgtcactggcttcagtaatgtgaatatcaacaggcatagttttatagtgacatcttcagatcgaggtaaaccttccttaattagtgagacaacagttaccatcaatatagtggacagtaatgacaatgcacctcaatttcttaaaagtaaatatttcactccagtcaccaaaaatgttaaggttggtacgaagttaatcagagttacagcaatagatgacaaagattttggactgaattcagaagtggagtatttcatttctaatgataaccatttaggaaaatttaagttggacaatgatacggggtggatttcagtagcatcctccctgatttctgacttgaaccaaaacttttttatcacagtcactgcaaaggataagggaaaccctccactttcttcccaagcaactgttcacataactgtcactgaggaaaactaccatacacctgaattctctcaaagccacatgagtgcaaccatccctgagagccatagcattgggtccattgtcagaactgtttctgcaagagatagagatgcagcgatgaatggcttgattaagtacagcatttcttcaggaaatgaagaaggcatttttgcaatcaattcttctacaggtatattaacactagccaaagctcttgattatgagctatgccagaaacacgaaatgacgattagtgctatagatggaggatgggttgcaagaactggttactgcagtgtgaccgtaaatgtgattgatgtgaatgataattctccagtattcctctctgatgactatttccctactgttttggaaaatgccccaagtggaacaacagttatccacctaaatgcaacagatgctgactctggaacaaatgctgtgattgcgtatactgtacagtcatctgacagtgacctctttgtcattgaccctaacacaggagtcataaccactcaaggcttcttggattttgaaaccaagcagagctaccatcttactgtgaaagccttcaatgtccccgatgaggaaaggtgtagctttgccactgttaatatacaattaaaagggacaaatgaatatgtgccccgttttgtttccaaactttactattttgaaatctcagaagcagctcctaaaggtactattgttggagaagtgtttgctagcgaccgtgatttgggcactgatggggaggtacactatttgatttttggtaatagtcgaaagaagggtttccagatcaataagaagactggacagatttatgtttctggaattcttgatcgagaaaaagaagaaagggtgtctttgaaggtattggccaagaactttggcagcattagaggtgcagatatagatgaggtcactgtaaatgtcaccgtgcttgatgcaaatgacccacccatttttactctaaacatctacagtgtgcagatcagtgaaggggtcccaataggaactcatgtgacctttgtcagtgcctttgactcagactccatccccagctggagcaggttttcttacttcatcggatcagggaatgaaaatggtgccttttctattaatccgcagacaggacagatcaccgttactgcagaattagatcgagaaacccttcccatctataatctctcagttttggctgttgattcagggaccccctcagctacaggtagtgcctctttattagtcaccctggaagatataaatgataacgggcccatgctgactgtcagtgaaggagaagtcatggaaaacaaacggccaggcactttggtgatgacccttcagtccactgaccctgatctccctccaaatcaaggtccctttacttattacttgctgagcacaggtcctgccaccagttatttcagtctgagcactgctggagttctgagcacaaccagagagattgacagagagcagattgcagacttctatctgtctgtggttaccaaggattctggtgttcctcaaatgtcttccacaggaactgtgcatatcacagttatagaccaaaatgacaatccttcacagtctcggacggtggagatatttgttaattattatggtaacttgtttcccggtgggattttaggctctgtgaagccacaggatccagatgtgttagacagcttccactgctcccttacttcaggagttaccagcctcttcagtattccagggggtacttgtgatctgaattcccagccaaggtccacagatggcacgtttgatctgactgtccttagcaatgatggagttcacagcacagtcacgagcaacatccgagttttctttgctggattttccaatgccacagtggataacagcatcttacttcgtctcggcgtaccaacagtaaaggacttcttgaccaaccactatcttcattttttacgcattgccagctcacagctgacaggcttagggactgctgtgcaactgtacagtgcatatgaagagaacaatagaacgtttcttttggcagctgtgaagcgaaatcataatcagtatgtgaatcccagtggcgtagccaccttctttgaaagcatcaaagagatccttctccggcagagtggagtaaaggtggaatctgtggatcatgactcctgtgtgcatggcccatgtcagaatggagggagctgtctacgaagattggctgtgagctccgtattaaaaagccgtgagagtcttccagtcatcatcgtggcaaatgaacctctgcagcctttcttatgcaagtgtctgccaggatatgcgggtagctggtgtgaaatagatatagatgaatgtcttccatcaccttgccacagtggtggaacctgtcacaatttagtgggaggattttcatgcagctgcccagatggcttcactggtagggcgtgtgagagagatatcaatgagtgcctgcagagtccttgcaagaatggtgccatctgccagaattttccaggaagcttcaactgtgtttgcaaaactggatacacagggaaaatgtgtgaatcttcagtcaattactgtgaatgcaacccctgctttaatggtggttcctgccaaagtggtgtggattcttattattgtcattgtccatttggtgtctttggaaaacactgcgagttgaacagttatggatttgaggagttatcatacatggaatttccaagcttggaccccaataacaactatatttatgtcaaatttgccacgattaaaagtcatgccttattgctttacaactatgacaaccagacaggcgaccgggctgagtttttggcccttgaaattgccgaagaaagactaagattctcttataatttaggcagtggtacatataagctcaccaccatgaagaaggtgtcagatggacattttcacactgtgattgccaggagagcaggaatggcagcctccttaactgtggactcctgttctgagaaccaagagccaggatattgtactgtcagtaatgtggcagtttcagatgactggactcttgatgttcagccaaatagagttacagttggaggtatcagatctctagaaccaatccttcagagaagaggacacgtggaaagccatgattttgttgggtgtataatggagtttgcagtcaatggaaggcctctggaacccagccaagctttggcagcacaaggcatcctagatcaatgccctaggctggaaggcgcttgtactcgcagcccatgccaacatggtggcacatgtatggattactggtcatggcagcagtgtcattgcaaagagggactcactgggaaatactgtgaaaaatctgttactcctgacactgccttatcattagaaggcaaagggcgcttggactaccacatgagtcagaatgagaagcgggaatatttgttaaggcaaagcttacgaggtgccatgttggagccttttggtgtgaacagtctggaagtaaaatttaggaccagaagcgagaatggcgttttaatccatatccaagaaagcagcaattacactactgtgaagattaagaatggcaaagtatattttacatccgatgcaggaattgctgggaaagtggagagaaatattcctgaagtatatgttgcagacggccactggcacacttttctaattgggaaaaatggaacagcaacagtattgtctgttgacagaatatataacagagatattatccaccctactcaggacttcggtggccttgatgtgcttactatatcacttggaggaattccacccaatcaagcacatcgagatgcccaaacagcaggttttgatggctgcattgcttctatgtggtatggtggagaaagtcttcctttcagcgggaagcatagcttggcctccatctcaaaaacagatccctcagtgaagattggctgccgtggcccgaacatttgtgccagcaacccctgctggggtgatttgctgtgcattaatcagtggtatgcctacaggtgtgtccctcctggggactgtgcctcccacccgtgccagaatggtggcagctgtgagccaggcctgcactccggcttcacctgtagctgcccagactcgcacacgggaaggacctgtgagatggtggtggcctgtcttggcgtcctctgtcctcaggggaaggtgtgcaaagctggaagtcctgcggggcatgtctgtgttctgagtcagggccctgaagagatctctctgcctttgtgggctgtgcctgccatcgtgggcagctgcgcaaccgtcttggccctcctggtccttagcctgatcctgtgtaaccagtgcagggggaagaaggccaaaaatcccaaagaggagaagaaaccgaaggagaagaagaaaaagggaagtgagaacgttgcttttgatgaccctgacaatatccctccctatggggatgacatgactgtgaggaagcagcctgaagggaacccaaaaccagatatcattgaaagggaaaacccctaccttatctatgatgaaactgatattcctcacaactcagaaaccatccccagcgcccctttggcatctccagagcaggagatagagcactatgacattgacaacgccagcagcatcgccccttcggatgcagacatcattcaacactacaagcagttccgcagccacacaccaaaattttcaatccagaggcacagtcccctaggctttgcaaggcaatcccccatgcccttaggagcaagcagtttgacttaccagccttcatatggtcaaggtttgagaaccagctccctaagccactcagcatgcccaactcccaaccctctgtctcgacacagtccagcccctttctccaaatcttctacgttctatagaaacagcccagcaagggaattgcatcttcctataagggatggtaatactttggaaatgcatggtgacacctgccaacctggcattttcaactatgccacaaggctgggaaggagaagcaagagtcctcaggccatggcatcacatggttctagaccagggagtcgcctaaagcagccgattgggcagattccactggaatcttctcctccagtcggactttctattgaagaagtggagaggctcaacacacctcgccctagaaacccaagtatctgcagtgcagaccatgggaggtcttcttcagaggaggactgcagaaggccactgtctagaacaaggaatccagcggatggcattccagctccagaatcctcttctgatagtgactcccatgaatctttcacttgctcagaaatggaatatgacagggagaagccaatggtatatacttccagaatgcccaaattatctcaagtcaatgaatctgatgcagatgatgaagataattatggagccagactgaagcctcgaaggtaccacggtcgcagggccgagggaggacctgtgggcacccaggcagcagcaccaggcactgctgacaacacactgcccatgaagctagggcagcaagcagggactttcaactgggacaaccttttgaactggggccctggctttggccattatgtagatgtttttaaagatttggcatctcttccagaaaaagcagcagcaaatgaagaaggcaaagctgggacaactaaaccagtccccaaagatggggaagcagaacagtatgtgtgaagtttatgtactggcactataaaatataaaaacaagaaataatactcaaaccattgtaaagttgctgactaggttgggtcacatttgaaaaacaggccagtatggactagtggtggagggaaaactttaaaaataataaccacaatgctgctgaaacagactcacaacaactcttaatttaaacatgtgtggttgaatttatttccctgcatgcattgtgttttgtaactagttatgtggcatgcagcatttggaaaatttttcttatttaccagtgtttgatttgtgatttttaaaaattgatacctttaccattgcagaaaagaacttgtgctttcccagtggcgtatgtgtattgtttcaactgtattattataattatattttgcattgcaagattcttgatgttaaaccaatccttgtaaagtgtaaaaaggaaccctcctatcgtggaatgaaagattaagtatattaacacttttcagaatgatagtttctgtatttgatgttgctcagaaatgtctcagtatttgagtaagttttacatgacagtgggtactgaaattaagtcattttgttcagcactttaacgctttcttatagaattgtcttaaaacttctggatccttgagcaaatgattatagtctcctgactttcatgaggcttccattaggaacagaatgattgcatgttgtccccagaacactgccaccttgctatgcgaatgatgttctcagcagcacttctaagaaacactcttaaaagttatttattgaaaatttttcgtatgcttttaatattttaaagaattgacctaaggaaagcttatgattggacttattttccaaccagataacatttactctaagtacccagtttttataatttatatgaaatcagatttcaacacttactttgtcattttgtagatcatttttttaaaatactgtgtaaaaactttttttacacctaagctgtgtttttgatactgatattttcctatgctgaatagttttcttactttcagggaaggtaagaaaatactttttttatatttgttacttatgtaacattcatatttttctcattttgatatttgtaacatactgtatgctttctacttgtaaatgtcaacaatagaattaaaatatttatttaaaata

SEQ ID NO: 133285 - DNA, 2799 bp, Homo sapiens
  Payload ID: 6047
  Gene Symbol: FTO
  Gene Name: fat mass and obesity associated
  ENST ID: ENST00000268349
  CDS Start-End: 1-390
gaacaaaggaatgaaatcttgactgccatccttgcctcgctcactgcacgccagaacctgaggagagaatggcatgccagggcagagaggagtgttggtgccagtcacgaattgcccgaacattacctgctgatcagaagccagaatgtcggccatactgggaaaaggatgatgcttcgatgcctctgccgtttgacctcacagacatcgtttcagaactcagaggtcagcttctggaagcaaaaccctagaaggagcacaagtctcaggcggaggagaaaaagagatcggcttttctcctccaacgttgtcatgggcttaagcaagagcagtggagacttctcttggcccctagattgtagcacccgggtcccaatccaaaacagctaggaaatggtgcccatgaagttttaaatgttttaaaatgaccctgtgttatagtctgatttggtgttaaacaggaccttcttcccccaaaattgttcagattataaaatgtgagccattcagcccccaaggtccagggcaggcgacaggaacgagcccagcgtgtgacaaagcctaacctactttcctctttcccaagctttttcagagactctggagtggacccagccctctggggaaagacagaacttagagacatcccagttactcaccacacccatagtgctgtccaatatggtagccactagctagctgtggctacttcaatttaaattcagttttaattttaattaaaaatgcagctcttcagtcgccctggccacatttcaagtgcttaacagcctcatgtggctagtgactgctgtattggacggtacagatatggaacattttcatcatcgaagaaagtcctattggacaacacttctataaaaagtttgagagcaggaattctcatttccattcgtctgtagcttctatccccaaaggcaaagaaactaaaagagaaatgactcattgaagattggcctctttcctttctctaagacaaacctaagtaaaagcctgagctttgagtcctatgctcagcacacgggaaggagatgttaataattaaaataaagttgatatcctgtctttagggagttcccttgatctcttgaaagagacacagccccatttacattatttcgtggatttcaccagcatagtatagtttttttctgtaagtccctcattcttatgtaataacaggtggaactgaggtttgaagaacctcagtggcccatcctgatgacattggagactcaaagagacaagagagagtagggtttaaaacctgagctttaagactcccactagcttcgtgtcctttggcatgttaacgtgcctcagtttcctcatctgtataatggggatatatgaaaggcaccagtcctaaggtgaacattaagtgagatgattctagttacagacttagaacaatttccagcacatagttaaatatccaggaaattctggtactgttatgtgtgggtgagctgacctggatgtagatgttttcctctctcttgctgacccctccgccagttttgtcttgtgatgccattaacacatctctccctttctgacctggctcctgcccattggtgtcccaagaaatcgtgagaatagttagccccccgtctccccagcctgttgctttctcgtgtagttgttcacagtagttgagaagttgaagagcttttgcctattgaaggtgcactgagaataaactctttcctgccaccagaattgcagtggttcacggcctgcactcattcccatgaatgcagttaatagccacagaaatgtcacattaagcaaagcagccagggtctcatcgtgttgagactcgagtctctcagaccttggattcattccctggtgtctttgagcctcagtttcctcattggtaaaagagaagtgaagcagtgtctcacagggtcattacagagattaaatgaaataaatgaaataacatagaccaggagggcgtggtgtttaaaagtcacagatggggcaccctcgggccatccagcccagtgttttctttagcccctatgatgttcattttttgttatatcccattaggtgcccatatttaaaaattgggagatttcacataaaattaaaaggtctgcattttcttttttcttttctttttttttttttttgagacacagtctcactctgtcaccaggctagagtgcagtggcacgatctcagctcactgcaacctctgcctcccaggttcaagtaattctcctgcctcagcctcccaagtagctgggactacaggcacgtgccaccacgcccagctaatttttgtatttttagcagagatggggtttcaccacattggccaggatggtctcgatctcaacctcgtgatccacccacctcggtctcccaaagcgctgggattacaggcgtgagccaccgcgccaagccaaggtctgcatttttctttagaactcagaacacccaatagtcctaggcccccatcctcgcatggcagcaagctaaataagcatcttcccactgcgagttggggcatgacccagcctatggtttgccatactccctctttttctccgttttttcattaattgtgaacctgacctgcatcaccctttcatgtcagtgctctccaaacctgcttgcttgcacccctctagtcgaaatattttgtgcttaccccaatatatgtgtgtgactattgaactctattcgtagactgcttgtactaatgtcatttgcatcataaaatattcatatccaataaacatattaaaaggatgagataagaaa

SEQ ID NO: 133286 - DNA, 707 bp, Homo sapiens
  Payload ID: 6047
  Gene Symbol: FTO
  Gene Name: fat mass and obesity associated
  Uniprot ID: Q9C0B1
  ENST ID: ENST00000431610
  CDS Start-End: 164-484
aagctgtggtggctccacgtttctttagcgggcagtgttttatatatataggttaagattatcaccagctcctcctggcccatgggtcgagtttgagtggctgaggcagttttggtttcaaggcaatcgatacagaaagtgcactgactggtggtgtcaacccatggctcaactggaagcactgtggaagaagatggagggtgtgacaaatgctgtgcttcatgaagttaaaagagaggggctccccgtggaacaaaggaatgaaatcttgactgccatccttgcctcgctcactgcacgccagaacctgaggagagaatggcatgccaggtgccagtcacgaattgcccgaacattacctgctgatcagaagccagaatgtcggccatactgggaaaaggatgatgcttcgatgcctctgccgtttgacctcacagacatcgtttcagaactcagaggtcagcttctggaagcaaaaccctagaaggagcacaagtctcaggcggaggagaaaaagagatcggcttttctcctccaacgttgtcatgggcttaagcaagagcagtggagacttctcttggcccctagattgtagcacccgggtcccaatccaaaacagctaggaaatggtgcccatgaagttttaaatgttttaaaatgaccctgtgttatagtctgatttggtgttaaacaggaccttcttcccc

SEQ ID NO: 133287 - DNA, 1517 bp, Homo sapiens
  Payload ID: 6047
  Gene Symbol: FTO
  Gene Name: fat mass and obesity associated
  Uniprot ID: Q9C0B1
  ENST ID: ENST00000460382
  CDS Start-End: 125-445
tccacgtttctttagcgggcagtggtaaaaagagtatttaagatcggtcgagtttgagtggctgaggcagttttggtttcaaggcaatcgatacagaaagtgcactgactggtggtgtcaacccatggctcaactggaagcactgtggaagaagatggagggtgtgacaaatgctgtgcttcatgaagttaaaagagaggggctccccgtggaacaaaggaatgaaatcttgactgccatccttgcctcgctcactgcacgccagaacctgaggagagaatggcatgccaggtgccagtcacgaattgcccgaacattacctgctgatcagaagccagaatgtcggccatactgggaaaaggatgatgcttcgatgcctctgccgtttgacctcacagacatcgtttcagaactcagaggtcagcttctggaagcaaaaccctagaaggagcacaagtctcaggcggaggagaaaaagagatcggcttttctcctccaacgttgtcatgggcttaagcaagagcagtggagacttctcttggcccctagattgtagcacccgggtcccaatccaaaacagctaggaaatggtgcccatgaagttttaaatgttttaaaatgaccctgtgttatagtctgatttggtgttaaacaggaccttcttcccccaaaattgttcagattataaaatgtgagccattcagcccccaaggtccagggcaggcgacaggaacgagcccagcgtgtgacaaagcctaacctactttcctctttcccaagctttttcagagactctggagtggacccagccctctggggaaagacagaacttagagacatcccagttactcaccacacccatagtgctgtccaatatggtagccactagctagctgtggctacttcaatttaaattcagttttaattttaattaaaaatgcagctcttcagtcgccctggccacatttcaagtgcttaacagcctcatgtggctagtgactgctgtattggacggtacagatatggaacattttcatcatcgaagaaagtcctattggacaacacttctataaaaagtttgagagcaggaattctcatttccattcgtctgtagcttctatccccaaaggcaaagaaactaaaagagaaatgactcattgaagattggcctctttcctttctctaagacaaacctaagtaaaagcctgagctttgagtcctatgctcagcacacgggaaggagatgttaataattaaaataaagttgatatcctgtctttagggagttcccttgatctcttgaaagagacacagccccatttacattatttcgtggatttcaccagcatagtatagtttttttctgtaagtccctcattcttatgtaataacaggtggaactgaggtttgaagaacctcagtggcccatcctgatgacattggagactcaaagagacaagagagagtagggtttaaaacctgagctttaagactcccactagcttcgtgtcctttgg

SEQ ID NO: 133288 - DNA, 3056 bp, Homo sapiens
  Payload ID: 6047
  Gene Symbol: FTO
  Gene Name: fat mass and obesity associated
  Uniprot ID: Q9C0B1
  ENST ID: ENST00000463855
  CDS Start-End: 125-508
gtttcaagagtaaaggagaacaaagtagggtgacctagtctgaaggacaggcgcagaacagtcagtggaacagccagagatagcagcgagagaggtgagaagaggaccaggagtaggtggtagaatggagtggaggaaagtcagcgaatgtaatagtgtcgaaccctgcagggaagttaagaagtggccataccgttgcattcatcatgggaagaatttcagtagaatgacaaatgctgtgcttcatgaagttaaaagagaggggctccccgtggaacaaaggaatgaaatcttgactgccatccttgcctcgctcactgcacgccagaacctgaggagagaatggcatgccaggtgccagtcacgaattgcccgaacattacctgctgatcagaagccagaatgtcggccatactgggaaaaggatgatgcttcgatgcctctgccgtttgacctcacagacatcgtttcagaactcagaggtcagcttctggaagcaaaaccctagaaggagcacaagtctcaggcggaggagaaaaagagatcggcttttctcctccaacgttgtcatgggcttaagcaagagcagtggagacttctcttggcccctagattgtagcacccgggtcccaatccaaaacagctaggaaatggtgcccatgaagttttaaatgttttaaaatgaccctgtgttatagtctgatttggtgttaaacaggaccttcttcccccaaaattgttcagattataaaatgtgagccattcagcccccaaggtccagggcaggcgacaggaacgagcccagcgtgtgacaaagcctaacctactttcctctttcccaagctttttcagagactctggagtggacccagccctctggggaaagacagaacttagagacatcccagttactcaccacacccatagtgctgtccaatatggtagccactagctagctgtggctacttcaatttaaattcagttttaattttaattaaaaatgcagctcttcagtcgccctggccacatttcaagtgcttaacagcctcatgtggctagtgactgctgtattggacggtacagatatggaacattttcatcatcgaagaaagtcctattggacaacacttctataaaaagtttgagagcaggaattctcatttccattcgtctgtagcttctatccccaaaggcaaagaaactaaaagagaaatgactcattgaagattggcctctttcctttctctaagacaaacctaagtaaaagcctgagctttgagtcctatgctcagcacacgggaaggagatgttaataattaaaataaagttgatatcctgtctttagggagttcccttgatctcttgaaagagacacagccccatttacattatttcgtggatttcaccagcatagtatagtttttttctgtaagtccctcattcttatgtaataacaggtggaactgaggtttgaagaacctcagtggcccatcctgatgacattggagactcaaagagacaagagagagtagggtttaaaacctgagctttaagactcccactagcttcgtgtcctttggcatgttaacgtgcctcagtttcctcatctgtataatggggatatatgaaaggcaccagtcctaaggtgaacattaagtgagatgattctagttacagacttagaacaatttccagcacatagttaaatatccaggaaattctggtactgttatgtgtgggtgagctgacctggatgtagatgttttcctctctcttgctgacccctccgccagttttgtcttgtgatgccattaacacatctctccctttctgacctggctcctgcccattggtgtcccaagaaatcgtgagaatagttagccccccgtctccccagcctgttgctttctcgtgtagttgttcacagtagttgagaagttgaagagcttttgcctattgaaggtgcactgagaataaactctttcctgccaccagaattgcagtggttcacggcctgcactcattcccatgaatgcagttaatagccacagaaatgtcacattaagcaaagcagccagggtctcatcgtgttgagactcgagtctctcagaccttggattcattccctggtgtctttgagcctcagtttcctcattggtaaaagagaagtgaagcagtgtctcacagggtcattacagagattaaatgaaataaatgaaataacatagaccaggagggcgtggtgtttaaaagtcacagatggggcaccctcgggccatccagcccagtgttttctttagcccctatgatgttcattttttgttatatcccattaggtgcccatatttaaaaattgggagatttcacataaaattaaaaggtctgcattttcttttttcttttctttttttttttttttgagacacagtctcactctgtcaccaggctagagtgcagtggcacgatctcagctcactgcaacctctgcctcccaggttcaagtaattctcctgcctcagcctcccaagtagctgggactacaggcacgtgccaccacgcccagctaatttttgtatttttagcagagatggggtttcaccacattggccaggatggtctcgatctcaacctcgtgatccacccacctcggtctcccaaagcgctgggattacaggcgtgagccaccgcgccaagccaaggtctgcatttttctttagaactcagaacacccaatagtcctaggcccccatcctcgcatggcagcaagctaaataagcatcttcccactgcgagttggggcatgacccagcctatggtttgccatactccctctttttctccgttttttcattaattgtgaacctgacctgcatcaccctttcatgtcagtgctctccaaacctgcttgcttgcacccctctagtcgaaatattttgtgcttaccccaatatatgtgtgtgactattgaactctattcgtagactgcttgtactaatgtcatttgcatcataaaatattcatatccaataaacatattaaaaggatgagataagaaa

SEQ ID NO: 133289 - DNA, 1065 bp, Homo sapiens
  Payload ID: 6047
  Gene Symbol: FTO
  Gene Name: fat mass and obesity associated
  ENST ID: ENST00000464071
  CDS Start-End: 4-216
agcatgaagcgcaccccgactgccgaggaacgagagcgcgaagctaagaaactgaggcttcttgaagagcttgaagacacttggctcccttatctgacccccaaagatgatgaattctatcagcaggccctgaagaggaaagtgaggatgactctcatctcgaaggcagggatcctgatatttggcatgttggttttaagatctcatgggacatagagacacctggtttggcgataccccttcaccaaggagactgctatttcatgcttgatgatctcaatgccacccaccaacactgtgttttggccggttcacaacctcggtttagttccacccaccgagtggcagagtgctcaacaggaaccttggattatattttacaacgctgtcagttggctctgcagaatgtctgtgacgatgtggacaatgatgatgtctctttgaaatcctttgagcctgcagttttgaaacaaggagaagaaattcataatgaggtcgagtttgagtggctgaggcagttttggtttcaaggcaatcgatacagaaagtgcactgactggtggtgtcaacccatggctcaactggaagcactgtggaagaagatggagggtgtgacaaatgctgtgcttcatgaagttaaaagagaggggctccccgtggaacaaaggaatgaaatcttgactgccatccttgcctcgctcactgcacgccagaacctgaggagagaatggcatgccaggtgccagtcacgaattgcccgaacattacctgctgatcagaagccagaatgtcggccatactgggaaaaggatgatgcttcgatgcctctgccgtttgacctcacagacatcgtttcagaactcagaggtcagcttctggaagcaaaaccctagaaggagcacaagtctcaggcggaggagaaaaagagatcggcttttctcctccaacgttgtcatgggcttaagcaagagcagtggagacttctcttggcccctagattgtagcacccgggtcccaatccaaaacagctaggaaatggtgcccatgaagttttaaatgttttaa

SEQ ID NO: 133290 - DNA, 11766 bp, Homo sapiens
  Payload ID: 6047
  Gene Symbol: FTO
  Gene Name: fat mass and obesity associated
  Uniprot ID: Q9C0B1
  ENST ID: ENST00000471389
  CDS Start-End: 223-1740
ctacgctcttccagctgtcggacctgggaaattctcctgtgctaaatcccgtggcgctcgcgggtgtcgccgcggtgcatcctgggagttgtagttttttctactcagagggagaatagctccagacgggagcaggacgctgagagaactacatgcaggaggcggggtccagggcgagggatctacgcagcttgcggtggcgaaggcggctttagtggcagcatgaagcgcaccccgactgccgaggaacgagagcgcgaagctaagaaactgaggcttcttgaagagcttgaagacacttggctcccttatctgacccccaaagatgatgaattctatcagcagtggcagctgaaatatcctaaactaattctccgagaagccagcagtgtatctgaggagctccataaagaggttcaagaagcctttctcacactgcacaagcatggctgcttatttcgggacctggttaggatccaaggcaaagatctgctcactccggtatctcgcatcctcattggtaatccaggctgcacctacaagtacctgaacaccaggctctttacggtcccctggccagtgaaagggtctaatataaaacacaccgaggctgaaatagccgctgcttgtgagaccttcctcaagctcaatgactacctgcagatagaaaccatccaggctttggaagaacttgctgccaaagagaaggctaatgaggatgctgtgccattgtgtatgtctgcagatttccccagggttgggatgggttcatcctacaacggacaagatgaagtggacattaagagcagagcagcatacaacgtaactttgctgaatttcatggatcctcagaaaatgccatacctgaaagaggaaccttattttggcatggggaaaatggcagtgagctggcatcatgatgaaaatctggtggacaggtcagcggtggcagtgtacagttatagctgtgaaggccctgaagaggaaagtgaggatgactctcatctcgaaggcagggatcctgatatttggcatgttggttttaagatctcatgggacatagagacacctggtttggcgataccccttcaccaaggagactgctatttcatgcttgatgatctcaatgccacccaccaacactgtgttttggccggttcacaacctcggtttagttccacccaccgagtggcagagtgctcaacaggaaccttggattatattttacaacgctgtcagttggctctgcagaatgtctgtgacgatgtggacaatgatgatgtctctttgaaatcctttgagcctgcagttttgaaacaaggagaagaaattcataatgaggtcgagtttgagtggctgaggcagttttggtttcaaggcaatcgatacagaaagtgcactgactggtggtgtcaacccatggctcaactggaagcactgtggaagaagatggagggtgtgacaaatgctgtgcttcatgaagttaaaagagaggggctccccgtggaacaaaggaatgaaatcttgactgccatccttgcctcgctcactgcacgccagaacctgaggagagaatggcatgccaggtgccagtcacgaattgcccgaacattacctgctgatcagaagccagaatgtcggccatactgggaaaaggatgatgcttcgatgcctctgccgtttgacctcacagacatcgtttcagaactcagaggtcagcttctggaagcaaaaccctagaaggagcacaagtctcaggcggaggagaaaaagagatcggcttttctcctccaacgttgtcatgggcttaagcaagagcagtggagacttctcttggcccctagattgtagcacccgggtcccaatccaaaacagctaggaaatggtgcccatgaagttttaaatgttttaaaatgaccctgtgttatagtctgatttggtgttaaacaggaccttcttcccccaaaattgttcagattataaaatgtgagccattcagcccccaaggtccagggcaggcgacaggaacgagcccagcgtgtgacaaagcctaacctactttcctctttcccaagctttttcagagactctggagtggacccagccctctggggaaagacagaacttagagacatcccagttactcaccacacccatagtgctgtccaatatggtagccactagctagctgtggctacttcaatttaaattcagttttaattttaattaaaaatgcagctcttcagtcgccctggccacatttcaagtgcttaacagcctcatgtggctagtgactgctgtattggacggtacagatatggaacattttcatcatcgaagaaagtcctattggacaacacttctataaaaagtttgagagcaggaattctcatttccattcgtctgtagcttctatccccaaaggcaaagaaactaaaagagaaatgactcattgaagattggcctctttcctttctctaagacaaacctaagtaaaagcctgagctttgagtcctatgctcagcacacgggaaggagatgttaataattaaaataaagttgatatcctgtctttagggagttcccttgatctcttgaaagagacacagccccatttacattatttcgtggatttcaccagcatagtatagtttttttctgtaagtccctcattcttatgtaataacaggtggaactgaggtttgaagaacctcagtggcccatcctgatgacattggagactcaaagagacaagagagagtagggtttaaaacctgagctttaagactcccactagcttcgtgtcctttggcatgttaacgtgcctcagtttcctcatctgtataatggggatatatgaaaggcaccagtcctaaggtgaacattaagtgagatgattctagttacagacttagaacaatttccagcacatagttaaatatccaggaaattctggtactgttatgtgtgggtgagctgacctggatgtagatgttttcctctctcttgctgacccctccgccagttttgtcttgtgatgccattaacacatctctccctttctgacctggctcctgcccattggtgtcccaagaaatcgtgagaatagttagccccccgtctccccagcctgttgctttctcgtgtagttgttcacagtagttgagaagttgaagagcttttgcctattgaaggtgcactgagaataaactctttcctgccaccagaattgcagtggttcacggcctgcactcattcccatgaatgcagttaatagccacagaaatgtcacattaagcaaagcagccagggtctcatcgtgttgagactcgagtctctcagaccttggattcattccctggtgtctttgagcctcagtttcctcattggtaaaagagaagtgaagcagtgtctcacagggtcattacagagattaaatgaaataaatgaaataacatagaccaggagggcgtggtgtttaaaagtcacagatggggcaccctcgggccatccagcccagtgttttctttagcccctatgatgttcattttttgttatatcccattaggtgcccatatttaaaaattgggagatttcacataaaattaaaaggtctgcattttcttttttcttttctttttttttttttttgagacacagtctcactctgtcaccaggctagagtgcagtggcacgatctcagctcactgcaacctctgcctcccaggttcaagtaattctcctgcctcagcctcccaagtagctgggactacaggcacgtgccaccacgcccagctaatttttgtatttttagcagagatggggtttcaccacattggccaggatggtctcgatctcaacctcgtgatccacccacctcggtctcccaaagcgctgggattacaggcgtgagccaccgcgccaagccaaggtctgcatttttctttagaactcagaacacccaatagtcctaggcccccatcctcgcatggcagcaagctaaataagcatcttcccactgcgagttggggcatgacccagcctatggtttgccatactccctctttttctccgttttttcattaattgtgaacctgacctgcatcaccctttcatgtcagtgctctccaaacctgcttgcttgcacccctctagtcgaaatattttgtgcttaccccaatatatgtgtgtgactattgaactctattcgtagactgcttgtactaatgtcatttgcatcataaaatattcatatccaataaacatattaaaaggatgagataagaaaccgagagattttgctgtttttttccttttgcatggatgagccagcttcactgtcctgggtggggcccaggtggaattagttctcaaagtcctccaggtggagtcagggaatgtgcaacagggttggagaaatcactactttaagtgaatccgaaaggtgagatcacatttgctctaaagaaatggtgatcccagcactttgggaggctgaggcagcagatcactggaggtcaggagttcgagaccagcctggccaacacggtgaaaccccgtctctactgaaaacacaaaaattagctgggtgtggtggtgtgtgcctgtaatcccagctactcgggaggctgaggcaggcaaatcgcttggcccgggaggcggaggttgcagtgagccgagatcatgccactgcactccagcctgggccacggagcgagagaagaaagaaatggtgactttcattgatcatgtgtttgaggatttcatgtgctctccagggaggtttcaggtgggtagaaggaggtgggcaagacccaataaaaaagcagctggtgcgggcaatgacaatgaactcgtatcctgcagggtcaaaggaaggcttgcttctgctgtgaattggagaaggactttcctggaagcacaggcccagaaatcgcacccttctccccatgtgtgcggataagggaccacttccatcagcagcagccccctcctgctttcctgccagtcctccctgtggtcccaggtctcttgagaaaagtgatctaagagatccctttgcaatgaggtgctactgactgccctacctccctcccttcctcccatgaatgtttcttggtgctgaccacagcctcagcaatgaggcaagcctggggacccaagacagatctctgcctcccaggctagtggatgccctgggatatgtagtcaccaaaataggaacttaccccatagtggggaaatagacagtaagcagcaaatcaataacaagagtgttccagatggttgtaagtgccaggaagggaaccaactgggagagggacaagaggagatggtgactgaccaaggggaccttgatcaggctgtggggaagggaggtggttgggaagagcttcccaggaaaggggacggcgggcccaggcaggagagccttgggagggggtgcccaaggaaggaaaagggccctgagcctgaagccgagaagaccaggaggggagaaggggagatgtagggcagagcagacgggagccgctcgggttttattccacacaccccaggaagcatgagagggtttcaagcagcaagggcatggaagtaacttggtgagatatttttatgcattagatcatcgctctatctggattccagagggtctctgagagagcaaacagcttaatccaaaggagcggctttccaactgggaatgtccccctggctgggtgagatctcaagatggcctgcggcccctctagattgcctgcctacagagttcactctaaacagcccctcccctccacaccccagcagatccattcctgacgccctcactggcaggctccagccccacagagctttctagacataaaagagcagggtcatggcatcattggtgacacaattttagtaataagcttcaaaacccatcactccactgaatccagggatgccagaattgagagtccataggacccgtttaacggatcccacattcagtagacggttttttgtatgcttcgagggaaggaaggtattttcaaatgcaacttcttttttttttttcttgctctagttagggctgattttaccactgggcaaattgcatacatttggatccatgccacgctaaaaactgtttattttggagatctgtcagaggcaagcacatggaagacaaggggattctggtttgaaaaggcaattctcatccagacagattcagatggagaggagcggtgtggattaaaatgcgccgaagtggtaatgccgtttatcccgtttgcctttgttactctgtgattaaatggtatttttaattaagtttcattgggagccataggtatcgcggtggtgaaatcaatttgacaaccataaaggggagagacggcacaggcgtgttgtgatgattgcggctgtagggaaagccgggcagcttgcagaggatgggtgggaggaggggaagccggctaagaatgacttcctgcaagacagcaagggcacccctgggccactgctgtgtttgggaggcaggttttgggggttgtcagaaggcattcacctggttctctcgctcacctgagacacccgatagattcctggaaactccaggaaagtatctgaagatctggttctccattctctcttattaacaaggagaaccacaagtgccccccagatcccggctagaaggaccagacagctttccaccccggttcccaggcagccctgctcccatagtcctgtgtcccatcggccccatgctcccaggacagtcctaattcccacctctcagaaccttgtcagccaagttcttcctgctctctggcccaaatcctcctcctacattggaaactgagcctctctgcatcctctgctctttctatcccgctgtcattcatcagattttccaaatctttggattcctgagtggcagaagaggttttctgagtttaagttctgattctgtgtgtgattctcactctaccacctcttcaaacctttgttgtcttatctacaaaatagaatagtagtaatccatcacctaaggttgttgtgaaggttcaataagttaatgcgtatttaaaatgcctcccacagtacctgacatatactgggcttcagtgaggtactagctattattattaaccaagtttcctgtggtaacagttgtagctttgtgactgggccaaatcacttaacccctctgcgctccagtctttgtttctataatggggatgatgataatgcctagctcattggattgttctgtcccctacgatcagccatgttaagtgattcatatcatgtctggtacttaaaaatcacgccacgcatgtacattattatgatgaaaaatatgatccgtgatatcctgaccaaaatattaaagggactaaagatagctgtggcttgttcaagaagaatattgtgtcactatcccatatattatcccatttgctcttcacagcttccatttttcgctaggcggatggcatggaactttttataaatgagatattatgaaaaatgatgttttaggactctcatttctacagtgggagtaggtcacccattgcaattttggatttgcttaaaaaaattcttgccatcaccttctaatggatgatctgtgtacaacaattgtttattgactctgaatgtctaagtaccagggtcagtctatttcaaggggagggaagcattaattaacctccagcattagattcagtgattcttttccaatgatgcagttcatgactttgctcgcatttacttttcatcaatcctgaaagaattgaggtaaaatagttcctctgcacatgtgtgtcaagctaaatggataacagcagatacagatctgtttgcctgtctgcacttgcctttagacaaaattcatcaattttacaaaagccactgactaaacatggcaccaatacaaatgaagcacttctagcaggcggagattccctttgtttctgatctggtaaatgcggtagtttcctgctgagagatgggaagtgctggcctaggacagcaaggtgccctacaggtggggccaaaagggtcaagaccgttctacaggaagtttaggagaagttcaatggttccagatcctgtgtgcttcgggtaattctgaccctcttcattagtgataatggcatgaagctctttcacacagtcttttttttttttctttttttttttcagacagggtctcaccctgtcacgtaggctggagtgcagtggtgagatcacggctcactgcagcctcgacttcatgggctcaagcgattctcctgcctcagcctcctaagtagtcgggatcataggcacttgccaccacatccggctaatttttttgtagagacaggatttcaccacattacacaggctggtttcaaactccgaggctcaagtgatctgcctgcatcggcctcccaaagcgctgagattacaagcgtgagccactacgccttgccctccacacagccttgcttggtgttaaagattaaacaaagaccacaggtgatcactgtcttcgtggtgccagtttcaagggcacccttcttcccttcccagcctccgagagaaggagagagggtccacaagccagatccatccccatccacacaggtaaaaccacgactgtgcagctagcaggtggagataacatttggaaaaaggctttgtaaatgctaaagtcctactcaagtccaagggagagaaattattattattcgttttgtgaaaccaatttagtttggctgggtaatggaagaatttctacatacattcattacttctgatcaggcaagaccagtctgacacaggaacagtctatggctcactcttaaagccacagcaggctgccagggcttggagaaatagaaacctctcttgcacaagaatagtctcaatgaatcatgttaaggcctctttaggtttttcagactccatgcaccctgtggaaactgcctttcttgagtagaggtacgttcagcacttcataaaataatcttggagcctccagacacacggatggaggagcatgatttcatttgtttctttgcaaaactgctgtccccaactgaaaaacctgattatcctttcaaatagggaattcggctttccacgttggaaccagaacagttaaccttcaaacccccaaggcttgcaagagatgaatcagtttctcagacagccaaagccgtggcttataactcatccaacccagaaaactggaccgctggtcaccttccttccccctgcccccaactctgcagacagaggtttcccgttgattatgccttgattagagtcaggagagaagcaaaccaggtatataggattccattatccttccctcctctgctcccaaccagggtcacgctgagagggatctcggtgaacatgtgaacaatcaagccatgtttaccatggacgtttagttttcttttctcaaaatcaaaacagagtttagtaggcagcgtatttcatacatgccccttgatcaatggaatgatctgtcagaagccattaaagcccccattagcttgaatgcattcaaagctaaactattggatcatttaagggctgcagtgattgtttttaatataccgtacattgatttctccctgtgagcagcaacataagtttgaaactaactgtgtatgactaaggctccatttgctgtctccaaccctctgtgagaagcatggtttcacttcgaccagaaatgtctgtgtatagttttcaaagagatgcagaccctgttcgatttcccaagatttagactgggtcgggttgttatttcttttttccctgagctttctcccatttctttgtgcccattaagtgagctgtgcgtgcagaatgggagaggcatccctgccaaggacttcaagtgaaaggcggtgggagaaattgttctgaaagcatgaagcccagctgaggccaaaatcaaagtgaatttgacagccttgggccagcaaaactctgtacccagcagaaaacaatagatgtgtggctgtgtcaggggcatcctcactgggacatagcttggggagctgaaggtaccttggaagggccagatgaggaagctagccaaggccacaggccttcctttgactgccatattgccagctcttcatagtattgactcttcagtcttagccaacacacacttgttgattccttccggaatgtcagactctgctagcaacacaaggtccctgtcctcaaaatcctattcttaatcagcatttctaatttctgccctttgctcattttaatacagagcctgaggataggagagcagcgtggtgaaagaagcaatagttaccacatttgcaaaggcacataccccaaagagaagtttttaatatgtcacacccatattttatagatggggcaatggaagtccagatgggagaagttatttcaggtgaattatagaaactggatttcaagtttctgataagtattgaatttgggaaggctgtgaacattcttgagcccccctcccaagttcaccttcaacatcctaaagcaggttgaagaggaagatggttccaggtcacttacaagaacaggaacagcccctccctccaaatttgagcccagaaaggagaacctttgttactctagaaaacagtgtgtgtgctattgttttctccataggtcacaaacatccacaagatattggtgattttacatattattagagccactgaaatttatgatgcaggatattaacgtcaaagaggccaagatgcatcattcagaacactggcaggtcaagcagaaaccaccgtagtaaaattgaaagctggagtcagcaaagtatagcccacagccaaatctggcccatcccctgttcttataaagttttattggaacgcagccatgctcatcggtttatgtattatctatggctgtttccaactacagtggcagagctgaatagttgcaaaggaccatagggctatcaaagccccaaatagtcattgtctgacccttcatagaaaaattttgctgaactgtagtctagctccaaggattgttgtatcacctgtgatcgtgcctattaagcaattaacgtcatgtctagtacttagtaatgactcagcatgtatcaattacgatgataaatattatcatggcatccaaaccaaaatactcatgccaacatctctctgtacagaaacatggaaaaagagcgatgctattaaggaggaaaatggagccaggagcaaaacctaaggctatttctgaactaaagaggcctgaataaggtagtgaaaggaccagggaaagccttcccacggggatggagagccacctcctccccggctttctggttcagatgtcttgtctcaacagacggcagattcgcagggaagcaggccgagcctgatcttttctccgctagaactgctcaacaggtgaagaatctttttccagcactcctgagcccttcgggtcgcggaacagtgcgaagattattccaatgcctcattcggagaggtgataatctggtctgtggtttctttttcggtggggcatggggtgggggtgagtgtcatgctttctaaggcacagggctgactaaagggtgtcctatttataagtcagtaaaacacagcggcttcatactctgtgcttattacccagaagccccggctcttagagtttctattaagatgtacctcataaatatatacgcctcctatgtacccacaaaaattaaaaataaaaaaattgaaatca

SEQ ID NO: 133291 - DNA, 1194 bp, Homo sapiens
  Payload ID: 6048
  Gene Symbol: FITM1
  Gene Name: fat storage-inducing transmembrane protein 1
  Uniprot ID: A5D6W6
  ENST ID: ENST00000267426
  CDS Start-End: 290-1168
ggaactggaacatggtcggagccaaggacacaggactaacaggaaaggacacagactgctgtcaggacacatactaccacacacccgaggccaggaccctgctgacgtggcagacctccaccctggccccttactgccccccgcccctctcccccacctgccagctgccaacagggctctgccttgtgtctgccacacctgtcactgcctatccttgtccagggggggccccatcagcccctcctcagctgcccagcaaagcaagcagttagtggggaggggagggaacatggagcgggggccggtggtgggggcaggactgggggccggggcccgaatccaggcactgctgggctgcctgctcaaggtgctgctctgggtggcctctgccttgctgtactttggaagcgaacaggccgcccgccttctgggcagcccctgcttacggcgcctctaccatgcctggctggcagcagtggtcatctttgggccgcttctgcagttccatgtcaaccctcggactatcttcgccagccacggcaacttcttcaacataaaatttgtgaattcagcctggggctggacatgcactttcttagggggctttgtgttgctggtggtgttcctggctacacggcgcgtggcagtaactgccagacacctgagccgactggtagtaggggcagccgtgtggcggggagccggccgggccttcctgctcatcgaggacctgactggctcctgcttcgagccactgccccagggtctgctgctccacgagctgcctgaccgccgcagctgcctggcagccggccaccagtggcgaggctacaccgtctcctcccacaccttcctgctcaccttttgctgcctgctcatggcagaggaagcagctgtgttcgccaagtacctggcccatgggcttcctgccggcgccccactgcgccttgtcttcctgctgaacgtgctgctgctgggcctctggaacttcttgctgctctgtaccgtcatctatttccaccagtacactcacaaggtggtgggcgccgcagtgggcacctttgcctggtacctcacctatggcagctggtatcatcagccctggtctccagggagcccaggccatgggctcttcccccgtccccactccagccgcaagcataactgaaagaaataaaaaccatcgggcctggc

SEQ ID NO: 133292 - DNA, 800 bp, Homo sapiens
  Payload ID: 6048
  Gene Symbol: FITM1
  Gene Name: fat storage-inducing transmembrane protein 1
  Uniprot ID: A5D6W6
  ENST ID: ENST00000559294
  CDS Start-End: 484-774
caaggagatagcaaaggttaaatgactgggggctgtaaagggcacggcaaggagagaacgagtgatgatgtgtagggttggggagagtgcagtgatgggagcacagaccagggtgggagatggagcttggggtctcaatagtctcccttctttgcccacagaaaatttgtgaattcagcctggggctggacatgcactttcttagggggctttgtgttgctggtggtgttcctggctacacggcgcgtggcagtaactgccagacacctgagccgactggtagtaggggcagccgtgtggcggggagccggccgggccttcctgctcatcgaggacctgactggctcctgcttcgagccactgccccagggtctgctgctccacgagctgcctgaccgccgcagctgcctggcagccggccaccagtggcgaggctacaccgtctcctcccacaccttcctgctcaccttttgctgcctgctcatggcagaggaagcagctgtgttcgccaagtacctggcccatgggcttcctgccggcgccccactgcgccttgtcttcctgctgaacgtgctgctgctgggcctctggaacttcttgctgctctgtaccgtcatctatttccaccagtacactcacaaggtggtgggcgccgcagtgggcacctttgcctggtacctcacctatggcagctggtatcatcagccctggtctccagggagcccaggccatgggctcttcccccgtccccactccagccgcaagcataactgaaagaaataaaaaccatcgggcctggc

SEQ ID NO: 133293 - DNA, 4597 bp, Homo sapiens
  Payload ID: 6049
  Gene Symbol: FITM2
  Gene Name: fat storage-inducing transmembrane protein 2
  Uniprot ID: Q8N6M3
  ENST ID: ENST00000396825
  CDS Start-End: 22-810
cggtggctgacgagatccggcatggagcatctggagcgctgcgagtggttgttgcgggggacgctggtgcgggcggccgtgcggcgctacctgccctgggccctggtggcctccatgctggcgggctccctcctcaaggagttgtccccgttgcccgagagctacctcagcaacaagcgcaacgtcctcaacgtgtattttgtcaaagtggcctgggcctggacgttctgtctccttctgcctttcattgccctcaccaactaccatctgaccggcaaggctggcttggtcctgcggcggctgagcaccctgcttgtgggcacggccatctggtacatctgcacctccatcttctccaacatcgaacactacacgggcagctgctaccagtccccagccctggagggggtcagaaaggaacaccagagcaagcagcagtgccaccaggaagggggcttttggcatggctttgacatctcaggtcactccttcctgctgaccttctgcgccctcatgattgtagaagagatgtctgtgctgcatgaggtgaagacggaccgaagccactgcctccacaccgccatcaccaccctggttgtggccctgggcattctgactttcatctgggtgttgatgtttctgtgcacagctgtttatttccacaacttgtcccagaaggtgtttggcaccttgtttggtttgctgagctggtacgggacatacgggttttggtatccgaaagccttttccccaggacttcctccccagagctgtagtttgaatttgaagcaagatagttacaagaaataaaagagtaacagaggggggacagaaggacaatggctaatctatttttcaaatatatattttgcttagttatttggctaaattattgatcctacttcagagggaaagtgtaccaggcagttttggtgggtggtgctgaagtctggggagtgagtttagtcttcagactattcttggcgacatcaccagtgttgcaagcaccaccattcccagttaggcactttttgtccctggtaagacttgacctttatctggaacactccttttgtccctagagtggggacctaaggctcagcaaaagggcagaatcaggaaagcctttatggtgtggctaaaggagtggccagagccttgggactcctttgctgccttctccctggttccagttgtctttagattttcacggctcttactgctgttacttaacagtattttccagccaggcatggtggttcacacctctaatccctgcactttgggaggccgaggcaggcggatcacctgagattgggagttcgagaccagcctgtccaacatggcgaacctcgtctcttctaaaaatacaaaaattagctgggtgtggtggcacatgcctgtaatcccagctactcaggaggctgaggcaggagaattgcttggacctaggaggtggaggttgcagtgagctgagatcgcaccactgcactccagcctgggtgacagagcagactccacctcaaaaaagaaaaaacaaaacaaaacagtatttcccactggtcagttttgcataggcatctatttcaggcagggtttttttcttttttttgagatggagttttgctcttgttgcccaggctggggtgcaatggcccgatctcggctcaccgcaacctccacctcccaggttcaagcgattctcctgcctcagcctcccgagtagctgggattacaggcatgcgtcaccacaccaggctaattttgtatttttagtagagatggggtttctccatgttggtcaggctggtctcaaactcctgaccgcaggtgatccacctgcctcggcctcccaaagtgctgggattacaggcatgagccaccgcgcccggctcaggcagggttctttataaaaacagcctgatgcctgaaggacactctctggttgtaatatttgtttcatccatgaagtgtttaaatattgcaactgacttgcgattagccaccaaaacaggcccttttagatgcagtgcctctccgaccaagtattggatgattcatacgtaatggactatgatcattttctgtccatgttttctattactatatgctggtttttttggagcaataagattactttttttctgttctattttgagcgaatcctttacagtttttgataagaactgtgacatttgttctttgttgataaaactcctgaaaataactcacaaggccagtgctgcactctggcacatgtaggttgttttgagggtttgttggttggttggttggctggttgattggttggttggtttagaacactaatgtacttgttatgaaccaaactctggtcttacagtcttaaattccacctcatggggctgttttctctgttagcaatgaaacctgggccaggtgtagtggctcacacctataatcctggcactttgggaggctgaggtgggaggattactggatcccaggagtttgagaccagcctgggcaacatagtgagaccctggtttctataaataaataagataatcaaaccagaaagcaggcattttagtaacagcctgttgaattttaaggtgaatcaaggtaattttgcagaatgcgttcttgcaccgaaatgtccctgaccacatatcagtggtatagactgaacagtgtgcttcagggtcatgtgctgagtgcactgatcactctgctgtggcccagggcatctgtacctgttggacaagattatgataattcagaagtgaagtaaaatgcctccctctgatggcaaaaagccaacctgtttgcaaaatcacccttattgaagggtggcatggctgtggtccctccctcctgttacttgcatcaccaaccaaactaaaccaaaccatacctgggcctgttcagctggacttgaaatcagtttcctttttctctcccctttgcagcacttttcagtttccagctttgtcattctgtggcctttgctgtgacaatgctgggaagggttagaaatcctgtcacctccatccacaaaggcacagttccacgccctgtgataagatatcccctcttctctcccagactgtctccttaagcctttcaaactgagccccttgctgttggggtaatcacccttaaggccgccttgatgcccctctctccaatcaagtccaatagtagcattaactgagaagcactacacctgactggcttcactgaagcttaagtggttgaggatgaatcttcggtgtaaaatcttttactataaggatatattttaaatatttcatatcccatcaagttggaggttaattttatccatcacaatgagtcatgatttgttgcacccaaaaggagcagaaacacaggtgatgagatatgggaggtggcaccatggtgctttggaggcgttggtaagatgtgaccctctgttgcctatgcccataaaccagtggtgggagtggccatggagtagatggcaggggcttgttgaagggattgaaagctctcctaggctaggcatggtggctcacacctgtaatcctagcactttgggaggctgagatgggaggatcacttgaggttgggccagcctagccaacatgataaaaccccgtctcgactaaaaatacaaaaattagccaggtgtggtggtacacgcctgtaatcccagctactcgggaggctggggcaggagaatcgcttgaacccaggaggcagaggttgcagtgagctaggatcacgccactgcactccagcctgagcgacagagtgagactctgtctcaaaaaaaaaaaaggctctccaaagtgtcatgttcagcaccaaaagggaataggcacagggtgaccccagaagttcatttgtgacacttaaatctccagatatttatcccacgtgggtctgatgcgggctcagcactaaattaactgtatgtggaaagtgtcaattgcagagccttctgtatcgatgaggcttccgccacttgtccatgcttagcccccttgcctcttccttgggagcatgctttctattcctatgtgaaacagcctgacataagtgaaaggatttgggctcaagcaaacatgagatgtgggttcatatcttggcaccactcctgatagctgtgtgatcatggcaaacctcgttttcatcgtctgtcaggtggagatgaagagaaatggtgcatgtaaagtgctcagcatctgtgcttagcaggccatagtctccctgcctcctttttcttgagtaagcctttagaactttctgactcctctagagaaggcagagaaacgaatatattttgggtgccatttggagtctgggtcttttgttaaaattgtcctgtattatgttgaaaagtgtcggttacccccaggctctgggggcatctgtgatcatagaatactgccatgcttattttgcctttctatgttgagattaattcactgacgcctcattttccacgtgcatctgtcatagtctgggtaccagattgtatttagagaatggctcttgccactgttatgtacacacagatcgtgtgtgtaaacaagcaaattaaagtaaactgagataatgaaatcccata

SEQ ID NO: 133294 - DNA, 7894 bp, Homo sapiens; identical to SEQ ID NO: 133282
  Payload ID: 6050
  Gene Symbol:
  Gene Name: FAT3
  ENST ID: ENST00000634743
  CDS Start-End: 24-2702

SEQ ID NO: 133295 - DNA, 18699 bp, Homo sapiens; identical to SEQ ID NO: 133281
  Payload ID: 6050
  Gene Symbol:
  Gene Name: FAT3
  ENST ID: ENST00000634649
  CDS Start-End: 23-13342

SEQ ID NO: 133296 - DNA, 19030 bp, Homo sapiens; identical to SEQ ID NO: 133280
  Payload ID: 6050
  Gene Symbol:
  Gene Name: FAT3
  ENST ID: ENST00000634703
  CDS Start-End: 18-13691

SEQ ID NO: 133297 - DNA, 2424 bp, Homo sapiens
  Payload ID: 6051
  Gene Symbol: FA2H
  Gene Name: fatty acid 2-hydroxylase
  Uniprot ID: Q7L5A8
  ENST ID: ENST00000219368
  CDS Start-End: 71-1189
atgttagaggcgctcagggtggcagcagagcagacgccgggctgcgcgctgggagctgcggtctccggccatggcccccgctccgccccccgccgcctccttctcgccctccgaggtccagcggcgcctggcggccggcgcgtgctgggtccgccgcggggcccgcctctacgacctctccagcttcgtgcggcaccacccggggggcgagcagctgctgcgggccagggcgggccaggacatcagcgccgacctggacgggccgccgcacaggcactcggccaacgcgcgccgctggctggagcagtactacgtgggagagctccgcggggagcagcagggctccatggagaacgagcctgtagcccttgaggaaactcagaagacagatcctgctatggaaccacggttcaaagtggtggattgggacaaggacctggtggactggcgaaagcctctcctgtggcaggtgggccacttgggagagaagtacgatgagtgggttcaccagccggtgaccaggcccatccgcctcttccactcagacctcattgagggcctctctaagactgtctggtacagtgtccccatcatctgggtgcccctggtgctgtatctcagctggtcctactaccgaacctttgcccagggcaacgtccgactcttcacgtcatttacaacagagtacacggtggcagtgcccaagtccatgttccccgggctcttcatgctggggacattcctctggagcctcatcgagtacctcatccaccgcttcctgttccacatgaagccccccagcgacagctattacctcatcatgctgcacttcgtcatgcacggccagcaccacaaggcacccttcgacggctcccgcctggtcttcccccctgtgccagcctccctggtgatcggcgtcttctacttgtgcatgcagctcatcctgcccgaggcagtagggggcactgtgtttgcggggggcctcctgggctacgtcctctatgacatgacccattactacctgcactttggctcgccgcacaagggctcctacctgtacagcctgaaggcccaccacgtcaagcaccactttgcacatcagaagtcaggatttggtatcagcactaaattgtgggattactgtttccacaccctcactccagagaaaccccacctgaagacgcagtgacaactcccaccccctccgtcctgccctcagcccggccctggccccttcccgacccccacccgccattcagaccccattaagaaggttggcttggccaggcaggatgggctgtgtccggccctgcagcctagtggaaggtgctgagggggccctgaggcaggaccgccctcctgacccctggtaggagggtcacatccacttggtggccaggtggcccttggtgacccacttcttcctggagcgtccctgcctagagctcagcccacaggactgcttcaggccgtggccacaggtagcagccgcaaggggaaatgaagaaaactgagccctcgtggccacctgtgtcacccttgtgccttagcctcatgggctgcctaggagctgcctgcacggcacagctcgctttcacagtcagaagtgggtctgtgggatctgtggtccctgtcctccctgctgtcccttctggggaggctttggtggctctgaggtggacaaagagctctcgcaagaagagacagcgtgatgcctcccacagtccaccccagaccctggggcagcccctctggccctgccagctgcctgcgtcgttgggcccagggtggctggcaggagtcccagctgcttgctttaggacctggcagcttttcttgccgtccctcccctgcctccagaatcacagcccttctccccaagggaggctgaggaggcttctccaccagtggcagccccaccccgtccctggccattcttggcctccaccccgctcaggcccctactcgggcgctcccagaaggagccacctctcagtgcctcacctccccctgcctcccagcctccgcagatgaggttcctgccccttcctcctcgtaaccaaaaccctcactgctcccaggacggtcttatttataaaccagatacatgttcttagtctggtcccagaccaaggagctggtcagacggccctttctaatcctacatgttgagcttatgtaaaaaatgttgtttcctcctgtttttggttcctttcttacccacaaaccattactacttgaaacttaaaaaactcgccaagtgtaaaggctaaagagaagcagtttgacggaccttgtgatttgtactgtttgctgcggagctatttaaagattttggaataaatatacaaaactacggttgtgaaataaaaacttaaattgtatattttgaaaaataaaacactgaaaagaaaccaacaaaaa

SEQ ID NO: 133298 - DNA, 1537 bp, Homo sapiens
  Payload ID: 6051
  Gene Symbol: FA2H
  Gene Name: fatty acid 2-hydroxylase
  ENST ID: ENST00000567683
  CDS Start-End: 77-547
cccgggatgttagaggcgctcagggtggcagcagagcagacgccgggctgcgcgctgggagctgcggtctccggccatggcccccgctccgccccccgccgcctccttctcgccctccgaggtccagcggcgcctggcggccggcgcgtgctgggtccgccgcggggcccgcctctacgacctctccagcttcgtgcggcaccacccggggggcgagcagctgctgcgggccagggcgggccaggacatcagcgccgacctggacgggccgccgcacaggcactcggccaacgcgcgccgctggctggagcagtactacgtgggagagctccgcggggagcagcagggctccatggagaacgagcctgtagcccttgaggaaactcagaagacagatcctgctatggaaccacggttcaaagtggtggattgggacaagagtacacggtggcagtgcccaagtccatgttccccgggctcttcatgctggggacattcctctggagcctcatcgagtacctcatccaccgcttcctgttccacatgaagccccccagcgacagctattacctcatcatgctgcacttcgtcatgcacggccagcaccacaaggcacccttcgacggctcccgcctggtcttcccccctgtgccagcctccctggtgatcggcgtcttctacttgtgcatgcagctcatcctgcccgaggcagtagggggcactgtgtttgcggggggcctcctgggctacgtcctctatgacatgacccattactacctgcactttggctcgccgcacaagggctcctacctgtacagcctgaaggcccaccacgtcaagcaccactttgcacatcagaagtcaggatttggtatcagcactaaattgtgggattactgtttccacaccctcactccagagaaaccccacctgaagacgcagtgacaactcccaccccctccgtcctgccctcagcccggccctggccccttcccgacccccacccgccattcagaccccattaagaaggttggcttggccaggcaggatgggctgtgtccggccctgcagcctagtggaaggtgctgagggggccctgaggcaggaccgccctcctgacccctggtaggagggtcacatccacttggtggccaggtggcccttggtgacccacttcttcctggagcgtccctgcctagagctcagcccacaggactgcttcaggccgtggccacaggtagcagccgcaaggggaaatgaagaaaactgagccctcgtggccacctgtgtcacccttgtgccttagcctcatgggctgcctaggagctgcctgcacggcacagctcgctttcacagtcagaagtgggtctgtgggatctgtggtccctgtcctccctgctgtcccttctggggaggctttggtggctctgaggtggacaaagagctctcgcaagaagagacagcgtgatgcctcccacagtccaccccagaccctggggcagcccctctggccctgccagctgcctgcgtcgttggg

SEQ ID NO: 133299 - DNA, 578 bp, Homo sapiens
  Payload ID: 6051
  Gene Symbol: FA2H
  Gene Name: fatty acid 2-hydroxylase
  ENST ID: ENST00000569949
  CDS Start-End: 2-578
aatgcccagcttccagctccctgccatggccaccagcaccatggcttccttcagtcacaaggacacagagaagggctccatggagaacgagcctgtagcccttgaggaaactcagaagacagatcctgctatggaaccacggttcaaagtggtggattgggacaaggacctggtggactggcgaaagcctctcctgtggcaggtgggccacttgggagagaagtacgatgagtgggttcaccagccggtgaccaggcccatccgcctcttccactcagacctcattgagggcctctctaagactgtctggtacagtgtccccatcatctgggtgcccctggtgctgtatctcagctggtcctactaccgaacctttgcccagggcaacgtccgactcttcacgtcatttacaacagagtacacggtggcagtgcccaagtccatgttccccgggctcttcatgctggggacattcctctggagcctcatcgagtacctcatccaccgcttcctgttccacatgaagccccccagcgacagctattacctcatcatgctgcacttcgtcatgcacggcc

SEQ ID NO: 133300 - DNA, 292 bp, Homo sapiens
  Payload ID: 6051
  Gene Symbol: FA2H
  Gene Name: fatty acid 2-hydroxylase
  ENST ID: ENST00000618933
  CDS Start-End: 1-55
actcttcacgtcatttacaacaggtaatgccagtttctttcctgacttgccctgaggatcctagagggaggagacctcagtgctttccctggcccagagtttctgagagcacagaaccccaaactacatcacagacatttttggtgaagcctctctgtagaaatagtcttccaaagaagaattttgtctgactcccatctaccccccaaatggatacaaaacccaacaacacatcagcagaaactaaatggaatcatcgggtggcatagcaataaaaaaagagagagagaga

SEQ ID NO: 133301 - DNA, 2094 bp, Homo sapiens
  Payload ID: 6052
  Gene Symbol: FAAH
  Gene Name: fatty acid amide hydrolase
  Uniprot ID: O00519
  ENST ID: ENST00000243167
  CDS Start-End: 85-1824
agtccgggttttgcggcggagcgggcgggctgcgcgtgcggcggcttcaactgtcgcggtaggcagcagcaggctgaagggatcatggtgcagtacgagctgtgggccgcgctgcctggcgcctccggggtcgccctggcctgctgcttcgtggcggcggccgtggccctgcgctggtccgggcgccggacggcgcggggcgcggtggtccgggcgcgacagaggcagcgagcgggcctggagaacatggacagggcggcgcagcgcttccggctccagaacccagacctggactcagaggcgctgctagccctgcccctgcctcagctggtgcagaagttacacagtagagagctggcccctgaggccgtgctcttcacctatgtgggaaaggcctgggaagtgaacaaagggaccaactgtgtgacctcctatctggctgactgtgagactcagctgtctcaggccccaaggcagggcctgctctatggcgtccctgtgagcctcaaggagtgcttcacctacaagggccaggactccacgctgggcttgagcctgaatgaaggggtgccggcggagtgcgacagcgtagtggtgcatgtgctgaagctgcagggtgccgtgcccttcgtgcacaccaatgttccacagtccatgttcagctatgactgcagtaaccccctctttggccagaccgtgaacccatggaagtcctccaaaagcccagggggctcctcagggggtgaaggggccctcatcgggtctggaggctcccccctgggcttaggcactgatatcggaggcagcatccgcttcccctcctccttctgcggcatctgcggcctcaagcccacagggaaccgcctcagcaagagtggcctgaagggctgtgtctatggacaggaggcagtgcgtctctccgtgggccccatggcccgggacgtggagagcctggcactgtgcctgcgagccctgctgtgtgaggacatgttccgcttggaccccactgtgcctcccttgcccttcagagaagaggtctacaccagctctcagcccctgcgtgtggggtactatgagactgacaactataccatgccctccccggccatgaggcgggccgtgctggagaccaaacagagccttgaggctgcggggcacacgctggttcccttcttgccaagcaacataccccatgctctggagaccctgtcaacaggtgggctcttcagtgatggtggccacaccttcctacagaacttcaaaggtgatttcgtggacccctgcctgggggacctggtctcaattctgaagcttccccaatggcttaaaggactgctggccttcctggtgaagcctctgctgccaaggctgtcagctttcctcagcaacatgaagtctcgttcggctggaaaactctgggaactgcagcacgagatcgaggtgtaccgcaaaaccgtgattgcccagtggagggcgctggacctggatgtggtgctgacccccatgctggcccctgctctggacttgaatgccccaggcagggccacaggggccgtcagctacactatgctgtacaactgcctggacttccctgcaggggtggtgcctgtcaccacggtgactgctgaggacgaggcccagatggaacattacaggggctactttggggatatctgggacaagatgctgcagaagggcatgaagaagagtgtggggctgccggtggccgtgcagtgtgtggctctgccctggcaagaagagttgtgtctgcggttcatgcgggaggtggagcgactgatgacccctgaaaagcagtcatcctgatggctctggctccagaggacctgagactcacactctctgcagcccagcctagtcagggcacagctgccctgctgccacagcaaggaaatgtcctgcatggggcagaggcttccgtgtcctctcccccaaccccctgcaagaagcgccgactccctgagtctggacctccatccctgctctggtcccctctcttcgtcctgatccctccacccccatgtggcagcccatgggtatgacataggccaaggcccaactaacagtcaagaaaca

SEQ ID NO: 133302 - DNA, 1046 bp, Homo sapiens
  Payload ID: 6052
  Gene Symbol: FAAH
  Gene Name: fatty acid amide hydrolase
  ENST ID: ENST00000484697
  CDS Start-End: 1-148
cggaggcagcatccgcttcccctcctccttctgcggcatctgcggcctcaagcccacagggaaccgcctcaggtctacaccagctctcagcccctgcgtgtggggtactatgagactgacaactataccatgccctccccggccatgaggcgggccgtgctggagaccaaacagagccttgaggctgcggggcacacgctggttcccttcttgccaagcaacataccccatgctctggagaccctgtcaacaggtgggctcttcagtgatggtggccacaccttcctacagaacttcaaaggtgatttcgtggacccctgcctgggggacctggtctcaattctgaagcttccccaatggcttaaaggactgctggccttcctggtgaagcctctgctgccaaggctgtcagctttcctcagcaacatgaagtctcggtgtaccgcaaaaccgtgattgcccagtggagggcgctggacctggatgtggtgctgacccccatgctggcccctgctctggacttgaatgccccaggcagggccacaggggtggtgcctgtcaccacggtgactgctgaggacgaggcccagatggaacattacaggggctactttggggatatctgggacaagatgctgcagaagggcatgaagaagagtgtggggctgccggtggccgtgcagtgtgtggctctgccctggcaagaagagttgtgtctgcggttcatgcgggaggtggagcgactgatgacccctgaaaagcagtcatcctgatggctctggctccagaggacctgagactcacactctctgcagcccagcctagtcagggcacagctgccctgctgccacagcaaggaaatgtcctgcatggggcagaggcttccgtgtcctctcccccaaccccctgcaagaagcgccgactccctgagtctggacctccatccctgctctggtcccctctcttcgtcctgatccctccacccccatgtggcagcccatgggtatgacataggccaaggcccaactaacagtcaagaaacagct

SEQ ID NO: 133303 - DNA, 1983 bp, Homo sapiens
  Payload ID: 6053
  Gene Symbol: FAAH2
  Gene Name: fatty acid amide hydrolase 2
  Uniprot ID: Q6GMR7
  ENST ID: ENST00000374900
  CDS Start-End: 121-1719
agacactggacttgtaaacgaaaagcttcataagtccctctttgcttagtacttttctcgtcctttccccagggtgcacgtaaccctcaagcactaggaccgtgcggaatccaggctgcgatggcaccttcatttaccgcccgcattcagttgttcctcttgcgggcgctaggctttctcataggcttagtaggccgagcagctttagtcttagggggtccaaagtttgcctcaaagacccctcggccggtgactgaaccattgcttctgctttcggggatgcagctggccaagctgatccgacagagaaaggtgaaatgtatagatgttgttcaggcttatatcaacagaatcaaggacgtgaacccaatgatcaatggaattgtcaagtacaggtttgaggaagcgatgaaggaggctcatgctgtagatcaaaagcttgcagagaagcaggaagatgaagccaccctggaaaataaatggcccttccttggggttcctttgacagtcaaggaagctttccagctacaaggaatgcccaattcttctggactcatgaaccgtcgtgatgccattgccaaaacagatgccactgtggtggcattactgaagggagctggtgccattcctcttggcataaccaactgtagtgagttgtgtatgtggtatgaatccagtaacaagatctatggccgatcaaacaacccatatgatttacagcatattgtaggtggaagttctggtggtgagggctgcacactggcagctgcctgctcagttattggtgtgggctctgatattggtggtagcattcgaatgcctgctttcttcaatggtatatttggacacaagccttctccaggtgtggttcccaacaaaggtcagtttcccttggctgtgggagcccaggagttgtttctgtgcactggtcctatgtgccgttatgctgaagacctggcccccatgttgaaggtcatggcaggacctgggatcaaaaggttaaaactagacacaaaggtacatttaaaagacttaaaattttactggatggaacatgatggaggctcatttttaatgtccaaagtggaccaagatctcattatgactcagaaaaaggttgtggttcaccttgaaactattctaggagcctcagttcaacatgttaaactgaagaaaatgaagtactcttttcagttgtggatcgcaatgatgtcagcaaagggacatgatgggaaggaacctgtgaaatttgtagatttgcttggtgaccatgggaaacatgtcagtcctctgtgggagttgatcaaatggtgcctgggtctgtcagtgtacaccatcccttccattggactggctttgttggaagaaaagctcagatatagcaatgagaaataccaaaagtttaaggcagtggaagaaagcctgcgtaaagagctggtggatatgctaggtgatgatggtgtgttcttatatccctcacatcccacagtggcacctaagcatcatgtccctctaacacggcctttcaactttgcttacacaggtgtcttcagtgccctgggtttgcctgtgacccaatgcccactgggactgaatgccaaaggactccctttaggcatccaggttgtggctggaccctttaatgatcatctgaccctggctgtggcccagtacttggagaaaacttttgggggctgggtctgtccaggaaagttttaggaggaccttctgcaaggttaatgtgtgtgtgtgtttgtgttcgtgtggtggtgtttctattaattgggtgaaatcaagcaccagcagacaagcagagaaacaactggggaatttattgactcatttagttattctttctacttttatttccttctctaactgttggtcttactaaaatggtaatatttgcttcttgcttttatgttactggaaaattaggacatgtaaatggataagtgcaataaagtttcctaaatgctggaa

SEQ ID NO: 133304 - DNA, 555 bp, Homo sapiens
  Payload ID: 6054
  Gene Symbol: FABP1
  Gene Name: fatty acid binding protein 1, liver
  Uniprot ID: P07148
  ENST ID: ENST00000295834
  CDS Start-End: 100-483
tattcgaagggaagggagccccctataaaacagcctacagtggacagtctggtcggcagagccgcaggtcagtcgtgaagagggagctctattgccaccatgagtttctccggcaagtaccaactgcagagccaggaaaactttgaagccttcatgaaggcaatcggtctgccggaagagctcatccagaaggggaaggatatcaagggggtgtcggaaatcgtgcagaatgggaagcacttcaagttcaccatcaccgctgggtccaaagtgatccaaaacgaattcacggtgggggaggaatgtgagctggagacaatgacaggggagaaagtcaagacagtggttcagttggaaggtgacaataaactggtgacaactttcaaaaacatcaagtctgtgaccgaactcaacggcgacataatcaccaataccatgacattgggtgacattgtcttcaagagaatcagcaagagaatttaaacaagtctgcatttcatattattttagtgtgtaaaattaatgtaataaagtgaactttgttttaaaaaaaaa

SEQ ID NO: 133305 - DNA, 1839 bp, Homo sapiens
  Payload ID: 6054
  Gene Symbol: FABP1
  Gene Name: fatty acid binding protein 1, liver
  ENST ID: ENST00000393750
  CDS Start-End: 33-407
gtcagtcgtgaagagggagctctattgccaccatgagtttctccggcaagtaccaactgcagagccaggaaaactttgaagccttcatgaaggcaatcggtctgccggaagagctcatccagaaggggaaggatatcaagggggtgtcggaaatcgtgcagaatgggaagcacttcaagttcaccatcaccgctgggtccaaagtgatccaaaacgaattcacggtgggggaggaatgtgagctggagacaatgacaggggagaaagtcaagacagtggttcagttggaaggtgacaataaactggtgacaactttcaaaaacatcaagtctgtgaccgaactcaacggcgacataatcaccaatgtaagttggtggtgctctgagcgtgtggctcccagtgcttgaggggagaggggaggtgaagcatggggagcggctcacataccctaatgccacccctccaccctccaacccccaaacttctttcctgtggtcagtatctgccagcacttactgaggatccatcatgtcccaggcagtttacacacattatcactaatcctttctgctcagcgcaaccaaccagccacagaggcctccacctgccctgcatgcccagggtgcttcataaatgcctttgcccatttagcgtttataaagagaatcccattcatggtcatattatggcagcttacaagcctggcacagtccagttatgcagtcagccttggtgcctggctgccagccacatcctgtaccctatttgggggtgaatggtgcagtgtttctcctgcaggtatgtccccctgactcttctttgcccccagaatatgctttagggagtcacagacaacagaacactgcctcagggcgctgtcatcactctattcaaatggaaaaattcttaaactagagagagtgtgagcatcaaccacccaatgtgcagtttccacctccgccccagcacattcccaggagagcaggggagcaggagatgagctatcctgcagtaagtcctggccaacgccctttgataggttccatctcacctaatcctcctgtctccttcgagggaggctggatgagggattcaatagacaggttgacctgtccaagtcatcagctaataaatgttaaatccagggctcaaacccatcaagcagcaactattgcattgctgctgaaactgaggggctccttttcaccctgatgacatggtatgtcattccagcagtcttattcaagagaactggcaggggtggaggaaacatccttaaaaactcaaaagctgatgcatccactgtttttatatgcttcacagctataggaggacaattatgcactacccactgccttccaggctgtgtgcctagttgtgtccatgtacatgtatccttggtgctcaacatgtatttggtgcatagtaggtactcaatgaaattttgagaaattagattgggctggtttggatggtcttgctataacagtcattgatgtagaaaagaattcagtcaaaggcaggaggactttccaggtgaggaggagaagtgacaaagacttggcataggattttggaaaacattgccaacctttcctccggtcctacaggaaaccagacgaatttttgaattgtttcatatgccaacatatttggtgctgttttttaagcttaattttgttttttatgcttaattttgttttttacaatacaacatcagatgaacacttcataatttcttttctggctttcagaccatgacattgggtgacattgtcttcaagagaatcagcaagagaatttaaacaagtctgcatttcatattattttagtgtgtaa

SEQ ID NO: 133306 - DNA, 551 bp, Homo sapiens
  Payload ID: 6055
  Gene Symbol: FABP12
  Gene Name: fatty acid binding protein 12
  Uniprot ID: A6NFH5
  ENST ID: ENST00000360464
  CDS Start-End: 64-486
ttcagggaaaaccagcatacacatgaaactactgttctttgagatcaacttatctcagacagaatgattgaccagctccaaggaacatggaagtccatttcttgtgaaaattccgaagactacatgaaggagctgggtataggaagagccagcaggaaactgggccgtttggcaaaacccactgtgaccatcagtacagatggagatgtcatcacaataaaaaccaaaagcatctttaaaaataatgagatctcctttaagctgggagaagagtttgaggaaatcacgccaggtggccacaaaacaaagagtaaagtaaccttagataaggagtccctgattcaagttcaggactgggatggcaaagaaaccaccataacgagaaagctggtggatgggaaaatggtggtggaaagtactgtgaacagtgttatctgtacacgaacatacgagaaagtatcatcaaactcagtctcaaactcttaaggctttctcaagctgtcatccaaactactgaggttgtttaaataaaactccaaagtaaaatatta

SEQ ID NO: 133307 - DNA, 503 bp, Homo sapiens
  Payload ID: 6055
  Gene Symbol: FABP12
  Gene Name: fatty acid binding protein 12
  ENST ID: ENST00000519696
  CDS Start-End: 1-271
ttccgaagactacatgaaggagctgggtataggaagagccagcaggaaactgggccgtttggcaaaacccactgtgaccatcagtacagatggagatgtcatcacaataaaaaccaaaagcatctttaaaaataatgagatctcctttaagctgggagaagagtttgaggaaatcacgccaggtggccacaaaacaaaggtgaggcctacgacagtctttcagacacatttcaaaagaatgttagtcagatatcatcctcgagtaaagtaaccttagataaggagtccctgattcaagttcaggactgggatggcaaagaaaccaccataacgagaaagctggtggatgggaaaatggtggtggaaagtactgtgaacagtgttatctgtacacgaacatacgagaaagtatcatcaaactcagtctcaaactcttaaggctttctcaagctgtcatccaaactactgaggttgtttaaataaaactccaaagtaaaatatta

SEQ ID NO: 133308 - DNA, 2478 bp, Homo sapiens
  Payload ID: 6056
  Gene Symbol: FABP2
  Gene Name: fatty acid binding protein 2, intestinal
  Uniprot ID: P12104
  ENST ID: ENST00000274024
  CDS Start-End: 289-687
ctaattcttgaaataagtatgcccacaaactgtaatttaagacagaataggtatgcttctcatgttttaattcagttgaatttcagaagatctcaggaatgtacagaacgagaattaagaattaattaataagaattaattaattgcttgacatagttaggtgatttcctgaactttaagcttccacatcacagtatgaagttggttctaagataagaaatataataaattctcgcccaaggacagacctgaatctctagctgcctagaggctgactcaactgaaatcatggcgtttgacagcacttggaaggtagaccggagtgaaaactatgacaagttcatggaaaaaatgggtgttaatatagtgaaaaggaagcttgcagctcatgacaatttgaagctgacaattacacaagaaggaaataaattcacagtcaaagaatcaagcacttttcgaaacattgaagttgtttttgaacttggtgtcacctttaattacaatctagcagacggaactgaactcagggggacctggagccttgagggaaataaacttattggaaaattcaaacggacagacaatggaaacgaactgaatactgtccgagaaattataggtgatgaactagtccagacttatgtatatgaaggagtagaagccaaaaggatctttaaaaaggattgagcattattcttggcgcacagtccaaaatacaaattggacagaagatctatattgtaccagaactatttatttcaccccatcaagtataaggttactgattgattggtccttttataaacattggtatatttccattcatgccaaagcaaaagaagtaaaagctaattaggatttaatttgttttatattctctaagatatatatttactaaaagaatttgtgacattttaaaaaacaaaaataaatattgcgtccatgttgctttatatgtagccttgccttttaaaagaaaaagtatgtgaatatgaattgacagactgttttcgtagagagagggtcttactctttcactcaggctggaatgtagtggagagatcatagctcactgtaacctcaaactcctggactcatgcaatcttcctgcctcaggcttctgagtagctaggactatgggtacattccacagtgcccagctaatttttgttttgttttctttttattttttttagagatggggtcttgctatattgcccaggctggtcttgaacccctggcctcaagcaatcctcctgcctcagcctctcaagttgttttttttctttacatttgataaactaaaagcataggctgcatatgagtctttaacatcttgaactggttgtgaataattttctggcactggttgtaagtaatatctattattataaaaataatatatgctcaaccagaaaacttagaaataagaaacacaaatgtaaaataagtatttccataactcataatccagagataattgccattctgattttgatagatatcctctcagctctcttccctgggggcagatatttcccaatacataccactttgaataggatgataggaaataaatgatgtactacattaaattaaattattgtattacatttttgtacacatcagtcattcccacgcttggctgaaaatcaggatcatctgagaaacttaaacaatttctgcattcttaatctccactgttattctattatatcagaatcgctaatagaaccaagaattctagaaaatttcctggtgattctgatgcagcctgtccactaacttgtctttgagaacaatggagatatcagttatcaatgttatttttaaccacccccttcttttttgttgttgtgggttttttcacataaacacatacattgccaattttccagggctcaaaaagtttccttttattcatattttcacatgacgtaaaattttatgtgcttcacataattgtattttagcagggtacatattaggggatggagagggggtacaatttttaagcatttgcagctgcaactctatagacttttgacaaattctttttcacactgatgtagataacagcttaacatttacatagttcttactacttgccacacactgttctaagtggtatatacatatgacatatatattaaaatgtaggaagaaaaatgtttgagtacctgatgaaaatgaatagagagtatgtaatctttgaaagctgaatactgcgtgttctcacttataagtgggagctaaataatgtatacacatggacacaccagagtgtagaataatagacactggagacttggaagagttggagggttggcagggggcgatgataatttacttaatgggtacaatgtacattattcagggggtgatggttacagcccagactttaccactatgcaatatatcaatgtaacaaaactatacttgtactccttaaatttatataaaaataccttaaatcta

SEQ ID NO: 133309 - DNA, 725 bp, Homo sapiens
  Payload ID: 6057
  Gene Symbol: FABP3
  Gene Name: fatty acid binding protein 3, muscle and heart
  Uniprot ID: P05413
  ENST ID: ENST00000373713
  CDS Start-End: 63-464
gccgtcggagcccttgcacgcctgctctcttgtagcttctctcagcctagcccagcatcactatggtggacgctttcctgggcacctggaagctagtggacagcaagaatttcgatgactacatgaagtcactcggtgtgggttttgctaccaggcaggtggccagcatgaccaagcctaccacaatcatcgaaaagaatggggacattctcaccctaaaaacacacagcaccttcaagaacacagagatcagctttaagttgggggtggagttcgatgagacaacagcagatgacaggaaggtcaagtccattgtgacactggatggagggaaacttgttcacctgcagaaatgggacgggcaagagaccacacttgtgcgggagctaattgatggaaaactcatcctgacactcacccacggcactgcagtttgcactcgcacttatgagaaagaggcatgacctgactgcactgttgctgactactactctgccaatcggctacccctcgactcagcaccacattgcctcatttcttcctctgcattttgtacaaatccacgaattcttctggggtcaggtgccactgaccgggatccagttccagttcccatggtgtatgtggttttttttttttttttttaactgcactcatagggtgctctgaggtcaataaagcagagccaaggccacccagttgcctttttgcctttggtaacataa

SEQ ID NO: 133310 - DNA, 625 bp, Homo sapiens
  Payload ID: 6057
  Gene Symbol: FABP3
  Gene Name: fatty acid binding protein 3, muscle and heart
  ENST ID: ENST00000482018
  CDS Start-End: 229-625
ggtcttgctgcctgccagatgttatatccacatctggatctgccaagggcaagacagaggagtacaaaaagggacagggctcacattcttccccaaatgtagtcagcataacagaggaagaggatgcagttgaagccctttctaatcctgtcccagaaataataaaactgaggattaaagaagcaaagcaatctgcctcagcttctctcagcctagcccagcatcactatggtggacgctttcctgggcacctggaagctagtggacagcaagaatttcgatgactacatgaagtcactcggtgtgggttttgctaccaggcaggtggccagcatgaccaagcctaccacaatcatcgaaaagaatggggacattctcaccctaaaaacacacagcaccttcaagaacacagagatcagctttaagttgggggtggagttcgatgagacaacagcagatgacaggaaggtcaagtccattgtgacactggatggagggaaacttgttcacctgcagaaatgggacgggcaagagaccacacttgtgcgggagctaattgatggaaaactcatcctgacactcacccacggcactgcagtttgcactcgcacttatgagaaagagg

SEQ ID NO: 133311 - DNA, 693 bp, Homo sapiens
  Payload ID: 6057
  Gene Symbol: FABP3
  Gene Name: fatty acid binding protein 3, muscle and heart
  ENST ID: ENST00000498148
  CDS Start-End: 60-329
gtcggagcccttgcacgcctgctctcttgtagcttctctcagcctagcccagcatcactatggtggacgctttcctgggcacctggaagctagtggacagcaagaatttcgatgactacatgaagtcactcggtgtgggttttgctaccaggcaggtggccagcatgaccaagcctaccacaatcatcgaaaagaatggggacattctcaccctaaaaacacacagcaccttcaagaacacagagatcagctttaagttgggggtggagttcgatgagacaacagcagatgacaggaaggtcaagcacagagccaggatgttcttctgacctcagtatctactccagctccagctgggtgaccctgtgcaagtccattgtgacactggatggagggaaacttgttcacctgcagaaatgggacgggcaagagaccacacttgtgcgggagctaattgatggaaaactcatcctgacactcacccacggcactgcagtttgcactcgcacttatgagaaagaggcatgacctgactgcactgttgctgactactactctgccaatcggctacccctcgactcagcaccacattgcctcatttcttcctctgcattttgtacaaatccacgaattcttctggggtcaggtgccactgaccgggatccagttccagttcccatggtgtatgtggtt

SEQ ID NO: 133312 - DNA, 941 bp, Homo sapiens
  Payload ID: 6058
  Gene Symbol: FABP4
  Gene Name: fatty acid binding protein 4, adipocyte
  Uniprot ID: P15090
  ENST ID: ENST00000256104
  CDS Start-End: 97-495
aaaaggaagttatctggactcaagagggtcacagcaccctcctgaaaactgcagcttccttctcaccttgaagaataatcctagaaaactcacaaaatgtgtgatgcttttgtaggtacctggaaacttgtctccagtgaaaactttgatgattatatgaaagaagtaggagtgggctttgccaccaggaaagtggctggcatggccaaacctaacatgatcatcagtgtgaatggggatgtgatcaccattaaatctgaaagtacctttaaaaatactgagatttccttcatactgggccaggaatttgacgaagtcactgcagatgacaggaaagtcaagagcaccataaccttagatgggggtgtcctggtacatgtgcagaaatgggatggaaaatcaaccaccataaagagaaaacgagaggatgataaactggtggtggaatgcgtcatgaaaggcgtcacttccacgagagtttatgagagagcataagccaagggacgttgacctggactgaagttcgcattgaactctacaacattctgtgggatatattgttcaaaaagatattgttgttttccatgatttagcaagcaactaattttctcccaagctgattttattcaatatggttacgttggttaaataaactttttttagatttagaaggtgatgtaatgatgtattcattgtgcttatgatgtattcttagtcataactgagtgaaggaaatgggaaatttgcattatttctttgttctgatatgaataataacatatttcataataattcaaggtaaaaagggatatctatggatttccctaggtaggagataacaagtatgtaccattactgaatattaaatccttctttaccatagctacagttaagtaggtgtatctcagaaacctaaggtagttttaaatgtagtgaaattg

SEQ ID NO: 133313 - DNA, 627 bp, Homo sapiens
  Payload ID: 6058
  Gene Symbol: FABP4
  Gene Name: fatty acid binding protein 4, adipocyte
  ENST ID: ENST00000522659
  CDS Start-End: 67-186
acagcaccctcctgaaaactgcagcttccttctcaccttgaagaataatcctagaaaactcacaaaatgtgtgatgcttttgtaggtacctggaaacttgtctccagtgaaaactttgatgattatatgaaagaagagtgggctttgccaccaggaaagtggctggcatggccaaacctaacatgatcatcagtgtgaatggggatgtgatcaccattaaatctgaaagtacctttaaaaatactgagatttccttcatactgggccaggaatttgacgaagtcactgcagatgacaggaaagtcaagagcaccataaccttagatgggggtgtcctggtacatgtgcagaaatgggatggaaaatcaaccaccataaagagaaaacgagaggatgataaactggtggtggaatgcgtcatgaaaggcgtcacttccacgagagtttatgagagagcataagccaagggacgttgacctggactgaagttcgcattgaactctacaacattctgtgggatatattgttcaaaaagatattgttgttttccatgatttagcaagcaactaattttctcccaagctgattttattcaatatggttacgttggttaaataaacttttttt

SEQ ID NO: 133314 - DNA, 851 bp, Homo sapiens
  Payload ID: 6059
  Gene Symbol: FABP5
  Gene Name: fatty acid binding protein 5 (psoriasis-associated)
  Uniprot ID: Q01469
  ENST ID: ENST00000297258
  CDS Start-End: 234-641
ggccgtcgcgtaccctggcaagaggagctggttagcacctcccgaccccgagaaggcccagggggcgcccggcgggcggggcggggaccgggcgaggcccgcctcccattggccgcatagcgccgcccagcgcgggccgccgttataaagcagccgccggcgccgggtgcctcacagcacgctgccacgccgacgcagacccctctctgcacgccagcccgcccgcacccaccatggccacagttcagcagctggaaggaagatggcgcctggtggacagcaaaggctttgatgaatacatgaaggagctaggagtgggaatagctttgcgaaaaatgggcgcaatggccaagccagattgtatcatcacttgtgatggtaaaaacctcaccataaaaactgagagcactttgaaaacaacacagttttcttgtaccctgggagagaagtttgaagaaaccacagctgatggcagaaaaactcagactgtctgcaactttacagatggtgcattggttcagcatcaggagtgggatgggaaggaaagcacaataacaagaaaattgaaagatgggaaattagtggtggagtgtgtcatgaacaatgtcacctgtactcggatctatgaaaaagtagaataaaaattccatcatcactttggacaggagttaattaagagaatgaccaagctcagttcaatgagcaaatctccatactgtttctttcttttttttttcattactgtgttcaattatctttatcataaacattttacatgcagctatttcaaagtgtgttggattaattaggatcatccctttggttaataaataaatgtgtttgtgctaata

SEQ ID NO: 133315 - DNA, 986 bp, Homo sapiens
  Payload ID: 6059
  Gene Symbol: FABP5
  Gene Name: fatty acid binding protein 5 (psoriasis-associated)
  ENST ID: ENST00000396359
  CDS Start-End: 471-776
gggagcgtgcgcgcctcttgcccgcccgcgggccgcaagattccggaggtggtccaccccgtggtccacctacctctgcttctttcccttcgcccaaacggcagcccttccgcattgcttcctgtcctttagcgcgcgcacccgtcacctcacgctgcacttctttcgaccccctccaggcgaccctgtatttcccttttttccccctttactcatccttccccttcctgccaccattctgtctctcccatttaccccatcgtggcagcacccactcccctttccctccctgtcgcatcttttgttccctgtggcgcgcaggtcaccctccgttttcttcatggggacgcggtgctggcgcgcagtttcccgcagaaatcctgtggaggggtctgagtggcgctacagcttcagcttgcattcctctgtcagccccgtctcccccaggagtgggaatagctttgcgaaaaatgggcgcaatggccaagccagattgtatcatcacttgtgatggtaaaaacctcaccataaaaactgagagcactttgaaaacaacacagttttcttgtaccctgggagagaagtttgaagaaaccacagctgatggcagaaaaactcagactgtctgcaactttacagatggtgcattggttcagcatcaggagtgggatgggaaggaaagcacaataacaagaaaattgaaagatgggaaattagtggtggagtgtgtcatgaacaatgtcacctgtactcggatctatgaaaaagtagaataaaaattccatcatcactttggacaggagttaattaagagaatgaccaagctcagttcaatgagcaaatctccatactgtttctttcttttttttttcattactgtgttcaattatctttatcataaacattttacatgcagctatttcaaagtgtgttggattaattaggatcatccctttggttaataaataaatgtgtttgtgctaata

SEQ ID NO: 133316 - DNA, 756 bp, Homo sapiens
  Payload ID: 6060
  Gene Symbol: FABP6
  Gene Name: fatty acid binding protein 6, ileal
  Uniprot ID: P51161
  ENST ID: ENST00000393980
  CDS Start-End: 147-680
gcgacaacaaaacagattactttgaagggactagaaggaggacacagggtcctggaggaaggcagctggcaagttacagagcagaaagactttgcacctctggctccagggagctcacaggcaggggctggtccagcccagaggcgatgaagacagtgacgatgatgatggtggtggagatgcaggcgctgactcaggttctgagagctgtgttgtctgcgtgcacatgggtgagccggaaaggagacctgcagagaatgaaacagacacataaaggaaagcctcccagcagcatggctttcaccggcaagttcgagatggagagtgagaagaattatgatgagttcatgaagctccttgggatctccagcgatgtaatcgaaaaggcccgcaacttcaagatcgtcacggaggtgcagcaggatgggcaggacttcacttggtcccagcactactccgggggccacaccatgaccaacaagttcactgttggcaaggaaagcaacatacagacaatggggggcaagacgttcaaggccactgtgcagatggagggcgggaagctggtggtgaatttccccaactatcaccagacctcagagatcgtgggtgacaagctggtggaggtctccaccatcggaggcgtgacctatgagcgcgtgagcaagagactggcctaagcagccaggcccggcccagggagctacaaacccaccaataaaactgatataaggacagacgctgctcgctccagaa

SEQ ID NO: 133317 - DNA, 572 bp, Homo sapiens
  Payload ID: 6060
  Gene Symbol: FABP6
  Gene Name: fatty acid binding protein 6, ileal
  Uniprot ID: P51161
  ENST ID: ENST00000402432
  CDS Start-End: 129-515
gaagaagtggggtgacttaggggctgagcctcagcaactgggagagtttataagctgggatagcagacccctcagcaccacccattctcctcatccctctgctctctggcctccagcctcccagcagcatggctttcaccggcaagttcgagatggagagtgagaagaattatgatgagttcatgaagctccttgggatctccagcgatgtaatcgaaaaggcccgcaacttcaagatcgtcacggaggtgcagcaggatgggcaggacttcacttggtcccagcactactccgggggccacaccatgaccaacaagttcactgttggcaaggaaagcaacatacagacaatggggggcaagacgttcaaggccactgtgcagatggagggcgggaagctggtggtgaatttccccaactatcaccagacctcagagatcgtgggtgacaagctggtggaggtctccaccatcggaggcgtgacctatgagcgcgtgagcaagagactggcctaagcagccaggcccggcccagggagctacaaacccaccaataaaactgatataaggaca

SEQ ID NO: 133318 - DNA, 769 bp, Homo sapiens
  Payload ID: 6060
  Gene Symbol: FABP6
  Gene Name: fatty acid binding protein 6, ileal
  ENST ID: ENST00000523955
  CDS Start-End: 1-117
ctgactcaggttctgagagctgtgttgtctgcgtgcacatgggtgagccggaaaggagacctgcagagaatgaaacagacacataaaggaaagaggacattctcacaagatgggtaggccggagtgatcacggaggagatagagtccctgcatgtgaagtggtactgagagacacagcaggaaatggaagtcaagattctgaacccctaaccccttccagctctgaagcttgaacaaaataaaactcatccagcatccagcccagtgcctggtgcacaggcatcttcaaggcacctggcaccttctcctccagcctcccagcagcatggctttcaccggcaagttcgagatggagagtgagaagaattatgatgagttcatgaagctccttgggatctccagcgatgtaatcgaaaaggcccgcaacttcaagatcgtcacggaggtgcagcaggatgggcaggacttcacttggtcccagcactactccgggggccacaccatgaccaacaagttcactgttggcaaggaaagcaacatacagacaatggggggcaagacgttcaaggccactgtgcagatggagggcgggaagctggtggtgaatttccccaactatcaccagacctcagagatcgtgggtgacaagctggtggaggtctccaccatcggaggcgtgacctatgagcgcgtgagcaagagactggcctaagcagccaggcccggcccagggagctacaaacccaccaataaaactgatataaggaca

SEQ ID NO: 133319 - DNA, 2086 bp, Homo sapiens
  Payload ID: 6061
  Gene Symbol: FABP7
  Gene Name: fatty acid binding protein 7, brain
  Uniprot ID: O15540
  ENST ID: ENST00000356535
  CDS Start-End: 37-537
ccccgctcctgtctctaaagaggggaaagggcaaggatggtggaggctttctgtgctacctggaagctgaccaacagtcagaactttgatgagtacatgaaggctctaggcgtgggctttgccactaggcaggtgggaaatgtgaccaaaccaacggtaattatcagtcaagaaggagacaaagtggtcatcaggactctcagcacattcaagaacacggagattagtttccagctgggagaagagtttgatgaaaccactgcagatgatagaaactgtaagtctgttgttagcctggatggagacaaacttgttcacatacagaaatgggatggcaaagaaacaaattttgtaagagaaattaaggatggcaaaatggttatggtaagtaatgacaattctccattcttccttgtttttttctcctctccgcacacctctcacctccttccttcttcttccctcctccttccattcttcctccttccttccttctttaataatacatcactggcaaggttctttaactatatgtaaaacaggggaaacaaaaagatcccagttaattttcttcttcagctcaacttctttgattgtagaaaaagagaaaaattcatgtgtagttaaaaaaataaaagttgccattgatttgcctaaaactgtgtcaaaagattttttgtaggataactatggatgtctctcaaataaaatttaatataaagcccataatcactgaaatatataaagataattgctattataagagaatctcagacagatgactttatagctcctgtaataagagatctttaaacagtttatattttaatttataaagttacacaagttctgggcagataatttagaatataacagaaaagtataacaaaaaaattaaaatcccctctgatttctcatcagtgataacccttttttttttttttttttgagataaagtcttgctgtgtcacccagactggagtgcagggggtgcattcttggctcactgcaacctctgcttcatgggctcaagcgattctacaacctcagcctcctaagtagctgggaccacaggtgcaagccaccaacgccgggctaatttttttgtatttttgtagagatgggatttcgccatgttgcccaggctggcctacagctcttgagctcaaagtgatgctcccgcctgctgcctcggcctcccagagtgctgggattacaggcctgagccaaggctcccagcccccaaagagaaccattttgatgttacttctttccagtttttttctcgaatgcataatatgccttttaaacatatatattcaatactaggtagacatgaaaaatatttttttcaatcagcctcttcttacttactaggaattatctgtaaaagaggatttattagtgtcctaaggctgccacaacaaagtaccacaaacttggtggcttaaaacaacagaaatgaattttctcagttctgaaagctggacgcctgagatcaaggcgaccctagtgttgccatccttctgcgggccccctcccttgcttcttcctacttcccggatggctcctggcaatcattgaggttgttgggcttacagttgttattactctgatccatttctgactccatctttacaagactttttcctctgtttttgtcctaaattgatcaaatataaaataattaacaaataatttatctaatgatggagtagtatcacaaactaggagaaatattatgccttcaccaagccttcctcagacactttttgtgtgacctgcaatggtatattgatgatactgacataggtgggtaggctcattcaattttggaggagggtgtgagaatgctttacatagtccttgtacgatgacagcagagaaagttttgttgtttaagaatggggactcatgtttccttctccccttgactactgcaatcagcactgttctgcattgagatattcatgtttctgtggagatggaggtggggagcagagggacagttttcctttcatgttaaaggatatttgctcacatttttttggcaacaatcaataaaagaaaggactcatttctaaaa

SEQ ID NO: 133320 - DNA, 1026 bp, Homo sapiens
  Payload ID: 6061
  Gene Symbol: FABP7
  Gene Name: fatty acid binding protein 7, brain
  Uniprot ID: O15540
  ENST ID: ENST00000368444
  CDS Start-End: 321-719
tttctcaggcataagggctgtagtgtgaggattgggaggaactcgacctactccgctaacccagtggcctgagccaatcacaaagaggattggagcctcactcgagcgctccttcccttctcctctctctgtgacagcctcttggaaagagggacactggaggggtgtgtttgcaatttaaatcactggatttttgcccaccctctttccaaataagaaggcaggagctgcttgctgaggtgtaaagggtcttctgagctgcagtggcaattagaccagaagatccccgctcctgtctctaaagaggggaaagggcaaggatggtggaggctttctgtgctacctggaagctgaccaacagtcagaactttgatgagtacatgaaggctctaggcgtgggctttgccactaggcaggtgggaaatgtgaccaaaccaacggtaattatcagtcaagaaggagacaaagtggtcatcaggactctcagcacattcaagaacacggagattagtttccagctgggagaagagtttgatgaaaccactgcagatgatagaaactgtaagtctgttgttagcctggatggagacaaacttgttcacatacagaaatgggatggcaaagaaacaaattttgtaagagaaattaaggatggcaaaatggttatgacccttacttttggtgatgtggttgctgttcgccactatgagaaggcataaaaatgttcctggtcggggcttggaagagctcttcagtttttctgtttcctcaagtctcagtgctatcctattacaacatggctgatcattaattagaaggttatccttggtgtggaggtggaaaatggtgatttaaaaacttgttactccaagcaacttgcccaattttaatctgaaaatttatcatgttttataatttgaattaaagttttgtcccccccccccttttttttataaacaagtgaatacattttataatttcttttggaatgtaaatcaaatttgaataaaaatcttacacgtgaaa

SEQ ID NO: 133321 - DNA, 497 bp, Homo sapiens
  Payload ID: 6062
  Gene Symbol: FABP9
  Gene Name: fatty acid binding protein 9, testis
  Uniprot ID: Q0Z7S8
  ENST ID: ENST00000379071
  CDS Start-End: 57-455
gcctatatttctttggttttcaattacgagtggctcttctcagcaagtgttccatgatggttgagcccttcttgggaacctggaagctggtctccagtgaaaactttgaggattacatgaaagaactgggagtgaatttcgcagcccggaacatggcagggttagtgaaaccgacagtaactattagtgttgatgggaaaatgatgaccataagaacagaaagttctttccaggacactaagatctccttcaagctgggggaagaatttgatgaaactacagcagacaaccggaaagtaaagagcaccataacattagagaatggctcaatgattcacgtccaaaaatggcttggcaaagagacaacaatcaaaagaaaaattgtggatgaaaaaatggtagtggaatgtaaaatgaataatattgtcagcaccagaatctacgaaaaggtgtgaagaaaggtccacagcaatgaaaacttgttcactgacaaggaa

SEQ ID NO: 133322 - DNA, 4525 bp, Homo sapiens
  Payload ID: 6063
  Gene Symbol: FADS1
  Gene Name: fatty acid desaturase 1
  ENST ID: ENST00000350997
  CDS Start-End: 234-1739
cattcactcctgcagcgcggccccgcacccagggcctgcactagaaccgctgttcctaccgcggcgccccctgggagccaacgccgcgatgcccgcctgacgtcaggaagtcgaatccggcggcgacgcctttagggagcccgcgagggggcgcgtgttggcagcccagctgtgagttgcccaagacccaccgggggacgggatctcgctccccgcgccacgaggctcggccaatgggaacgcgcgctgcgaggcccgccggtctgccctgcggtgctgaaaacccggcgcgcaggcggctggctctgggcgcgcgccagcaaatccactcctggagcccgcggaccccgagcacgcgcctgacagcccctgctggcccggcgcgcggcgtcgccaggccagctatggcccccgacccggtggccgccgagaccgcggctcagggacctaccccgcgctacttcacctgggacgaggtggcccagcgctcagggtgcgaggagcggtggctagtgatcgaccgtaaggtgtacaacatcagcgagttcacccgccggcatccagggggctcccgggtcatcagccactacgccgggcaggatgccacggatccctttgtggccttccacatcaacaagggccttgtgaagaagtatatgaactctctcctgattggagaactgtctccagagcagcccagctttgagcccaccaagaataaagagctgacagatgagttccgggagctgcgggccacagtggagcggatggggctcatgaaggccaaccatgtcttcttcctgctgtacctgctgcacatcttgctgctggatggtgcagcctggctcaccctttgggtctttgggacgtcctttttgcccttcctcctctgtgcggtgctgctcagtgcagttcaggcccaggctggctggctgcagcatgactttgggcacctgtcggtcttcagcacctcaaagtggaaccatctgctacatcattttgtgattggccacctgaagggggcccccgccagttggtggaaccacatgcacttccagcaccatgccaagcccaactgcttccgcaaagacccagacatcaacatgcatcccttcttctttgccttggggaagatcctctctgtggagcttgggaaacagaagaaaaaatatatgccgtacaaccaccagcacaaatacttcttcctaattgggcccccagccttgctgcctctctacttccagtggtatattttctattttgttatccagcgaaagaagtgggtggacttggcctggatgattaccttctacgtccgcttcttcctcacttatgtgccactattggggctgaaagccttcctgggccttttcttcatagtcaggttcctggaaagcaactggtttgtgtgggtgacacagatgaaccatattcccatgcacattgatcatgaccggaacatggactgggtttccacccagctccaggccacatgcaatgtccacaagtctgccttcaatgactggttcagtggacacctcaacttccagattgagcaccatctttttcccacgatgcctcgacacaattaccacaaagtggctcccctggtgcagtccttgtgtgccaagcatggcatagagtaccagtccaagcccctgctgtcagccttcgccgacatcatccactcactaaaggagtcagggcagctctggctagatgcctatcttcaccaataacaacagccaccctgcccagtctggaagaagaggaggaagactctggagccaaggcagaggggagcttgagggacaatgccactatagtttaatactcagagggggttgggtttggggacataaagcctctgactcaaactcctcccttttatcttctagccacagttctaagacccaaagtggggggtggacacagaagtccctaggagggaaggagctgttggggcaggggtgtaaattatttcctttttctagtttggcacatgcaggtagttggtgaacagagagaaccaggagggtaacagaagaggagggacctactgaacccagagtcaggaagagatttaacactaaaattccactcatgccgggcgtggtggcacgcgcctgtaatcccagctacccaggaggctgaggcaggagaatcgcttgaaccggggaggtggaggttgcagtgagctgagatcacgccattgtactccagcctgggcgacagagcaagactccatttcaaaaaaaaaaaaaaaatccactcatataaaaggtgagctcagctcactggtccatttctcagtggcttctccatcctcatttgcaaacctcagagggataaggcagttgaacctgatgagcaagaattataacagcaaggaaacattaatgcttagaattctgagatccagcacaactcagtctgtgggagctcagctcgctgcccagggataggtatgacctatgtctgccttaggctgctgggagatgccattctccagtttcagaagcaggcagggcaaaggtcaagactgtggtattggggtcttttggctctgaaggatcctggaaccactgattttggtttattccctccagggtctaaagagaacaagaggtgctagctcttaccaaaacagatggtagagagagttgctggctatttaaaaagctctttcatcttttaattcacctcttcttttcacctctttaaccactcctcaggaacagaacacttctaggactgggggtcttttagctccataagcaagtgagcagatgggacaagttagtcttttctccctagaaacaaaggggatgcccagtggtttccctttgcttcccaacctaaaatttcaagtttaataaaatagcaattagcagaagtgaccaaattgggagataattatcagtcatgaggaaagacacagatttcggtcataaagaatgtaagggctataagtagaaactttctataacctaaatgatgttatagaattatttttgagcaggagcagaaagattaaatatgatcacttcatacttctaaatcagaaataggaagattaaaaccacagaacagtttgtgatttctattgctgtagctaggtatcttactctgtccactcttgttcaagtatctaactcttctggaaaccaaataggctttagaagagattatcctatattcctatcagtataatactaaaatgtaactttttaatcatctggtttttaaaagataaacagtttagcccatctctccagagagcaaacataggaatatgactcaggagcctcctagggcttatcatcagccctcacacccgcttccccctccaacccacagcctttgcttccaggtggcaggattactactttgcctcttcagcagcatctactctaggcatattgatcattttagacactgggagaagagaacctcaaactaggaggaaaagacagagcctccacttagttttgggaggggatggcagacagtcaaggagatgagcgtcctaaggcatgttgggatagggtcagatgcaccacccatggagaggtttgtcaacacaaagacatggaaggttagaggtttgtcaacaaaaagacatggaaggttaggtttgtcaacacaaagacatggaagattagaggtttgtcaacacaaagacacaggaagaatgggctgcagaagatttagatgttttccatttgggcacattttacttagctggagaactaggtttaaaacagcctgggtaggaaaattagaagcaagctggatgcagtggctcatgcctgtaatcccaacacttttgggaggtccaggcaggaggatcacttgggcccaggaggtcaagcctgcagcgagctgagatcacaccactgcactccagcctggggtgatagaacaagaccctgtctcaaaaaaaaaaaaaacaacaaaaacttagaattgaggagttgtacctccattggcttcctcactccaaaataggtgctgatccttcctattcctattctttgccaccttttgggtgtggtgtcaccagcctgtttagccaagtagctttgggcataggctgcccaatctgagcaaacaccagtgaggctctattgagccaagaccaagtcctcaaagcacctgaaccactgtggccttctcagcctacagcagtgtggtctcttacatggccacaaagggacacacagtgacaaaaggctcggaatgttacaatggtaaaatgagtgatctcaaatccactgacagatataaaataggcttagagaggaaaagctgcctctggtcaagtagatcatggcagcatgaattccaactcacttttttacaactccaacttctatgtttatctttgttactttcacttttttacaacctggccagaggcattttttaaatcaggcccaatatcagtattctttttgtgtgtgccaattttgttatcacatccctatgaagttgaaaaataaagttaattttgaccaaaaga

SEQ ID NO: 133323 - DNA, 559 bp, Homo sapiens
  Payload ID: 6063
  Gene Symbol: FADS1
  Gene Name: fatty acid desaturase 1
  ENST ID: ENST00000448607
  CDS Start-End: 417-559
aaatccaccggctcaaggcctcactcgacctgggctttgcaaaccccaggccgttctccttccaccaatcccggacgccggtccccaagaaggccggctcgagcttggggacgtcccaagctccattcagcgccggaggtctgtttggcccacggggagccagggatcctgactccgcctgcagcagagaagggtggctggggcgcccccagacccttaccgttgcatcttctccagcgtagtgcccgatgacccgctggccccccgggtgctggatggaccatttggtgatgttgtaaaccttgcggtcaatgaccagccacctgtcggtgcgcaggttatgcttctgaatctcctcccagctgaaggatccctttgtggccttccacatcaacaagggccttgtgaagaagtatatgaactctctcctgattggagaactgtctccagagcagcccagctttgagcccaccaagaataaagagctgacagatgagttccgggagctgcgggccacagtggagcggatggggctcatgaaggccaaccatgtcttctt

SEQ ID NO: 133324 - DNA, 1690 bp, Homo sapiens
  Payload ID: 6063
  Gene Symbol: FADS1
  Gene Name: fatty acid desaturase 1
  Uniprot ID: O60427
  ENST ID: ENST00000433932
  CDS Start-End: 255-1337
gtctcgatggctaggagaggcagcgcagccgcgtctggacctaggtgccggtctccactcgccagcaggagcggagagggagcaggaaaggagcccattctcgaggatggggctgaaacgggaagcttggggagaccgctgccttggggacccctgcgtcgtgtgaagactggaggacgcggaagggacagcgctggccggggagggatccctttgtggccttccacatcaacaagggccttgtgaagaagtatatgaactctctcctgattggagaactgtctccagagcagcccagctttgagcccaccaagaataaagagctgacagatgagttccgggagctgcgggccacagtggagcggatggggctcatgaaggccaaccatgtcttcttcctgctgtacctgctgcacatcttgctgctggatggtgcagcctggctcaccctttgggtctttgggacgtcctttttgcccttcctcctctgtgcggtgctgctcagtgcagttcaggcccaggctggctggctgcagcatgactttgggcacctgtcggtcttcagcacctcaaagtggaaccatctgctacatcattttgtgattggccacctgaagggggcccccgccagttggtggaaccacatgcacttccagcaccatgccaagcccaactgcttccgcaaagacccagacatcaacatgcatcccttcttctttgccttggggaagatcctctctgtggagcttgggaaacagaagaaaaaatatatgccgtacaaccaccagcacaaatacttcttcctaattgggcccccagccttgctgcctctctacttccagtggtatattttctattttgttatccagcgaaagaagtgggtggacttggcctggatgattaccttctacgtccgcttcttcctcacttatgtgccactattggggctgaaagccttcctgggccttttcttcatagtcaggttcctggaaagcaactggtttgtgtgggtgacacagatgaaccatattcccatgcacattgatcatgaccggaacatggactgggtttccacccagctccaggccacatgcaatgtccacaagtctgccttcaatgactggttcagtggacacctcaacttccagattgagcaccatctttttcccacgatgcctcgacacaattaccacaaagtggctcccctggtgcagtccttgtgtgccaagcatggcatagagtaccagtccaagcccctgctgtcagccttcgccgacatcatccactcactaaaggagtcagggcagctctggctagatgcctatcttcaccaataacaacagccaccctgcccagtctggaagaagaggaggaagactctggagccaaggcagaggggagcttgagggacaatgccactatagtttaatactcagagggggttgggtttggggacataaagcctctgactcaaactcctcccttttatcttctagccacagttctaagacccaaagtggggggtggacacagaagtccctaggagggaaggagctgttggggcaggggtgtaaattatttcctttttctagtttggcacatgcaggtagttggtgaacagagagaaccaggagggtaacagaagaggagggacctactgaacccagagtcaggaagagatttaacacta

SEQ ID NO: 133325 - DNA, 926 bp, Homo sapiens
  Payload ID: 6063
  Gene Symbol: FADS1
  Gene Name: fatty acid desaturase 1
  ENST ID: ENST00000424501
  CDS Start-End: 1-685
cgccaggccagctatggcccccgacccggtggccgccgagaccgcggctcagggacctaccccgcgctacttcacctgggacgaggtggcccagcgctcagggtgcgaggagcggtggctagtgatcgaccgtaaggtgtacaacatcagcgagttcacccgccggcatccagggggctcccgggtcatcagccactacgccgggcaggatgccacggatccctttgtggccttccacatcaacaagggccttgtgaagaagtatatgaactctctcctgattggagaactgtctccagagcagcccagctttgagcccaccaagaataaagagctgacagatgagttccgggagctgcgggccacagtggagcggatggggctcatgaaggccaaccatgtcttcttcctgctgtacctgctgcacatcttgctgctggatggtgcagcctggctcaccctttgggtctttgggacgtcctttttgcccttcctcctctgtgcggtgctgctcagtgcagttcagcactttgggaggccaaggtggccggatcacttgatctcagttcaagaccagcctggccaacgtggtgaaacctctactaaaaatacaaaaaggccaggcacagtggctcacgcctgtaataccagtaccttgggaggccaagatgggcagatcatttgaggcccaggctggctggctgcagcatgactttgggcacctgtcggtcttcagcacctcaaagtggaaccatctgctacatcattttgtgattggccacctgaagggggcccccgccagttggtggaaccacatgcacttccagcaccatgccaagcccaactgcttccgcaaagacccagacatcaacatgcatcccttcttctttgccttggggaagatcctctctgtggaggtgcgtgga

SEQ ID NO: 133326 - DNA, 583 bp, Homo sapiens
  Payload ID: 6063
  Gene Symbol: FADS1
  Gene Name:: fatty acid desaturase 1
  ENST ID: ENST00000421879
  CDS Start-End: 167-583
agtgctgctaaatccaccggctcaaggcctcactcgacctgggctttgcaaaccccaggccgttctccttccaccaatcccggacgccggtccccaagaaggccggctcgagcttggggatccctttgtggccttccacatcaacaagggccttgtgaagaagtatatgaactctctcctgattggagaactgtctccagagcagcccagctttgagcccaccaagaataaagagctgacagatgagttccgggagctgcgggccacagtggagcggatggggctcatgaaggccaaccatgtcttcttcctgctgtacctgctgcacatcttgctgctggatggtgcagcctggctcaccctttgggtctttgggacgtcctttttgcccttcctcctctgtgcggtgctgctcagtgcagttcaggcccaggctggctggctgcagcatgactttgggcacctgtcggtcttcagcacctcaaagtggaaccatctgctacatcattttgtgattggccacctgaagggggcccccgccagttggtggaaccacatgcacttccagcaccatgccaagccc

SEQ ID NO: 133327 - DNA, 525 bp, Homo sapiens
  Payload ID: 6063
  Gene Symbol: FADS1
  Gene Name: fatty acid desaturase 1
  ENST ID: ENST00000491310
  CDS Start-End: 1-525
gcggcgtcgccaggccagctatggcccccgacccggtggccgccgagaccgcggctcagggacctaccccgcgctacttcacctgggacgaggtggcccagcgctcagggtgcgaggagcggtggctagtgatcgaccgtaaggtgtacaacatcagcgagttcacccgccggcatccagggggctcccgggtcatcagccactacgccgggcaggatgccacgaaagagctgacagatgagttccgggagctgcgggccacagtggagcggatggggctcatgaaggccaaccatgtcttcttcctgctgtacctgctgcacatcttgctgctggatggtgcagcctggctcaccctttgggtctttgggacgtcctttttgcccttcctcctctgtgcggtgctgctcagtgcagttcaggcccaggctggctggctgcagcatgactttgggcacctgtcggtcttcagcacctcaaagtggaaccatctgctacatcattttgtgattggccacctgaagg

SEQ ID NO: 133328 - DNA, 563 bp, Homo sapiens
  Payload ID: 6063
  Gene Symbol: FADS1
  Gene Name: fatty acid desaturase 1
  ENST ID: ENST00000539419
  CDS Start-End: 304-563
aatcttatcgccatggaccttaccttgcacaacccaaagtagctgccttggggcagggggtggccagagtgcttagggaaatgtggagccctacccagaacaacggtggagggaaagggaagaaacgcagaagtgccccagttcggacgtagggaagtcttcctcttcgtggtttttggagaaccctagctaagagaggaaagggacttattgaaagacccgcaagaagggacggaagtctcatagccctgagaggatccctttgtggccttccacatcaacaagggccttgtgaagaagtatatgaactctctcctgattggagaactgtctccagagcagcccagctttgagcccaccaagaataaagagctgacagatgagttccgggagctgcgggccacagtggagcggatggggctcatgaaggccaaccatgtcttcttcctgctgtacctgctgcacatcttgctgctggatggtgcagcctggctcaccctttgggtctttgggacgtcctttttgcccttcctcctctgtgcggtgctgctcagtgcagttca

SEQ ID NO: 133329 - DNA, 2701 bp, Homo sapiens
  Payload ID: 6063
  Gene Symbol: FADS1
  Gene Name: fatty acid desaturase 1
  ENST ID: ENST00000536991
  CDS Start-End: 1719-2297
tactccctgcatgacagcagtttgccatctcagctgagcgaagtgaagttaggctgatgattggttgaaggcaaactagttcttcccatccaaccccagtttccactgggaagctgggtgtttggggtgtagaggggcctcttgctttatcctcaaccttatctttttttttttttttttgagacggagtcttgctctgtcgcccaggccggactgcggactgcagtggcgcaatctcggctcactgcaagctctccgcttcccgggttcacgccattctcctgcctcagcctcccgagtagctgggattacaggcacccgccaccgcgcccggctaattttttgtatttttagtagagacggggtttcaccttgttagccaggatggtctcgatctcctgacctcatgatccacccgcctcggcctcccaaagtgctgggattacaggcgtgagccaccgcgcccggcccctcaaccttatcttaaactttgtcaagatgggccaaggtaacctggtagagcccagtccaacccccagaggaacaaaggtacagatagttctggaaggatgggtcctgaggagagaatggaagagctgttagaacgaagaagatctttctgatgactgccacatattcccagctttaaaagtctgtcccagctactaaggaaactgaggtgggaccatcctttgagcccaggaatttggggctgcagtaagctccgattgtgccactgcactccagcctgggcaacagagtgagatcttgtttcttaaaacaacaacaactctgctccataatgcctaaaatgagctttaaacgcctttaaattttcaaattttttaaagaaggaagggaaggagtccactgatcttattttagtttgaaggaattcatcctaactgcctatcaccaactatcacgaatagagaaaggcgatggggcagaagggtagagcagagacctctggaagaaatagttttagaatccatggcacatcaagatggaggagccatgggtgagcattgtcatgctaggagttatgggtagcatcaggtgccacagagaagggctacagaaaaggaaatgaggaagcatgtagaatgcaacacttcttcaactcccagttttctttcaagagaggcccctctgttccgtcccacagctgacctccagggcttcagattggggtggcacaagcccatctccctagtttaaggaagtgagcttcacagcctgtgaaggatccacagggtccctcccaacacacacacactttcctgctcctgccccttcacctgcatggtggagctgccaggaacaaagggcagatgactgtagggacagggctgtggccaaggtaagtaagagagtattagcacccttttaaaagtgtgggatccttggagtgtgtatgtagaaaagagaagaaaaatgaaaaataataaaggtgtgggagcagagcaagtcccatgcgtggggcctgagttcccaagcacctgtcactgaagagtgccactcgcacccctcaccttccctggcatcctcttgggagtttttgccttccccagacttggatttatgcccaccttcagtgcctgctggttccagtggattgcagagcactcaagcacctggaggggagacagaagggatggttggaagaggcagccccctgctagaggccatctctcccaacatcaactggccctttcatgaccttcctgtgctcatgcctcctctttgtctcggtttcctccccagttgggcccccagccttgctgcctctctacttccagtggtatattttctattttgttatccagcgaaagaagtgggtggacttggcctggatgattaccttctacgtccgcttcttcctcacttatgtgccactattggggctgaaagccttcctgggccttttcttcatagtcaggttcctggaaagcaactggtttgtgtgggtgacacagatgaaccatattcccatgcacattgatcatgaccggaacatggactgggtttccacccagctccaggccacatgcaatgtccacaagtctgccttcaatgactggttcagtggacacctcaacttccagattgagcaccatctttttcccacgatgcctcgacacaattaccacaaagtggctcccctggtgcagtccttgtgtgccaagcatggcatagagtaccagtccaagcccctgctgtcagccttcgccgacatcatccactcactaaaggagtcagggcagctctggctagatgcctatcttcaccaataacaacagccaccctgcccagtctggaagaagaggaggaagactctggagccaaggcagaggggagcttgagggacaatgccactatagtttaatactcagagggggttgggtttggggacataaagcctctgactcaaactcctcccttttatcttctagccacagttctaagacccaaagtggggggtggacacagaagtccctaggagggaaggagctgttggggcaggggtgtaaattatttcctttttctagtttggcacatgcaggtagttggtgaacagagagaaccaggagggtaacagaagaggagggacctactgaacccagagtcaggaagagatttaacactaaaattccactcatgccgggcgtggtggcacgcgcctgtaatcccagctacc

SEQ ID NO: 133330 - DNA, 581 bp, Homo sapiens
  Payload ID: 6063
  Gene Symbol: FADS1
  Gene Name: fatty acid desaturase 1
  ENST ID: ENST00000544309
  CDS Start-End: 255-581
tcctgcggccaccccgcagccctggcccctcagtccattcactcctgcagcgcggccccgcacccagggcctgcactagaaccgctgttcctaccgcggcgccccctgggagccaacgccgcgatgcccgcctgacgtcaggaagtcgaatccggcggcgacgcctttagggagcccgcgagggggcgcgtgttggcagcccagctgatccctttgtggccttccacatcaacaagggccttgtgaagaagtatatgaactctctcctgattggagaactgtctccagagcagcccagctttgagcccaccaagaataaagagctgacagatgagttccgggagctgcgggccacagtggagcggatggggctcatgaaggccaaccatgtcttcttcctgctgtacctgctgcacatcttgctgctggatggtgcagcctggctcaccctttgggtctttgggacgtcctttttgcccttcctcctctgtgcggtgctgctcagtgcagttcaggcccaggctggctggctgcagcatgactttgggcacctgtcggtcttcagcacctcaaagtggaac

SEQ ID NO: 133331 - DNA, 582 bp, Homo sapiens
  Payload ID: 6063
  Gene Symbol: FADS1
  Gene Name: fatty acid desaturase 1
  ENST ID: ENST00000545405
  CDS Start-End: 124-582
acttacagggcccggggctgccggacctgccaacgtgaatcttatcgccatggaccttaccttgcacaacccaaagatccctttgtggccttccacatcaacaagggccttgtgaagaagtatatgaactctctcctgattggagaactgtctccagagcagcccagctttgagcccaccaagaataaagagctgacagatgagttccgggagctgcgggccacagtggagcggatggggctcatgaaggccaaccatgtcttcttcctgctgtacctgctgcacatcttgctgctggatggtgcagcctggctcaccctttgggtctttgggacgtcctttttgcccttcctcctctgtgcggtgctgctcagtgcagttcaggcccaggctggctggctgcagcatgactttgggcacctgtcggtcttcagcacctcaaagtggaaccatctgctacatcattttgtgattggccacctgaagggggcccccgccagttggtggaaccacatgcacttccagcaccatgccaagcccaactgcttccgcaaagacccagacatcaacatgcatcccttc

SEQ ID NO: 133332 - DNA, 1725 bp, Homo sapiens
  Payload ID: 6063
  Gene Symbol: FADS1
  Gene Name: fatty acid desaturase 1
  Uniprot ID: O60427
  ENST ID: ENST00000542506
  CDS Start-End: 545-1627
gcagacgaaacaggcaccaacgctggagcttcccgcagtgtgatttggggccgggaatgccgcggcggggacggcgattggtccgtatgtgtggtgccaccggccgccggctccgccccggcccccgccccacacgccgcatcacttacagggcccggggctgccggacctgccaacgtgaatcttatcgccatggaccttaccttgcacaacccaaagtagctgccttggggcagggggtggccagagtgcttagggaaatgtggagccctacccagaacaacggtggagggaaagggaagaaacgcagaagtgccccagttcggacgtagggaagtcttcctcttcgtggtttttggagaaccctagctaagagaggaaagggacttattgaaagacccgcaagaagggacggaagtctcatagccctgagaggtgaagccagctggagttgatgggtcgaatggggacctagagaacttttctgtatctagaggatccctttgtggccttccacatcaacaagggccttgtgaagaagtatatgaactctctcctgattggagaactgtctccagagcagcccagctttgagcccaccaagaataaagagctgacagatgagttccgggagctgcgggccacagtggagcggatggggctcatgaaggccaaccatgtcttcttcctgctgtacctgctgcacatcttgctgctggatggtgcagcctggctcaccctttgggtctttgggacgtcctttttgcccttcctcctctgtgcggtgctgctcagtgcagttcaggcccaggctggctggctgcagcatgactttgggcacctgtcggtcttcagcacctcaaagtggaaccatctgctacatcattttgtgattggccacctgaagggggcccccgccagttggtggaaccacatgcacttccagcaccatgccaagcccaactgcttccgcaaagacccagacatcaacatgcatcccttcttctttgccttggggaagatcctctctgtggagcttgggaaacagaagaaaaaatatatgccgtacaaccaccagcacaaatacttcttcctaattgggcccccagccttgctgcctctctacttccagtggtatattttctattttgttatccagcgaaagaagtgggtggacttggcctggatgattaccttctacgtccgcttcttcctcacttatgtgccactattggggctgaaagccttcctgggccttttcttcatagtcaggttcctggaaagcaactggtttgtgtgggtgacacagatgaaccatattcccatgcacattgatcatgaccggaacatggactgggtttccacccagctccaggccacatgcaatgtccacaagtctgccttcaatgactggttcagtggacacctcaacttccagattgagcaccatctttttcccacgatgcctcgacacaattaccacaaagtggctcccctggtgcagtccttgtgtgccaagcatggcatagagtaccagtccaagcccctgctgtcagccttcgccgacatcatccactcactaaaggagtcagggcagctctggctagatgcctatcttcaccaataacaacagccaccctgcccagtctggaagaagaggaggaagactctggagccaaggcagaggggagcttgagggacaatgccactatagtttaatactca

SEQ ID NO: 133333 - DNA, 742 bp, Homo sapiens
  Payload ID: 6063
  Gene Symbol: FADS1
  Gene Name: fatty acid desaturase 1
  ENST ID: ENST00000540767
  CDS Start-End: 248-742
attcggaggaaagcccggaggcgcctgatcatacctgttgcccggtgattgggtgtcctgcggatgcgggatgaaaaggcgggagagaggcctggagaagtggagtctggggagtggggatggaggccaacaacacgcacacacaaacaaagggtcccgcctccctgccgtgcattccatctgcagccccgagcctcaggatccctttgtggccttccacatcaacaagggccttgtgaagaagtatatgaactctctcctgattggagaactgtctccagagcagcccagctttgagcccaccaagaataaagagctgacagatgagttccgggagctgcgggccacagtggagcggatggggctcatgaaggccaaccatgtcttcttcctgctgtacctgctgcacatcttgctgctggatggtgcagcctggctcaccctttgggtctttgggacgtcctttttgcccttcctcctctgtgcggtgctgctcagtgcagttcaggcccaggctggctggctgcagcatgactttgggcacctgtcggtcttcagcacctcaaagtggaaccatctgctacatcattttgtgattggccacctgaagggggcccccgccagttggtggaaccacatgcacttccagcaccatgccaagcccaactgcttccgcaaagacccagacatcaacatgcatcccttcttctttgccttggggaagatcctctctgtggaggtg

SEQ ID NO: 133334 - DNA, 709 bp, Homo sapiens
  Payload ID: 6063
  Gene Symbol: FADS1
  Gene Name: fatty acid desaturase 1
  ENST ID: ENST00000545245
  CDS Start-End: 218-709
gctgccggacctgccaacgtgaatcttatcgccatggaccttaccttgcacaacccaaagtagctgccttggggcagggggtggccagagtgcttagggaaatgtggagccctacccagaacaacggtggagggaaagggaagaaacgcagaagtgccccagttcggacgatccctttgtggccttccacatcaacaagggccttgtgaagaagtatatgaactctctcctgattggagaactgtctccagagcagcccagctttgagcccaccaagaataaagagctgacagatgagttccgggagctgcgggccacagtggagcggatggggctcatgaaggccaaccatgtcttcttcctgctgtacctgctgcacatcttgctgctggatggtgcagcctggctcaccctttgggtctttgggacgtcctttttgcccttcctcctctgtgcggtgctgctcagtgcagttcaggcccaggctggctggctgcagcatgactttgggcacctgtcggtcttcagcacctcaaagtggaaccatctgctacatcattttgtgattggccacctgaagggggcccccgccagttggtggaaccacatgcacttccagcaccatgccaagcccaactgcttccgcaaagacccagacatcaacatgcatcccttcttctttgccttggggaagatcctctctgtggag

SEQ ID NO: 133335 - DNA, 567 bp, Homo sapiens
  Payload ID: 6063
  Gene Symbol: FADS1
  Gene Name: fatty acid desaturase 1
  ENST ID: ENST00000544696
  CDS Start-End: 231-567
ctaggtgccggtctccactcgccagcaggagcggagagggagcaggaaaggagcccattctcgaggatggggctgaaacgggaagcttggggagaccgctgccttggggacccctgcgtcgtgtgaagactggaggacgcggaagggacagcgctggccggggagggcaagcggccgctggcgatccctttgtggccttccacatcaacaagggccttgtgaagaagtatatgaactctctcctgattggagaactgtctccagagcagcccagctttgagcccaccaagaataaagagctgacagatgagttccgggagctgcgggccacagtggagcggatggggctcatgaaggccaaccatgtcttcttcctgctgtacctgctgcacatcttgctgctggatggtgcagcctggctcaccctttgggtctttgggacgtcctttttgcccttcctcctctgtgcggtgctgctcagtgcagttcaggcccaggctggctggctgcagcatgactttgggcacctgtcggtcttcagcacctcaaagtggaaccatctgctac

SEQ ID NO: 133336 - DNA, 405 bp, Homo sapiens
  Payload ID: 6063
  Gene Symbol: FADS1
  Gene Name: fatty acid desaturase 1
  ENST ID: ENST00000539999
  CDS Start-End: 34-405
ctgtagggggcccccgccagttggtggaaccacatgcacttccagcaccatgccaagcccaactgcttccgcaaagacccagacatcaacatgcatcccttcttctttgccttggggaagatcctctctgtggagcttgggaaacagaagaaaaaatatatgccgtacaaccaccagcacaaatacttcttcctaattgggcccccagccttgctgcctctctacttccagtggtatattttctattttgttatccagcgaaagaagtgggtggacttggcctggatgattaccttctacgtccgcttcttcctcacttatgtgccactattggggctgaaagccttcctgggccttttcttcatagtcaggttcctggaaagcaactggtttgtgtgggtgaca

SEQ ID NO: 133337 - DNA, 1559 bp, Homo sapiens
  Payload ID: 6063
  Gene Symbol: FADS1
  Gene Name: fatty acid desaturase 1
  ENST ID: ENST00000460649
  CDS Start-End: 926-1366
gtatccatggcccaagaagcccacatccttgtctccagcacccagagtgggggataggggttccccaggggaaacttgagactgactctaggcctaatttagaacaaaataatagaaccagacacagatcctccttatctctaagtgggacgaaatgatttgagcttagcaggcagcctgattcccaatgtgtaatttcatgcggtcagtgtctccagaggttcttgtactgggcataatgccagggggctgagttgggaatggggaagatgaatgagagacaatacctactttcaaggaaacttctgatgaagcagaatgtggttattaatcagaaaagaggtacaggcaataggttctggggactccaaaaggggcctgactgcacctggctttgtgaagtcacttttctagctggccttgaggctgggcagggtttctgacaggcagaggtggagcaggggggatgaactctgagcagagaagctggaaatgaggggtaagtttgaccaccagacatattgtggaggactagtgtcaggggaagagtatggtgcttggttcagtgatgagagatttgatcagggcactggcatggactgagccatggtcctggcagattcatttggcggcatgctgaaggatttagattggctaggaagagctagaggcaaagagaccttgtaggccttggtacttttgaaggggacatgcaagaagggctggggggtgccaatgggaatggaagaaaggagcagtggcactagatactgcaggattggacccctgagaagctgaagatgagtgagtctggataaccaggagaatggctgcaccatgcaaacaaagagctgctgagaggaagaggaagagttgttcgtgactgttatgctcgctgcttttctcactataggacttggcctggatgattaccttctacgtccgcttcttcctcacttatgtgccactattggggctgaaagccttcctgggccttttcttcatagtcaggttcctggaaagcaactggtttgtgtgggtgacacagatgaaccatattcccatgcacattgatcatgaccggaacatggactgggtttccacccagctccaggccacatgcaatgtccacaagtctgccttcaatgactggttcagtggacacctcaacttccagattgagcaccatctttttcccacgatgcctcgacacaattaccacaaagtggctcccctggtgcagtccttgtgtgccaagcatggcatagagtaccagtccaagcccctgctgtcagccttcgccgacatcatccactcactaaaggagtcagggcagctctggctagatgcctatcttcaccaataacaacagccaccctgcccagtctggaagaagaggaggaagactctggagccaaggcagaggggagcttgagggacaatgccactatagtttaatactcagagggggttgggtttggggacataaagcctctgactcaaactcctcccttttatcttctagccacagttctaagacccaaagtggggggtggaca

SEQ ID NO: 133338 - DNA, 574 bp, Homo sapiens
  Payload ID: 6063
  Gene Symbol: FADS1
  Gene Name: fatty acid desaturase 1
  ENST ID: ENST00000473263
  CDS Start-End: 526-574
gtctcgatggctaggagaggcagcgcagccgcgtctggacctaggtgccggtctccactcgccagcaggagcggagagggagcaggaaaggagcccattctcgaggatggggctgaaacgggaagcttggggagaccgctgccttggggacccctgcgtcgtgtgaagactggaggacgcggaagggacagcgctggccggggagggcaagcggccgctggcgtacataagggattgggaatggcatacacttagcgaggacccccagagctgttctcgaatcgccggggaggccactgagccgcaggccagcgaggtcttcagctattccgcggagcggaccgctgtttacgctctggggcgctagctaaagagcacggattggtgcattttacaaacctctagctacagaaaagttctccaagtctgcactcgacccaggaagtccatctggcttcacctctcacttcaacttgggatccctttgtggccttccacatcaacaagggccttgtgaagaagtatatgaactctctcctgattggagaactgtctccagagcagcccagctttg

SEQ ID NO: 133339 - DNA, 640 bp, Homo sapiens
  Payload ID: 6063
  Gene Symbol: FADS1
  Gene Name: fatty acid desaturase 1
  ENST ID: ENST00000466716
  CDS Start-End: 309-640
aattcggaggaaagcccggaggcgcctgatcatacctgttgcccgctagctaaagagcacggattggtgcattttacaaacctctagctacagaaaagttctccaagtctgcactcgacccaggaagtccatctggcttcacctctcacttcaacttgggtacagccttctggcgggcaggaggatggcctttggtgcgaacactgccggagtccagggggctggctccctcacctttcatcttctcccggcacttgcaggatccctttgtggccttccacatcaacaagggccttgtgaagaagtatatgaactctctcctgattggagaactgtctccagagcagcccagctttgagcccaccaagaataaagagctgacagatgagttccgggagctgcgggccacagtggagcggatggggctcatgaaggccaaccatgtcttcttcctgctgtacctgctgcacatcttgctgctggatggtgcagcctggctcaccctttgggtctttgggacgtcctttttgcccttcctcctctgtgcggtgctgctcagtgcagttcaggcccaggctggctggctgcagcatgactttgggcacctgtcggtcttcagcacctcaaagtggaaccatct

SEQ ID NO: 133340 - DNA, 2964 bp, Homo sapiens
  Payload ID: 6064
  Gene Symbol: FADS2
  Gene Name: fatty acid desaturase 2
  Uniprot ID: O95864
  ENST ID: ENST00000257261
  CDS Start-End: 31-1299
agagacctgaggctcggggctgcagatggaatgcacggcagggaggcgggaccctttgtttgtgtgtgcgtgttgttggcctccatccccactccccagactccacttctccaggcctctctcccgccttttcatcccgcatccgcaggacacccaatcaccgggcaacaggatgccttccgcgccttccaccctgacctggaattcgtgggcaagttcttgaaacccctgctgattggtgaactggccccggaggagcccagccaggaccacggcaagaactcaaagatcactgaggacttccgggccctgaggaagacggctgaggacatgaacctgttcaagaccaaccacgtgttcttcctcctcctcctggcccacatcatcgccctggagagcattgcatggttcactgtcttttactttggcaatggctggattcctaccctcatcacggcctttgtccttgctacctctcaggcccaagctggatggctgcaacatgattatggccacctgtctgtctacagaaaacccaagtggaaccaccttgtccacaaattcgtcattggccacttaaagggtgcctctgccaactggtggaatcatcgccacttccagcaccacgccaagcctaacatcttccacaaggatcccgatgtgaacatgctgcacgtgtttgttctgggcgaatggcagcccatcgagtacggcaagaagaagctgaaatacctgccctacaatcaccagcacgaatacttcttcctgattgggccgccgctgctcatccccatgtatttccagtaccagatcatcatgaccatgatcgtccataagaactgggtggacctggcctgggccgtcagctactacatccggttcttcatcacctacatccctttctacggcatcctgggagccctccttttcctcaacttcatcaggttcctggagagccactggtttgtgtgggtcacacagatgaatcacatcgtcatggagattgaccaggaggcctaccgtgactggttcagtagccagctgacagccacctgcaacgtggagcagtccttcttcaacgactggttcagtggacaccttaacttccagattgagcaccacctcttccccaccatgccccggcacaacttacacaagatcgccccgctggtgaagtctctatgtgccaagcatggcattgaataccaggagaagccgctactgagggccctgctggacatcatcaggtccctgaagaagtctgggaagctgtggctggacgcctaccttcacaaatgaagccacagcccccgggacaccgtggggaaggggtgcaggtggggtgatggccagaggaatgatgggcttttgttctgaggggtgtccgagaggctggtgtatgcactgctcacggaccccatgttggatctttctccctttctcctctcctttttctcttcacatctcccccatagcaccctgccctcatgggacctgccctccctcagccgtcagccatcagccatggccctcccagtgcctcctagccccttcttccaaggagcagagaggtggccaccgggggtggctctgtcctacctccactctctgcccctaaagatgggaggagaccagcggtccatgggtctggcctgtgagtctccccttgcagcctggtcactaggcatcacccccgctttggttcttcagatgctcttggggttcataggggcaggtcctagtcgggcagggcccctgaccctcccggcctggcttcactctccctgacggctgccattggtccaccctttcatagagaggcctgctttgttacaaagctcgggtctccctcctgcagctcggttaagtacccgaggcctctcttaagatgtccagggccccaggcccgcgggcacagccagcccaaaccttgggccctggaagagtcctccaccccatcactagagtgctctgaccctgggctttcacgggccccattccaccgcctccccaacttgagcctgtgaccttgggaccaaagggggagtccctcgtctcttgtgactcagcagaggcagtggccacgttcagggaggggccggctggcctggaggctcagcccaccctccagcttttcctcagggtgtcctgaggtccaagattctggagcaatctgacccttctccaaaggctctgttatcagctgggcagtgccagccaatccctggccatttggccccaggggacgtgggccctgcaggctgcaggagggcactggagctgggaggtctcgtcccagccctccccatctcggggctgctgtgtggacggcgctgcctcaggcactctcctgtctgaacctgcccttactgtgtttaacctgttgctccaggatgcattctgataggagggggcggcagggctgggccttgtgacaatctgcctttcaccacatggccttgcctcggtggccctgactgtcagggagggccagggaggcagagcgggagggagtctcaggaggaggctgccctgaggggctggggagggggtacctcatgaggaccagggtggagctgagaagaggaggaggtgggggctggaggtgctggtagctgaggggacgggcaagtgagaggggagggagggaagtcctgggaggatcctgagctgctgttgcagtctaacccactaatcagttcttagattcaggggaagggcaggcaccaacaactcagaatgggggctttcggggagggcgcctagtccccccagctctaagcagccaggagggacctgcatctaagcatctgggttgccatggcaatggcatgccccccagctactgtatgcccccgacccccgcagaggcagaatgaacccatagggagctgatcgtaatgtttatcatgttacttccccacccctacattttttgaaataaaataaggaattttattctca

SEQ ID NO: 133341 - DNA, 3630 bp, Homo sapiens
  Payload ID: 6064
  Gene Symbol: FADS2
  Gene Name: fatty acid desaturase 2
  Uniprot ID: O95864
  ENST ID: ENST00000278840
  CDS Start-End: 631-1965
attcgttgcccccaccgggatctcctctaggatctcctccggcgcccggggccggagagtgggggagggaggaggtcggacacgtagcctgcctcgcagcagggctcgactccacgcgggagggcgggggagccggggacccgccgctccagcccgctggccttcgaaagatcctcctgggccaatggcaggcggggcgacgcgaccggattggtgcaggcgctctgctgatcgctgtggaaactcgggcggcggggaacgcgggaggatgtggaacccgaggcggggggagccggaggggcgggcagaggaggtgtcgaggccctgagctcccggggagtttttactggaggcaaaagtccatagcgggagggctgagggaggggcggaggaaggggaccgcttgggggcactgggaagccagggatcctccgccaggaaggcagggacactcccgagcgcaggcgagaaggctgggggagggggcgcggtgggaggagtaggagaagacaaaagccgaaagcgaagagggcccgggctgcacacaccggctgggaggcagccgtctgtgcagcgagcagccggcgcggggaggccgcagtgcacggggcgtcacagtcggcaggcagcatggggaagggagggaaccagggcgagggggccgccgagcgcgaggtgtcggtgcccaccttcagctgggaggagattcagaagcataacctgcgcaccgacaggtggctggtcattgaccgcaaggtttacaacatcaccaaatggtccatccagcacccggggggccagcgggtcatcgggcactacgctggagaagatgcaacggatgccttccgcgccttccaccctgacctggaattcgtgggcaagttcttgaaacccctgctgattggtgaactggccccggaggagcccagccaggaccacggcaagaactcaaagatcactgaggacttccgggccctgaggaagacggctgaggacatgaacctgttcaagaccaaccacgtgttcttcctcctcctcctggcccacatcatcgccctggagagcattgcatggttcactgtcttttactttggcaatggctggattcctaccctcatcacggcctttgtccttgctacctctcaggcccaagctggatggctgcaacatgattatggccacctgtctgtctacagaaaacccaagtggaaccaccttgtccacaaattcgtcattggccacttaaagggtgcctctgccaactggtggaatcatcgccacttccagcaccacgccaagcctaacatcttccacaaggatcccgatgtgaacatgctgcacgtgtttgttctgggcgaatggcagcccatcgagtacggcaagaagaagctgaaatacctgccctacaatcaccagcacgaatacttcttcctgattgggccgccgctgctcatccccatgtatttccagtaccagatcatcatgaccatgatcgtccataagaactgggtggacctggcctgggccgtcagctactacatccggttcttcatcacctacatccctttctacggcatcctgggagccctccttttcctcaacttcatcaggttcctggagagccactggtttgtgtgggtcacacagatgaatcacatcgtcatggagattgaccaggaggcctaccgtgactggttcagtagccagctgacagccacctgcaacgtggagcagtccttcttcaacgactggttcagtggacaccttaacttccagattgagcaccacctcttccccaccatgccccggcacaacttacacaagatcgccccgctggtgaagtctctatgtgccaagcatggcattgaataccaggagaagccgctactgagggccctgctggacatcatcaggtccctgaagaagtctgggaagctgtggctggacgcctaccttcacaaatgaagccacagcccccgggacaccgtggggaaggggtgcaggtggggtgatggccagaggaatgatgggcttttgttctgaggggtgtccgagaggctggtgtatgcactgctcacggaccccatgttggatctttctccctttctcctctcctttttctcttcacatctcccccatagcaccctgccctcatgggacctgccctccctcagccgtcagccatcagccatggccctcccagtgcctcctagccccttcttccaaggagcagagaggtggccaccgggggtggctctgtcctacctccactctctgcccctaaagatgggaggagaccagcggtccatgggtctggcctgtgagtctccccttgcagcctggtcactaggcatcacccccgctttggttcttcagatgctcttggggttcataggggcaggtcctagtcgggcagggcccctgaccctcccggcctggcttcactctccctgacggctgccattggtccaccctttcatagagaggcctgctttgttacaaagctcgggtctccctcctgcagctcggttaagtacccgaggcctctcttaagatgtccagggccccaggcccgcgggcacagccagcccaaaccttgggccctggaagagtcctccaccccatcactagagtgctctgaccctgggctttcacgggccccattccaccgcctccccaacttgagcctgtgaccttgggaccaaagggggagtccctcgtctcttgtgactcagcagaggcagtggccacgttcagggaggggccggctggcctggaggctcagcccaccctccagcttttcctcagggtgtcctgaggtccaagattctggagcaatctgacccttctccaaaggctctgttatcagctgggcagtgccagccaatccctggccatttggccccaggggacgtgggccctgcaggctgcaggagggcactggagctgggaggtctcgtcccagccctccccatctcggggctgctgtgtggacggcgctgcctcaggcactctcctgtctgaacctgcccttactgtgtttaacctgttgctccaggatgcattctgataggagggggcggcagggctgggccttgtgacaatctgcctttcaccacatggccttgcctcggtggccctgactgtcagggagggccagggaggcagagcgggagggagtctcaggaggaggctgccctgaggggctggggagggggtacctcatgaggaccagggtggagctgagaagaggaggaggtgggggctggaggtgctggtagctgaggggacgggcaagtgagaggggagggagggaagtcctgggaggatcctgagctgctgttgcagtctaacccactaatcagttcttagattcaggggaagggcaggcaccaacaactcagaatgggggctttcggggagggcgcctagtccccccagctctaagcagccaggagggacctgcatctaagcatctgggttgccatggcaatggcatgccccccagctactgtatgcccccgacccccgcagaggcagaatgaacccatagggagctgatcgtaatgtttatcatgttacttccccacccctacattttttgaaataaaataaggaattttattctca

SEQ ID NO: 133342 - DNA, 360 bp, Homo sapiens
  Payload ID: 6064
  Gene Symbol: FADS2
  Gene Name: fatty acid desaturase 2
  ENST ID: ENST00000522639
  CDS Start-End: 79-246
ggacacccaatcaccgggcaacagtttctcccgtacatcccagtccagccccagcctctggagttatctttctacaccatggatctgatcacagtacacctgctttacggatgtccaagcctcctccatggacctaccctggctggtactgtgctgggagccgctggggaccccaggccctggccggtccacgcttctcagccaccctacacaggccacccatacgtgctcccttttagggcctgaaccttcaaagcctctgtgagatactccctggttctgcctttcagctatcactccctgctccgagctccacaccctttacaaatgttcattaaagttatctatatggtatgttaa

SEQ ID NO: 133343 - DNA, 1689 bp, Homo sapiens
  Payload ID: 6064
  Gene Symbol: FADS2
  Gene Name: fatty acid desaturase 2
  Uniprot ID: O95864
  ENST ID: ENST00000522056
  CDS Start-End: 180-1421
gacacccaatcaccgggcaacaggtatgatcaggcgcctccgggctttcctccgaattagtcggtgtttggctcggagtgcgtaactctgtctcccctgcactcagcctccggtcccgccctctcctgtgcccccgcctggctgcgctcaccgtggcatcctgcccggcgtagtggctgatgacccgggagccccctggatgccggcgggtgaactcgctgatgttgtacaccttacggtcgatcactagccaccgctcctcgcaccctgagcgctgggccacctcgtcccaggatgccttccgcgccttccaccctgacctggaattcgtgggcaagttcttgaaacccctgctgattggtgaactggccccggaggagcccagccaggaccacggcaagaactcaaagatcactgaggacttccgggccctgaggaagacggctgaggacatgaacctgttcaagaccaaccacgtgttcttcctcctcctcctggcccacatcatcgccctggagagcattgcatggttcactgtcttttactttggcaatggctggattcctaccctcatcacggcctttgtccttgctacctctcaggcccaagctggatggctgcaacatgattatggccacctgtctgtctacagaaaacccaagtggaaccaccttgtccacaaattcgtcattggccacttaaagggtgcctctgccaactggtggaatcatcgccacttccagcaccacgccaagcctaacatcttccacaaggatcccgatgtgaacatgctgcacgtgtttgttctgggcgaatggcagcccatcgagtacggcaagaagaagctgaaatacctgccctacaatcaccagcacgaatacttcttcctgattgggccgccgctgctcatccccatgtatttccagtaccagatcatcatgaccatgatcgtccataagaactgggtggacctggcctgggccgtcagctactacatccggttcttcatcacctacatccctttctacggcatcctgggagccctccttttcctcaacttcatcaggttcctggagagccactggtttgtgtgggtcacacagatgaatcacatcgtcatggagattgaccaggaggcctaccgtgactggttcagtagccagctgacagccacctgcaacgtggagcagtccttcttcaacgactggttcagtggacaccttaacttccagattgagcaccacctcttccccaccatgccccggcacaacttacacaagatcgccccgctggtgaagtctctatgtgccaagcatggcattgaataccaggagaagccgctactgagggccctgctggacatcatcaggtccctgaagaagtctgggaagctgtggctggacgcctaccttcacaaatgaagccacagcccccgggacaccgtggggaaggggtgcaggtggggtgatggccagaggaatgatgggcttttgttctgaggggtgtccgagaggctggtgtatgcactgctcacggaccccatgttggatctttctccctttctcctctcctttttctcttcacatctcccccatagcaccctgccctcatgggacctgccctccctcagccgtcagccatcagccatggccctcccagtgcctcctagccccttcttccaaggagcag

SEQ ID NO: 133344 - DNA, 469 bp, Homo sapiens
  Payload ID: 6064
  Gene Symbol: FADS2
  Gene Name: fatty acid desaturase 2
  ENST ID: ENST00000517839
  CDS Start-End: 38-196
tgcgctcaccgtggcatcctgcccggcgtagtggctgatgacccgggagccccctggatgccggcgggtgaactcgctgatgttgtacaccttacggtcgatcactagccaccgctcctcgcaccctgagcgctgggccacctcgtcccagaaaagaaaaaaaaagaccttaatgccgattgtaatgaagccataattgaataacctaactgccagtggctgttggaataacctgaattgacctaccctggctggtactgtgctgggagccgctggggaccccaggccctggccggtccacgcttctcagccaccctacacaggccacccatacgtgctcccttttagggcctgaaccttcaaagcctctgtgagatactccctggttctgcctttcagctatcactccctgctccgagctccacaccctttacaaatgttcattaaagttatctatatggtatgttaa

SEQ ID NO: 133345 - DNA, 510 bp, Homo sapiens
  Payload ID: 6064
  Gene Symbol: FADS2
  Gene Name: fatty acid desaturase 2
  ENST ID: ENST00000518606
  CDS Start-End: 200-510
accgcagccatggcgcccagaccaagaaagcagagcagaggatgccttccgcgccttccaccctgacctggaattcgtgggcaagttcttgaaacccctgctgattggtgaactggccccggaggagcccagccaggaccacggcaagaactcaaagatcactgaggacttccgggccctgaggaagacggctgaggacatgaacctgttcaagaccaaccacgtgttcttcctcctcctcctggcccacatcatcgccctggagagcattgcatggttcactgtcttttactttggcaatggctggattcctaccctcatcacggcctttgtccttgctacctctcaggcccaagctggatggctgcaacatgattatggccacctgtctgtctacagaaaacccaagtggaaccaccttgtccacaaattcgtcattggccacttaaagggtgcctctgccaactggtggaatcatcgccacttccagcaccacgccaagcctaacat

SEQ ID NO: 133346 - DNA, 588 bp, Homo sapiens
  Payload ID: 6064
  Gene Symbol: FADS2
  Gene Name: fatty acid desaturase 2
  ENST ID: ENST00000517312
  CDS Start-End: 309-588
agccagggatcctccgccaggaaggcagggacactcccgagcgcaggtggctggtcattgaccgcaaggtttacaacatcaccaaatggtccatccagcacccggggggccagcgggtcatcgggcactacgctggagaagatgcaacggatgccttccgcgccttccaccctgacctggaattcgtgggcaagttcttgaaacccctgctgattggtgaactggccccggaggagcccagccaggaccacggcaagaactcaaagatcactgaggacttccgggccctgaggaagacggctgaggacatgaacctgttcaagaccaaccacgtgttcttcctcctcctcctggcccacatcatcgccctggagagcattgcatggttcactgtcttttactttggcaatggctggattcctaccctcatcacggcctttgtccttgctacctctcaggcccaagctggatggctgcaacatgattatggccacctgtctgtctacagaaaacccaagtggaaccaccttgtccacaaattcgtcattggccacttaaagggtgcctctgccaactggtggaatcatc

SEQ ID NO: 133347 - DNA, 1703 bp, Homo sapiens
  Payload ID: 6064
  Gene Symbol: FADS2
  Gene Name: fatty acid desaturase 2
  Uniprot ID: O95864
  ENST ID: ENST00000521849
  CDS Start-End: 112-1272
aaagcgaagagggcccgggctgcacacaccggctgggaggcagccgtctgtgcagcgagcagccggcgcggggaggccgcagtgcacggggcgtcacagtcggcaggcagcatggggaagggagggaaccagggcgagggggccgccgagcgcgaggtgtcggtgcccaccttcagctgggaggagattcagaagcataacctgcgcaccgacaggtggctggtcattgaccgcaaggtttacaacatcaccaaatggtccatccagcacccggggggccagcgggtcatcgggcactacgctggagaagatgcaacggatgccttccgcgccttccaccctgacctggaattcgtgggcaagttcttgaaacccctgctgattggtgaactggccccggaggagcccagccaggaccacggcaagaactcaaagatcactgaggacttccgggccctgaggaagacggctgaggacatgaacctgttcaagaccaaccacgtgttcttcctcctcctcctggcccacatcatcgccctggagagcattgcatggttcactgtcttttactttggcaatggctggattcctaccctcatcacggcctttgtccttgctacctctcaggcccaagctggatggctgcaacatgattatggccacctgtctgtctacagaaaacccaagtggaaccaccttgtccacaaattcgtcattggccacttaaagggtgcctctgccaactggtggaatcatcgccacttccagcaccacgccaagcctaacatcttccacaaggatcccgatgtgaacatgctgcacgtgtttgttctgggcgaatggcagcccatcgagtacggcaagaagaagctgaaatacctgccctacaatcaccagcacgaatacttcttcctgattgggccgccgctgctcatccccatgtatttccagtaccagatcatcatgaccatgatcgtccataagaactgggtggacctggcctgggccgtcagctactacatccggttcttcatcacctacatccctttctacggcatcctgggagccctccttttcctcaacttcatcaggttcctggagagccactggtttgtgtgggtcacacagatgaatcacatcgtcatggagattgaccaggaggcctaccgtgactggttcagtagccagctgacagccacctgcaacgtggagcagtccttcttcaacgactggttcagtggacaccttaacttccagattgagcaccagtgagcgcggggctgcggggaggcggggagacccacagcgggagggaagtggccgctatcccactgggcagaatgcagaatgtgggggccacctctttgtctctctgacaaggtctctgcccaatatagagcaaggctcccagccagccccgctgaggtcaggagaggggctcccctattccatctccctgagggtcatcctgtgcccctcatgctgtgccacttggtcatagtggttaccacctccctccatgtgggcctgggactttgtagttatggagcctgcacacgcacctcatgaccctgtgaggctagcagggcagggctacgtagcttgcctggaacatcggccgagggactgccctgctgccccttgtccttgcttcacctcttgtcactgtttttttttttttttattaaaaaataaaaaatgta

SEQ ID NO: 133348 - DNA, 2107 bp, Homo sapiens
  Payload ID: 6064
  Gene Symbol: FADS2
  Gene Name: fatty acid desaturase 2
  ENST ID: ENST00000355484
  CDS Start-End: 1653-2107
ggcattttttgcaaacccttagccaaagcattgatccggcaacagttcaccaggatagtcgtgatgccaaagggtcaggaaagtgtgttttctttcatctgtcgctgggcaactgtcgagggccataactctgagctgaggagacggacacctgtggcctcaaaagaaatatccatgttatgtgtcttgtctcatgggatcctatttgagtgttagaaacaggaaagttcttcttgttcatgttagcagttgtttgttgagccctccctccagccttcctggtgtgacacgaatctcaggacccaccctcagcatagcagcacaactgcgctctccaaatcgtttattgagatacagttctcacttttttttttttttaaacagagtcttgctctgtctcccaggctggagtgcagtggtgtgatctctgcctcccgggttcaagtgattttcctgcctcagcctcccgagtagctgggattacaggcgcccacaaccacgcccggctaatttttgtatttttagtagaggcggggtttcaccatgttgcccaggctggtctcaaactcctgacctcaagtgatccacccgcttctgtctcccaaagtgctggaattacaggtgtgagccaccacgcccagccagttttcccatttaaagtagacaaatcaatgacttttggtatattcacagatttatgcaaccatcatcatagtcgattttagagcatcttcatgatgctcaaaagaaaccccacgtttcttagccatcacatcccaaccccctcactccctcccctaccccaatcctagccctacacaactgctcagctttctgtctctatagatttccctattctgggcgtttcatgtcggtggaatcatgtgatatgtggtcttttgtggctccttccttcccttagcatgttctccaggctcatccgtgttgtagcaagggtcagtgattcgttctgttttacggcacagccaaatgatattccactgtgtggataatctgcatttcattcacccactcatctgttgatgaacatttgtgttgcttttgctcttctggttcttttgaagaatgctgctgtgaacactgctctatgagttggtgtgtggacatgttttcatttctcttggatatacgctcaggagggagatttctgggccacatagtagggaccacttctcactgtccctgaaacctcggctttaccttgcacagctctggttccacacctggtgacggagaggcagagactggctgccacacctgctggagcgctcaccgtgtggtccctcagcagcacgcctcatctgccaccatcgtcttatgatcagggaaactgaagcctagagagataaagtgacttcactccatctggggctggcgcatgctctgagctcagtcatggcagggctggattctggccttgtgggggcctgaagtgctatccccgagggttgaaggttccgggaactgctcctaagaagggcctgttacaagcgagctcggttccctggtggcttgcatggctcatccccacccctctctccccacagggtgcctctgccaactggtggaatcatcgccacttccagcaccacgccaagcctaacatcttccacaaggatcccgatgtgaacatgctgcacgtgtttgttctgggcgaatggcagcccatcgagtacggcaagaagaagctgaaatacctgccctacaatcaccagcacgaatacttcttcctgattgggccgccgctgctcatccccatgtatttccagtaccagatcatcatgaccatgatcgtccataagaactgggtggacctggcctgggccgtcagctactacatccggttcttcatcacctacatccctttctacggcatcctgggagccctccttttcctcaacttcatcaggttcctggagagccactggtttgtgtgggtcacacagatgaatcacatcgtcatggagattgaccaggaggcctaccgtgactggttcagtagccagctgacagccacctgcaacgtggagcagtccttcttcaacgactggttcagtggacaccttaacttccagattgagcacca

SEQ ID NO: 133349 - DNA, 799 bp, Homo sapiens
  Payload ID: 6064
  Gene Symbol: FADS2
  Gene Name: fatty acid desaturase 2
  ENST ID: ENST00000521571
  CDS Start-End: 514-799
ggtggctgactcctttccctgtgctcttggtcaacagtcaaagatcactgaggacttccgggccctgaggaagacggctgaggacatgaacctgttcaagaccaaccacgtgttcttcctcctcctcctggcccacatcatcgccctggagagcattgcatggttcactgtcttttactttggcaatggctggattcctaccctcatcacggcctttgtccttgctacctctcaggtgaggcgtgacaccctcacttcccctagctgacagaggcctggtgcctgtttgctgaggctgtgacagcacgtgtgaccctctctccccaggcccaagctggatggctgcaacatgattatggccacctgtctgtctacagaaaacccaagtggaaccaccttgtccacaaattcgtcattggccacttaaagggtgcctctgccaactggtggaatcatcgccacttccagcaccacgccaagcctaacatcttccacaaggatcccgatgtgaacatgctgcacgtgtttgttctgggcgaatggcagcccatcgagtacggcaagaagaagctgaaatacctgccctacaatcaccagcacgaatacttcttcctgattgggccgccgctgctcatccccatgtatttccagtaccagatcatcatgaccatgatcgtccataagaactgggtggacctggcctgggccgtcagctactacatccggttcttcatcacctacatccctttctacggcatcctgggagccctccttttcctcaacttcatcaggtgcctgg

SEQ ID NO: 133350 - DNA, 385 bp, Homo sapiens
  Payload ID: 6064
  Gene Symbol: FADS2
  Gene Name: fatty acid desaturase 2
  ENST ID: ENST00000574708
  CDS Start-End: 104-271
aaccccgaaccaagctttagccgccgaggccgcgtgtcccaaaggccagtttctcccgtacatcccagtccagccccagcctctggagttatctttctacaccatggatctgatcacagtacacctgctttacggatgtccaagcctcctccatggacctaccctggctggtactgtgctgggagccgctggggaccccaggccctggccggtccacgcttctcagccaccctacacaggccacccatacgtgctcccttttagggcctgaaccttcaaagcctctgtgagatactccctggttctgcctttcagctatcactccctgctccgagctccacaccctttacaaatgttcattaaagttatctatatggtatgttaa

SEQ ID NO: 133351 - DNA, 1779 bp, Homo sapiens
  Payload ID: 6065
  Gene Symbol: FADS3
  Gene Name: fatty acid desaturase 3
  Uniprot ID: Q9Y5Q0
  ENST ID: ENST00000278829
  CDS Start-End: 154-1491
cgcacgctcgctcgtacggcggccgcggcggcagggcggggccggagcagcgggcggcggcggaggcggcgcccgggagcgctcttcgcttccctcggggtcttgctcggacctcggccaccgcctgggatccccaggactcgtgcgtgcagcatgggcggcgtcggggagccgggaccgcgggagggacccgcgcagccgggggcgccgctgcccaccttctgctgggagcagatccgcgcgcacgaccagcccggcgacaagtggctggtcatcgagcgccgcgtctacgacatcagccgctgggcacagcggcacccagggggcagccgcctcatcggccaccacggcgctgaggacgccacggatgccttccgtgccttccatcaagatctcaattttgtgcgcaagttcctacagcccctgttgattggagagctggctccggaagaacccagccaggatggacccctgaatgcgcagctggtcgaggacttccgagccctgcaccaggcagccgaggacatgaagctgtttgatgccagtcccaccttctttgctttcctactgggccacatcctggccatggaggtgctggcctggctccttatctacctcctgggtcctggctgggtgcccagtgccctggccgccttcatcctggccatctctcaggctcagtcctggtgtctgcagcatgacctgggccatgcctccatcttcaagaagtcctggtggaaccacgtggcccagaagttcgtgatggggcagctaaagggcttctccgcccactggtggaacttccgccacttccagcaccacgccaagcccaacatcttccacaaagacccagacgtgacggtggcgcccgtcttcctcctgggggagtcatccgtcgagtatggcaagaagaaacgcagatacctaccctacaaccagcagcacctgtacttcttcctgatcggcccgccgctgctcaccctggtgaactttgaagtggaaaatctggcgtacatgctggtgtgcatgcagtgggcggatttgctctgggccgccagcttctatgcccgcttcttcttatcctacctccccttctacggcgtccctggggtgctgctcttctttgttgctgtcagggtcctggaaagccactggttcgtgtggatcacacagatgaaccacatccccaaggagatcggccacgagaagcaccgggactgggtcagctctcagctggcagccacctgcaacgtggagccctcacttttcaccaactggttcagcgggcacctcaacttccagatcgagcaccacctcttccccaggatgccgagacacaactacagccgggtggccccgctggtcaagtcgctgtgtgccaagcacggcctcagctacgaagtgaagcccttcctcaccgcgctggtggacatcgtcaggtccctgaagaagtctggtgacatctggctggacgcctacctccatcagtgaaggcaacacccaggcgggcagagaagggctcagggcaccagcaaccaagccagcccccggcgggatcgataccctcacccctccactggccagcctgggggtgccctgcctgccctcctggtactgttgtcttcccctcggccccctcacatgtgtattcagcagccctatggccttggctctgggcctgatgggacaggggtagagggaaggtgagcatagcacattttcctagagcgagaattgggggaaagctgttatttttatattaaaatacattcagatgta

SEQ ID NO: 133352 - DNA, 1640 bp, Homo sapiens
  Payload ID: 6065
  Gene Symbol: FADS3
  Gene Name: fatty acid desaturase 3
  ENST ID: ENST00000527697
  CDS Start-End: 353-1345
gccccgcagagattggggcccatggtttgaaggctgttcacaggcaccccgagacagcgtcccccctctgggcgcactggatttgacgttgcaggacgcgcggctggaagccccccaggccccgctgctcacagaccgggactccgcctccggttcccgagggcgtggcgaggcgctgcgggacgcccaacaggatgccttccgtgccttccatcaagatctcaattttgtgcgcaagttcctacagcccctgttgattggagagctggctccggaagaacccagccaggatggacccctgaatgcgcagctggtcgaggacttccgagccctgcaccaggcagccgaggacatgaagctgtttgatgccagtcccaccttctttgctttcctactgggccacatcctggccatggaggtgctggcctggctccttatctacctcctgggtcctggctgggtgcccagtgccctggccgccttcatcctggccatctctcaggctcagtcctggtgtctgcagcatgacctgggccatgcctccatcttcaagaagtcctggtggaaccacgtggcccagaagttcgtgatggggcagctaaagggcttctccgcccactggtggaacttccgccacttccagcaccacgccaagcccaacatcttccacaaagacccagacgtgacggtggcgcccgtcttcctcctgggggagtcatccgtcgagtatggcaagaagaaacgcagatacctaccctacaaccagcagcacctgtacttcttcctgatcggcccgccgctgctcaccctggtgaactttgaagtggaaaatctggcgtacatgctggtgtgcatgcagtgggcggatttgctctgggccgccagcttctatgcccgcttcttcttatcctacctccccttctacggcgtccctggggtgctgctcttctttgttgctgtcagggtcctggaaagccactggttcgtgtggatcacacagatgaaccacatccccaaggagatcggccacgagaagcaccgggactgggtcagctctcagctggcagccacctgcaacgtggagccctcacttttcaccaactggttcagcgggcacctcaacttccagatcgagcaccagtgccagcatacgctccccacccccagcctcttccccaggatgccgagacacaactacagccgggtggccccgctggtcaagtcgctgtgtgccaagcacggcctcagctacgaagtgaagcccttcctcaccgcgctggtggacatcgtcaggtccctgaagaagtctggtgacatctggctggacgcctacctccatcagtgaaggcaacacccaggcgggcagagaagggctcagggcaccagcaaccaagccagcccccggcgggatcgataccctcacccctccactggccagcctgggggtgccctgcctgccctcctggtactgttgtcttcccctcggccccctcacatgtgtattcagcagccctatggccttggctctgggcctgatgggacaggggtagagggaaggtgagcatagcacattttcctagagcgagaattgggggaaagctgttatttttatattaaaatacattcagatgtattatgga

SEQ ID NO: 133353 - DNA, 403 bp, Homo sapiens
  Payload ID: 6065
  Gene Symbol: FADS3
  Gene Name: fatty acid desaturase 3
  ENST ID: ENST00000525094
  CDS Start-End: 1-349
tgtcagggtcctggaaagccactggttcgtgtggatcacacagatgaaccacatccccaaggagatcggccacgagaagcaccgggactggctggcagccacctgcaacgtggagccctcacttttcaccaactggttcagcgggcacctcaacttccagatcgagcaccacctcttccccaggatgccgagacacaactacagccgggtggccccgctggtcaagtcgctgtgtgccaagcacggcctcagctacgaagtgaagcccttcctcaccgcgctggtggacatcgtcaggtccctgaagaagtctggtgacatctggctggacgcctacctccatcagtgaaggcaacacccaggcgggcagagaagggctcagggcaccagcaaccaagccagc

SEQ ID NO: 133354 - DNA, 1254 bp, Homo sapiens
  Payload ID: 6065
  Gene Symbol: FADS3
  Gene Name: fatty acid desaturase 3
  ENST ID: ENST00000525588
  CDS Start-End: 1-1254
atgggcggcgtcggggagccgggaccgcgggagggacccgcgcagccgggggcgccgctgcccaccttctgctgggagcagatccgcgcgcacgaccagcccggcgacaagtggctggtcatcgagcgccgcgtctacgacatcagccgctgggcacagcggcacccagggggcagccgcctcatcggccaccacggcgctgaggacgccacggatgccttccgtgccttccatcaagatctcaattttgtgcgcaagttcctacagcccctgttgattggagagctggctccggaagaacccagccaggatggacccctgaatgcgcagctggtcgaggacttccgagccctgcaccaggcagccgaggacatgaagctgtttgatgccagtcccaccttctttgctttcctactgggccacatcctggccatggaggctcagtcctggtgtctgcagcatgacctgggccatgcctccatcttcaagaagtcctggtggaaccacgtggcccagaagttcgtgatggggcagctaaagggcttctccgcccactggtggaacttccgccacttccagcaccacgccaagcccaacatcttccacaaagacccagacgtgacggtggcgcccgtcttcctcctgggggagtcatccgtcgagtatggcaagaagaaacgcagatacctaccctacaaccagcagcacctgtacttcttcctgatcggcccgccgctgctcaccctggtgaactttgaagtggaaaatctggcgtacatgctggtgtgcatgcagtgggcggatttgctctgggccgccagcttctatgcccgcttcttcttatcctacctccccttctacggcgtccctggggtgctgctcttctttgttgctgtcagggtcctggaaagccactggttcgtgtggatcacacagatgaaccacatccccaaggagatcggccacgagaagcaccgggactgggtcagctctcagctggcagccacctgcaacgtggagccctcacttttcaccaactggttcagcgggcacctcaacttccagatcgagcaccacctcttccccaggatgccgagacacaactacagccgggtggccccgctggtcaagtcgctgtgtgccaagcacggcctcagctacgaagtgaagcccttcctcaccgcgctggtggacatcgtcaggtccctgaagaagtctggtgacatctggctggacgcctacctccatcagtga

SEQ ID NO: 133355 - DNA, 800 bp, Homo sapiens
  Payload ID: 6065
  Gene Symbol: FADS3
  Gene Name: fatty acid desaturase 3
  ENST ID: ENST00000534223
  CDS Start-End: 236-800
tgcccctgggcatccctcccggtctcttcctgcgggtttctgatgaaacagccaggctccagtagtggagccagaggatgccttccgtgccttccatcaagatctcaattttgtgcgcaagttcctacagcccctgttgattggagagctggctccggaagaacccagccaggatggacccctgaatgcgcagctggtcgaggacttccgagccctgcaccaggcagccgaggacatgaagctgtttgatgccagtcccaccttctttgctttcctactgggccacatcctggccatggaggtgctggcctggctccttatctacctcctgggtcctggctgggtgcccagtgccctggccgccttcatcctggccatctctcaggctcagtcctggtgtctgcagcatgacctgggccatgcctccatcttcaagaagtcctggtggaaccacgtggcccagaagttcgtgatggggcagctaaagggcttctccgcccactggtggaacttccgccacttccagcaccacgccaagcccaacatcttccacaaagacccagacgtgacggtggcgcccgtcttcctcctgggggagtcatccgtcgagtatggcaagaagaaacgcagatacctaccctacaaccagcagcacctgtacttcttcctgatcggcccgccgctgctcaccctggtgaactttgaagtggaaaatctggcgtacatgctggtgtgcatgcagtgggcggatttgctctgggccgccagcttctatgcccgcttcttcttatcctacctcc

SEQ ID NO: 133356 - DNA, 768 bp, Homo sapiens
  Payload ID: 6065
  Gene Symbol: FADS3
  Gene Name: fatty acid desaturase 3
  ENST ID: ENST00000527379
  CDS Start-End: 1-689
ccaacatcttccacaaagacccagacgtgacggtggcgcccgtcttcctcctgggggagtcatccgtcgagtatggcaagaagaaacgcagatacctaccctacaaccagcagcacctgtacttcttcctgatcggcccgccgctgctcaccctggtgaactttgaagtggaaaatctggcgtacatgctggtgtgcatgcagtgggcggatttgctctgggccgccagcttctatgcccgcttcttcttatcctacctccccttctacggcgtccctggggtgctgctcttctttgttgctgtcagggtcctggaaagccactggttcgtgtggatcacacagatgaaccacatccccaaggagatcggccacgagaagcaccgggactgggtcagctctcagctggcagccacctgcaacgtggagccctcacttttcaccaactggttcagcgggcacctcaacttccagatcgagcaccagtgccagcatacgctccccacccccagcctcttccccaggatgccgagacacaactacagccgggtggccccgctggtcaagtcgctgtgtgccaagcacggcctcagctacgaagtgaagcccttcctcaccgcgctggtggacatcgtcaggtccctgaagaagtctggtgacatctggctggacgcctacctccatcagtgaaggcaacacccaggcgggcagagaagggctcagggcaccagcaaccaagccagcccccggcgggatcgataccctcacc

SEQ ID NO: 133357 - DNA, 841 bp, Homo sapiens
  Payload ID: 6065
  Gene Symbol: FADS3
  Gene Name: fatty acid desaturase 3
  ENST ID: ENST00000531956
  CDS Start-End: 243-841
aatcaaagtcttcccgggaggtctttctgtaaatccagagctgcagatgtttgaccgtgttcagagaggggcccttgtgctgggatgccttccgtgccttccatcaagatctcaattttgtgcgcaagttcctacagcccctgttgattggagagctggctccggaagaacccagccaggatggacccctgaatgcgcagctggtcgaggacttccgagccctgcaccaggcagccgaggacatgaagctgtttgatgccagtcccaccttctttgctttcctactgggccacatcctggccatggaggtgctggcctggctccttatctacctcctgggtcctggctgggtgcccagtgccctggccgccttcatcctggccatctctcaggctcagtcctggtgtctgcagcatgacctgggccatgcctccatcttcaagaagtcctggtggaaccacgtggcccagaagttcgtgatggggcagctaaagggcttctccgcccactggtggaacttccgccacttccagcaccacgccaagcccaacatcttccacaaagacccagacgtgacggtggcgcccgtcttcctcctgggggagtcatccgtcgagtatggcaagaagaaacgcagatacctaccctacaaccagcagcacctgtacttcttcctgatcggcccgccgctgctcaccctggtgaactttgaagtggaaaatctggcgtacatgctggtgtgcatgcagtgggcggatttgctctgggccgccagcttctatgcccgcttcttcttatcctacctccccttctacggcgtccctggggtgctgctcttctt

SEQ ID NO: 133358 - DNA, 905 bp, Homo sapiens
  Payload ID: 6066
  Gene Symbol: FADS6
  Gene Name: fatty acid desaturase 6
  ENST ID: ENST00000579663
  CDS Start-End: 1-660
acagccttcactgcagagcacgccacgcatgggcacgtcaagatgcaccatgcctacaccaacgtggtgggcctgggggactccagcacgtggaggctgccttgcctcaaccgctatgtctacatgttccttgctcctttcctcctccccatcgccactccactggtggctgtcgagcggctgaggaaggtggagctcgggacagccctgcggacgctggccctgatttctctgggcctttattctcactactggctgctcctgaacgtgtcaggcttcaagaaccccagctcagccctgggctgcatgttcctcaccagatccctgttggcccacccctacctccacgtcaacatcttccagcacatcggactgcccatgttctcccgggacaacaagccccgtcggattcacatgatgagcctgggggtgcttaacctggcccggctgcccgtgctggactgggcgttcggccactcgatcatcagctgccatgtggaacaccatctattccccaggctctctgataacatgtgcctgaaggtagtcgagggctgggctgggggcgctggaataaagggactgttagaggatggaaaggaagattcttcggcctgggggcgttgctcacactataatcctggcacttgcggaggctgaggtgggcagattgcttgagcccaggagtttgagagcagcctgggcaacatggtgaaaccccatctctacaaaaaattcaaaaattagcggggtgtggtggcacatgcttgtggtcccagctgcttggaagctgaggtgaggaccacctgagtctgcagaggttgaggctgcaatgaaccataatcgtgccactgcactccagcctggtgacagagtaagaccctgtctcaaaaaaaaaaaaaaaa

SEQ ID NO: 133359 - DNA, 2044 bp, Homo sapiens
  Payload ID: 6066
  Gene Symbol: FADS6
  Gene Name: fatty acid desaturase 6
  ENST ID: ENST00000614223
  CDS Start-End: 13-1065
cccacagagtccatggaacccacggagcccatggaacctacggagcccatggaaccggcgcggagcgcgcaccgtgggggcgaggcgctgctgcgggagctggaggtgctggtgcaggacgtggtgaggacgagctcctggtgggagcgccacggcgtggactgcgccatcctcgcgctcagcctcttcgccttgccggcaggcttcctgtgcctgcgctgggagaatgccctggtctttgcatccggcatcaccatcttgggtgtgtgccactacacactcactgtcaagggcagccacctggccactcatggggccctcaccgagtccaaacgctggagcaagatctggctgcttttctttgtggaggtgtgcacagccttcactgcagagcacgccacgcatgggcacgtcaagatgcaccatgcctacaccaacgtggtgggcctgggggactccagcacgtggaggctgccttgcctcaaccgctatgtctacatgttccttgctcctttcctcctccccatcgccactccactggtggctgtcgagcggctgaggaaggtggagctcgggacagccctgcggacgctggccctgatttctctgggcctttattctcactactggctgctcctgaacgtgtcaggcttcaagaaccccagctcagccctgggctgcatgttcctcaccagatccctgttggcccacccctacctccacgtcaacatcttccagcacatcggactgcccatgttctcccgggacaacaagccccgtcggattcacatgatgagcctgggggtgcttaacctggcccggctgcccgtgctggactgggcgttcggccactcgatcatcagctgccatgtggaacaccatctattccccaggctctctgataacatgtgcctgaaggtgaagcccgtggtgtcccagttcctacgtgagaagcagctaccgtacaacgaggactcatacctggctcgcttccagctgtttctccgtcgctatgaggaattcatggtgcaggccccacccatcactgagcttgtggggctgtaatgaggccgggccggtgcagccaccctgcccctccctggcctggccctggccctcctgctgctgctggtccagggggtgtggctcagtggctggtggtggacctggagagtggaggcaccggccaggcaggggggcaggggagctcaggcctggggtctgggggccacctgccttgcgtgcttttctgggttttgaggggtgtctgggtgaagcggtaatggtggctgtgcattctggtcagtctggacctcagcaacttcatctcaggactaaagagctgggtccttccccctgctccatctgagccttggtagggttaaagggaggtgacagggtgaagagggatcctgtgcaggggccacctgggagatagcagggggcacagagagaacagggtcagctccctcggctgggacctccctggcattgggagagccccacacggccttggctattgcttccttcaggctctgcccaccaaggtgccctctccccggggaccttagggtgagcttgcttttggcaggccttcctcgatcctcagccaaaggaacctgtgcaagacactggctcagcagttccccaggccacagtatcagcaagataaaagtgagtgtgttttgtcgggagggaactccaggggaagtgaggggagaaggttccccagggacagagttagggaaagagtataaatagccagccaggggcggtggctcatgcctgtaatcccagcactttgggaggccaaggcgggtggatcgcgagatcaggagctcgagaccaccctggccaacatggtgaaaccccgtctctactaaaaatacaaaaaattagctggatgtggtggcatacacttgtagtcccagctacttggcaggctgaggcagaagaatcacctgaacccgggaggtggaggttgcagtgagccaagattgcaccattgcattccagcctgggtgacagagcgagactccatctc

SEQ ID NO: 133360 - DNA, 555 bp, Homo sapiens
  Payload ID: 6066
  Gene Symbol: FADS6
  Gene Name: fatty acid desaturase 6
  ENST ID: ENST00000621859
  CDS Start-End: 187-555
gagccgggcctgggtcgccagcgcccgcagcagaggagccagggtgtctcgcaccttgaccccgggggcgggtgtccccaggcggcgcgtgactccgccccggcccgccccgcctcgcctgcaccgcagacacacgccccagtcctccagtcctccgtgcgcgtcgggcccgagcccacagagtccatggaacccacggagccgatggaacctacggagcccatggaacctacggagcccatggaacctacggagcccatggaacctacggagcccatggaaccggcgcggagcgcgcaccgtgggggcgaggcgctgctgcgggagctggaggtgctggtgcaggacgtggtgaggacgagctcctggtgggagcgccacggcgtggactgcgccatcctcgcgctcagcctcttcgccttgccggcaggtgtgcacagccttcactgcagagcacgccacgcatgggcacgtcaagatgcaccatgcctacaccaacgtggtgggcctgggggactccagcacgtggaggctgccttgcctcaaccgctatgt

SEQ ID NO: 133361 - DNA, 2154 bp, Homo sapiens
  Payload ID: 6066
  Gene Symbol: FADS6
  Gene Name: fatty acid desaturase 6
  ENST ID: ENST00000612771
  CDS Start-End: 16-1122
gagcccacagagtccatggaacccacggagccgatggaacctacggagcccatggaacctacggagcccatggaacctacggagcccatggaacctacggagcccatggaaccggcgcggagcgcgcaccgtgggggcgaggcgctgctgcgggagctggaggtgctggtgcaggacgtggtgaggacgagctcctggtgggagcgccacggcgtggactgcgccatcctcgcgctcagcctcttcgccttgccggcaggcttcctgtgcctgcgctgggagaatgccctggtctttgcatccggcatcaccatcttgggtgtgtgccactacacactcactgtcaagggcagccacctggccactcatggggccctcaccgagtccaaacgctggagcaagatctggctgcttttctttgtggaggtgtgcacagccttcactgcagagcacgccacgcatgggcacgtcaagatgcaccatgcctacaccaacgtggtgggcctgggggactccagcacgtggaggctgccttgcctcaaccgctatgtctacatgttccttgctcctttcctcctccccatcgccactccactggtggctgtcgagcggctgaggaaggtggagctcgggacagccctgcggacgctggccctgatttctctgggcctttattctcactactggctgctcctgaacgtgtcaggcttcaagaaccccagctcagccctgggctgcatgttcctcaccagatccctgttggcccacccctacctccacgtcaacatcttccagcacatcggactgcccatgttctcccgggacaacaagccccgtcggattcacatgatgagcctgggggtgcttaacctggcccggctgcccgtgctggactgggcgttcggccactcgatcatcagctgccatgtggaacaccatctattccccaggctctctgataacatgtgcctgaaggtgaagcccgtggtgtcccagttcctacgtgagaagcagctaccgtacaacgaggactcatacctggctcgcttccagctgtttctccgtcgctatgaggaattcatggtgcaggccccacccatcactgagcttgtggggctgtaatgaggccgggccggtgcagccaccctgcccctccctggcctggccctggccctcctgctgctgctggtccagggggtgtggctcagtggctggtggtggacctggagagtggaggcaccggccaggcaggggggcaggggagctcaggcctggggtctgggggccacctgccttgcgtgcttttctgggttttgaggggtgtctgggtgaagcggtaatggtggctgtgcattctggtcagtctggacctcagcaacttcatctcaggactaaagagctgggtccttccccctgctccatctgagccttggtagggttaaagggaggtgacagggtgaagagggatcctgtgcaggggccacctgggagatagcagggggcacagagagaacagggtcagctccctcggctgggacctccctggcattgggagagccccacacggccttggctattgcttccttcaggctctgcccaccaaggtgccctctccccggggaccttagggtgagcttgcttttggcaggccttcctcgatcctcagccaaaggaacctgtgcaagacactggctcagcagttccccaggccacagtatcagcaagataaaagtgagtgtgttttgtcgggagggaactccaggggaagtgaggggagaaggttccccagggacagagttagggaaagagtataaatagccagccaggggcggtggctcatgcctgtaatcccagcactttgggaggccaaggcgggtggatcgcgagatcaggagctcgagaccaccctggccaacatggtgaaaccccgtctctactaaaaatacaaaaaattagctggatgtggtggcatacacttgtagtcccagctacttggcaggctgaggcagaagaatcacctgaacccgggaggtggaggttgcagtgagccaagattgcaccattgcattccagcctgggtgacagagcgagactccatctcaaaaaaataaaaaaataaaaaataagactcccgttcaaaaaaaaaaaaaagaa

SEQ ID NO: 133362 - DNA, 3251 bp, Homo sapiens
  Payload ID: 6067
  Gene Symbol: FAXDC2
  Gene Name: fatty acid hydroxylase domain containing 2
  Uniprot ID: Q96IV6
  ENST ID: ENST00000326080
  CDS Start-End: 425-1426
ttgaatctgcctcctcctatgggacagcgacattttcttaagttgcagatgatggagaaaattttttaaaagaaaaaaagggggcagggggagggaagcccagagtttggccaaatgcacgtttttcaagttcctgcttgagcttagattccctttccgctttaaggacatgccctctggaaagaagggtgttttgtttccagcccacacagacccaaacttttttcatcacgtgcctggtccgagccagtacgcagctctgtaatgagatcaccatggccagcctcccacccgagcaaaaacaaggttagcctgcagcagagccgcagcagcaacagccaccaaagcgggggctgaaagggaagagaacttagatttgacctgtgcaaggacctcagcagcttggacacagcccactgcagagatgaaaggagaagctggacatatgctacacaatgaaaagtcaaagcaggagggacacatctggggctctatgaggaggacagctttcatcctgggctctggacttctctcatttgtggccttctggaactcagtgacatggcatcttcagagattttggggtgcttctggctacttttggcaagcccagtgggagaggctgctgactacatttgaagggaaggagtggatcctcttctttataggtgccatccaagtgccttgtctcttcttctggagcttcaatgggcttctattggtggttgacacaacaggaaaacctaacttcatctctcgctaccgaattcaggtcggcaagaatgaacctgtggatcctgtgaaactgcgccagtctatccgcacagttcttttcaaccagtgcatgatatctttccccatggtggtcttcctctatcccttcctcaaatggtggagagacccctgccgccgtgagctacccaccttccactggttcctcctggagctggccatcttcacgctgatcgaggaagtcttgttctactattcacaccggctccttcaccacccaacattctacaagaaaatccacaagaaacaccatgagtggacagctcccattggcgtgatctctctctatgcccaccctatagagcatgcagtctccaacatgctaccggtgatagtgggcccattagtaatgggctcccacttgtcctccatcaccatgtggttttccttggccctcatcatcaccaccatctcccactgtggctaccaccttcccttcctgccttcgcctgaattccacgactaccaccatctcaagttcaaccagtgctatggggtgctgggtgtgctggaccacctccatgggactgacaccatgttcaagcagaccaaggcctacgagagacatgtcctcctgctgggcttcaccccgctctctgagagcatcccagactccccaaagaggatggagtgagagacagcctaagtgtcatcctggctgtccctcagccatgggatgcagacacggcttcctgattgcacctaacaatttgcctccttcggccacacgccctaatgatggcaccaccagggtagagggaaggtcggcttcccggaaaagcagggccaaggatgaggctttcttcaaactactgcccttgatgtccctcaatgggatcaggagttagcttaagaaaaaggaaaacacagctccccagactggaggctggtcagagggaggagacccctggtcctctgctgtggaaggagaggggttcagccccagataactcctttgtggcctgggcaggatgcagagaatgacaaggctgaaaggagggggactggaggctgcctggctccagcgagagctccttctgggaccagagggtgggacggccaggtatcactttgccccttcctgccccaaaaggctttcacatacccgactcaggccagagccaagacaccctggcaaatcattataggtctcaattcatgacataccagatgccagtcgccacttcacccaacacacacacaaacatacacacaccaaacactctgagtgagtggtaaaggccccgttttaactctggcccaccgcaaacaaaaggtttccctctgtgggggagaaaaagaaatccaggagctcctccctggattaaaaccaacgaggtgcagaccaaactttaacacctttagccttatgtggaaaccaaaaaccaactgctgggaaactgtgaaaagcccttttacccacaaggggaggggtcaaagttgctgccctttggggacacccgagacccctaattagcctatctgaatgaggaccaaaggttagagccctctttctccccgaagaaagagcccggaaaaacatggcagagcaaagagcaaaatcctttctcccccgaatgctttaccagtttctcagcaacatttattcaagatgatttttaccaggaaccttatcaaaggcaaaaccacagctgcttgggttgaagtccccatcctggcctcctctcagccgccagacatggccaggaaccctgtggttcccaagaacaatttaaagatcactctttgatttgaaagaccaccattatcattttactaaattcttatatatacttgtgccttttccaactttcagttctcttaagaaaaacatccactgtagctttataaaataccttagtatcagctaggtccaagtctccaggcaggactatcaaaatggactccttcttcctatcagctctagaaccccagaggacttgcccagtaggccagctgagcacttaccaggcagcatctccctggccttccacagtctcgcctgtctgtctctggccttggtggacctggctccctccctaggaggcttttgccctcagcttgaatacagttcctggtgcatcaaagctgtaagttctcagctgctggcctgcactcatcacctcttcctacaaataaacatttggaaaaaagtccatcttcaatatgcttaaagagaagggtaggagataaggagaaagaacagatacggtttttttcccctttaaggcctttagattttgaggtactgtaaggggcctagaaggacaaaaggctttcattccctcttccttttggcaggcaggttatcagtccttggcagaagggcccagccctatccttttctgtatcaaacaaaatccttgaggttggtatacaagttaaggctgaaaaaaggccttaaattcccagtaaagaatgtgaaagcaagcatgtaaaataaactggtcttcatgaat

SEQ ID NO: 133363 - DNA, 584 bp, Homo sapiens
  Payload ID: 6067
  Gene Symbol: FAXDC2
  Gene Name: fatty acid hydroxylase domain containing 2
  ENST ID: ENST00000524363
  CDS Start-End: 42-341
acttccctgccctcctccaggagggacacatctggggctctatgaggaggacagctttcatcctgggctctggacttctctcatttgtggccttctggaactcagtgacatggcatcttcagagattttggggtgcttctggctacttttggcaagcccagtgggagaggctgctgactacatttgaagggaaggagtggatcctcttctttataggtggatcctgtgaaactgcgccagtctatccgcacagttcttttcaaccagtgcatgatatctttccccatggtggtcttcctctatcccttcctcaaatggtggagagacccctgccgccgtgagctacccaccttccactggttcctcctggagctggccatcttcacgctgatcgaggaagtcttgttctactattcacaccggtgagcaggccctgcctgaggcacagctggctcctcatcctgtctagggctcactgatcaacaaggaaactgaggccaggctccttcaccacccaacattctacaagaaaatccacaagaaacaccatgagtggacagctcccattggcgtgatctctctct

SEQ ID NO: 133364 - DNA, 575 bp, Homo sapiens
  Payload ID: 6067
  Gene Symbol: FAXDC2
  Gene Name: fatty acid hydroxylase domain containing 2
  ENST ID: ENST00000521518
  CDS Start-End: 122-274
aaggttagcctgcagcagagccgcagcagcaacagccaccaaagcgggggctgaaagggaagagaacttagatttgacctgtgcaaggacctcagcagcttggacacagcccactgcagagatgaaaggagaagctggacatatgctacacaatgaaaagtcaaagcaggagggacacatctggggctctatgaggaggacagctttcatcctgggctctggacttctctcatttgtggccttctggaactcagtgacatggtggatcctgtgaaactgcgccagtctatccgcacagttcttttcaaccagtgcatgatatctttccccatggtggtcttcctctatcccttcctcaaatggtggagagacccctgccgccgtgagctacccaccttccactggttcctcctggagctggccatcttcacgctgatcgaggaagtcttgttctactattcacaccggctccttcaccacccaacattctacaagaaaatccacaagaaacaccatgagtggacagctcccattggcgtgatctctctctatgcccaccctatagagcatgcagt

SEQ ID NO: 133365 - DNA, 625 bp, Homo sapiens
  Payload ID: 6067
  Gene Symbol: FAXDC2
  Gene Name: fatty acid hydroxylase domain containing 2
  ENST ID: ENST00000522825
  CDS Start-End: 176-307
acagaagctggaaaaggccagctggaaaacgcagatgtgccttcctggttggttgagatgctgatcctacagcactcccgctgtgcctcagcagtgagctgggtgtaaaggcaggaggcttgctggggtctgacacttccctgccctcctccaggagggacacatctggggctctatgaggaggacagctttcatcctgggctctggacttctctcatttgtggccttctggaactcagtgacatggtgccatccaagtgccttgtctcttcttctggagcttcaatgggcttctattggtggttgacacaacaggaaaacctaacttcatctctcgctaccgaattcaggtcggcaagaatgaacctgtggatcctgtgaaactgcgccagtctatccgcacagttcttttcaaccagtgcatgatatctttccccatggtggtcttcctctatcccttcctcaaatggtggagagacccctgccgccgtgagctacccaccttccactggttcctcctggagctggccatcttcacgctgatcgaggaagtcttgttctactattcacaccggctccttcaccacccaacattctacaagaaaatccacaagaaacaccatga

SEQ ID NO: 133366 - DNA, 558 bp, Homo sapiens
  Payload ID: 6067
  Gene Symbol: FAXDC2
  Gene Name: fatty acid hydroxylase domain containing 2
  ENST ID: ENST00000520968
  CDS Start-End: 241-549
ttatcatcatccttccacttcaaatcacactcagtcctcctccttctgacacgccattcttcttctgtttttgtttggcccgcttaccgggaccgacagggcccgcgaagcgctggctggcgggctgacgagctggcgggctggcgggctgactccccgacggcggcgacggcagcccctggcccggagctcttttccctctaccccggatctgctcctagaaccgaacgagccagtgagatgaaaggagaagctggacatatgctacacaatgaaaagtcaaagcaggagggacacatctggggctctatgaggaggacagctttcatcctgggctctggacttctctcatttgtggccttctggaactcagtgacatggcatcttcagagattttggggtgcttctggctacttttggcaagcccagtgggagaggctgctgactacatttgaagggaaggagtggatcctcttctttataggctggcgagacctggcctcgcaatgggatggaagtaaacaaagagtgaattctgaaatcagttaatgcatgcag

SEQ ID NO: 133367 - DNA, 815 bp, Homo sapiens
  Payload ID: 6067
  Gene Symbol: FAXDC2
  Gene Name: fatty acid hydroxylase domain containing 2
  ENST ID: ENST00000519501
  CDS Start-End: 376-815
aaggttagcctgcagcagagccgcagcagcaacagccaccaaagcgggggctgaaagggaagagaacttagatttgacctgtgcaaggacctcagcagcttggacacagcccactgcagagatgaaaggagaagctggacatatgctacacaatgaaaagtcaaagcagcctgagagctcctgataaggaagaggctcccacagaagctggaaaaggccagctggaaaacgcagatgtgccttcctggttggttgagatgctgatcctacagcactcccgctgtgcctcagcagtgagctgggtgtaaaggcaggaggcttgctggggtctgacacttccctgccctcctccaggagggacacatctggggctctatgaggaggacagctttcatcctgggctctggacttctctcatttgtggccttctggaactcagtgacatggcatcttcagagattttggggtgcttctggctacttttggcaagcccagtgggagaggctgctgactacatttgaagggaaggagtggatcctcttctttataggtgccatccaagtgccttgtctcttcttctggagcttcaatgggcttctattggtggttgacacaacaggaaaacctaacttcatctctcgctaccgaattcaggtcggcaagaatgaacctgtggatcctgtgaaactgcgccagtctatccgcacagttcttttcaaccagtgcatgatatctttccccatggtggtcttcctctatcccttcctcaaatggtggagagacccctgccgccgtgagctacccaccttccactg

SEQ ID NO: 133368 - DNA, 536 bp, Homo sapiens
  Payload ID: 6067
  Gene Symbol: FAXDC2
  Gene Name: fatty acid hydroxylase domain containing 2
  ENST ID: ENST00000518651
  CDS Start-End: 143-487
aaggttagcctgcagcagagccgcagcagcaacagccaccaaagcgggggctgaaagggaagagaacttagatttgacctgtgcaaggacctcagcagcttggacacagcccactgcagaggagggacacatctggggctctatgaggaggacagctttcatcctgggctctggacttctctcatttgtggccttctggaactcagtgacatggcatcttcagagattttggggtgcttctggctacttttggcaagcccagtgggagaggctgctgactacatttgaagggaaggagtggatcctcttctttataggtgccatccaagtgccttgtctcttcttctggagcttcaatgggcttctattggtggttgacacaacaggaaaacctaacttcatctctcgctaccgaattcaggtcggcaagaatgaacctgctggcgagacctggcctcgcaatgggatggaagtaaacaaagagtgaattctgaaatcagttaatgcatgcagtgcctggaaaggctggaggaaga

SEQ ID NO: 133369 - DNA, 1203 bp, Homo sapiens
  Payload ID: 6067
  Gene Symbol: FAXDC2
  Gene Name: fatty acid hydroxylase domain containing 2
  Uniprot ID: Q96IV6
  ENST ID: ENST00000517938
  CDS Start-End: 149-1081
aaaaacaaggttagcctgcagcagagccgcagcagcaacagccaccaaagcgggggctgaaagggaagagaacttagatttgacctgtgcaaggacctcagcagcttggacacagcccactgcagaggagggacacatctggggctctatgaggaggacagctttcatcctgggctctggacttctctcatttgtggccttctggaactcagtgacatggcatcttcagagattttggggtgcttctggctacttttggcaagcccagtgggagaggctgctgactacatttgaagggaaggagtggatcctcttctttataggtgccatccaagtgccttgtctcttcttctggagcttcaatgggcttctattggtggttgacacaacaggaaaacctaacttcatctctcgctaccgaattcaggtcggcaagaatgaacctgtggatcctgtgaaactgcgccagtctatccgcacagttcttttcaaccagtgcatgatatctttccccatggtggtcttcctctatcccttcctcaaatggtggagagacccctgccgccgtgagctacccaccttccactggttcctcctggagctggccatcttcacgctgatcgaggaagtcttgttctactattcacaccggctccttcaccacccaacattctacaagaaaatccacaagaaacaccatgagtggacagctcccattggcgtgatctctctctatgcccaccctatagagcatgcagtctccaacatgctaccggtgatagtgggcccattagtaatgggctcccacttgtcctccatcaccatgtggttttccttggccctcatcatcaccaccatctcccactgtggctaccaccttcccttcctgccttcgcctgaattccacgactaccaccatctcaagttcaaccagtgctatggggtgctgggtgtgctggaccacctccatgggactgacaccatgttcaagcagaccaaggcctacgagagacatgtcctcctgctgggcttcaccccgctctctgagagcatcccagactccccaaagaggatggagtgagagacagcctaagtgtcatcctggctgtccctcagccatgggatgcagacacggcttcctgattgcacctaacaatttgcctccttcggccacacgccctaatgatggcaccaccagggtag

SEQ ID NO: 133370 - DNA, 603 bp, Homo sapiens
  Payload ID: 6067
  Gene Symbol: FAXDC2
  Gene Name: fatty acid hydroxylase domain containing 2
  ENST ID: ENST00000520461
  CDS Start-End: 509-603
gagcaaaaacaaggttagcctgcagcagagccgcagcagcaacagccaccaaagcgggggctgaaagggaagagaacttagatttgacctgtgcaaggacctcagcagcttggacacagcccactgcagagaactgttgattggtttcagaaaaatcttggtccatgtttttaaaccaaccaacaagtaatactaaagaacaaaccagcactttgggaggccgaggctggcggatcacaaggccaggagatcgagaccatcctggctaacacggtgaaaccctgtctctactaaaaatacaaaaaattagccgggcgtggtggtggaagcctgtagtcccagctactcaggaggctgagcaggagaatggcgtgaacctgggaggcagagcttgcagtgagccaagattgtgccactgcactccagcctgggcgacagagcgagactctgtctcaaaaaaaaaagaacaaaccaaaccaacttgctagaactactctttgagttctggatgaaaggagaagctggacatatgctacacaatgaaaagtcaaagcaggagggacacatctggggctctatgaggaggacagctttcatcctggg

SEQ ID NO: 133371 - DNA, 868 bp, Homo sapiens
  Payload ID: 6067
  Gene Symbol: FAXDC2
  Gene Name: fatty acid hydroxylase domain containing 2
  ENST ID: ENST00000520581
  CDS Start-End: 116-298
agcctgcagcagagccgcagcagcaacagccaccaaagcgggggctgaaagggaagagaacttagatttgacctgtgcaaggacctcagcagcttggacacagcccactgcagagatgaaaggagaagctggacatatgctacacaatgaaaagtcaaagcaggtgccatccaagtgccttgtctcttcttctggagcttcaatgggcttctattggtggttgacacaacaggaaaacctaacttcatctctcgctaccgaattcaggtcggcaagaatgaacctgtggatcctgtgaaactgcgccagtctatccgcacagttcttttcaaccagtgcatgatatctttccccatggtggtcttcctctatcccttcctcaaatggtggagagacccctgccgccgtgagctacccaccttccactggttcctcctggagctggccatcttcacgctgatcgaggaagtcttgttctactattcacaccggctccttcaccacccaacattctacaagaaaatccacaagaaacaccatgagtggacagctcccattggcgtgatctctctctatgcccaccctatagagcatgcagtctccaacatgctaccggtgatagtgggcccattagtaatgggctcccacttgtcctccatcaccatgtggttttccttggccctcatcatcaccaccatctcccactgtggctaccaccttcccttcctgccttcgcctgaattccacgactaccaccatctcaagttcaaccagtgctatggggtgctgggtgtgctggaccacctccatgggactgacaccatgttcaagcagaccaaggcctacgagagacatgtcctcctgctgg

SEQ ID NO: 133372 - DNA, 8565 bp, Homo sapiens
  Payload ID: 6068
  Gene Symbol: FASN
  Gene Name: fatty acid synthase
  Uniprot ID: P49327
  ENST ID: ENST00000306749
  CDS Start-End: 220-7755
tcattggcctgggcggcgcagccaagctgtcagcccatgtggcgtggccgcccggggatggccgcggtttaaatagcgtcggcgccggcctagagggagccagagagacggcagcggccccggcctccctctccgccgcgcttcagcctcccgctccgccgcgctccagcctcgctctccgccgcccgcaccgccgcccgcgccctcaccagagcagccatggaggaggtggtgattgccggcatgtccgggaagctgccagagtcggagaacttgcaggagttctgggacaacctcatcggcggtgtggacatggtcacggacgatgaccgtcgctggaaggcggggctctacggcctgccccggcggtccggcaagctgaaggacctgtctaggtttgatgcctccttcttcggagtccaccccaagcaggcacacacgatggaccctcagctgcggctgctgctggaagtcacctatgaagccatcgtggacggaggcatcaacccagattcactccgaggaacacacactggcgtctgggtgggcgtgagcggctctgagacctcggaggccctgagccgagaccccgagacactcgtgggctacagcatggtgggctgccagcgagcgatgatggccaaccggctctccttcttcttcgacttcagagggcccagcatcgcactggacacagcctgctcctccagcctgatggccctgcagaacgcctaccaggccatccacagcgggcagtgccctgccgccatcgtggggggcatcaatgtcctgctgaagcccaacacctccgtgcagttcttgaggctggggatgctcagccccgagggcacctgcaaggccttcgacacagcggggaatgggtactgccgctcggagggtgtggtggccgtcctgctgaccaagaagtccctggcccggcgggtgtacgccaccatcctgaacgccggcaccaatacagatggcttcaaggagcaaggcgtgaccttcccctcaggggatatccaggagcagctcatccgctcgttgtaccagtcggccggagtggcccctgagtcatttgaatacatcgaagcccacggcacaggcaccaaggtgggcgacccccaggagctgaatggcatcacccgagccctgtgcgccacccgccaggagccgctgctcatcggctccaccaagtccaacatggggcacccggagccagcctcggggctggcagccctggccaaggtgctgctgtccctggagcacgggctctgggcccccaacctgcacttccatagccccaaccctgagatcccagcgctgttggatgggcggctgcaggtggtggaccagcccctgcccgtccgtggcggcaacgtgggcatcaactcctttggcttcgggggctccaacgtgcacatcatcctgaggcccaacacgcagccgccccccgcacccgccccacatgccaccctgccccgtctgctgcgggccagcggacgcacccctgaggccgtgcagaagctgctggagcagggcctccggcacagccaggacctggctttcctgagcatgctgaacgacatcgcggctgtccccgccaccgccatgcccttccgtggctacgctgtgctgggtggtgagcgcggtggcccagaggtgcagcaggtgcccgctggcgagcgcccgctctggttcatctgctctgggatgggcacacagtggcgcgggatggggctgagcctcatgcgcctggaccgcttccgagattccatcctacgctccgatgaggctgtgaagccattcggcctgaaggtgtcacagctgctgctgagcacagacgagagcacctttgatgacatcgtccattcgtttgtgagcctgactgccatccagataggcctcatagacctgctgagctgcatggggctgaggccagatggcatcgtcggccactccctgggggaggtggcctgtggctacgccgacggctgcctgtcccaggaggaggccgtcctcgctgcctactggaggggacagtgcatcaaagaagcccatctcccgccgggcgccatggcagccgtgggcttgtcctgggaggagtgtaaacagcgctgccccccgggcgtggtgcccgcctgccacaactccaaggacacagtcaccatctcgggacctcaggccccggtgtttgagttcgtggagcagctgaggaaggagggtgtgtttgccaaggaggtgcggaccggcggtatggccttccactcctacttcatggaggccatcgcacccccactgctgcaggagctcaagaaggtgatccgggagccgaagccacgttcagcccgctggctcagcacctctatccccgaggcccagtggcacagcagcctggcacgcacgtcctccgccgagtacaatgtcaacaacctggtgagccctgtgctgttccaggaggccctgtggcacgtgcctgagcacgcggtggtgctggagatcgcgccccacgccctgctgcaggctgtcctgaagcgtggcctgaagccgagctgcaccatcatccccctgatgaagaaggatcacagggacaacctggagttcttcctggccggcatcggcaggctgcacctctcaggcatcgacgccaaccccaatgccttgttcccacctgtggagttcccagctccccgaggaactcccctcatctccccactcatcaagtgggaccacagcctggcctgggacgtgccggccgccgaggacttccccaacggttcaggttccccctcagccgccatctacaacatcgacaccagctccgagtctcctgaccactacctggtggaccacaccctcgacggtcgcgtcctcttccccgccactggctacctgagcatagtgtggaagacgctggcccgcgccctgggcctgggcgtcgagcagctgcctgtggtgtttgaggatgtggtgctgcaccaggccaccatcctgcccaagactgggacagtgtccctggaggtacggctcctggaggcctcccgtgccttcgaggtgtcagagaacggcaacctggtagtgagtgggaaggtgtaccagtgggatgaccctgaccccaggctcttcgaccacccggaaagccccacccccaaccccacggagcccctcttcctggcccaggctgaagtttacaaggagctgcgtctgcgtggctacgactacggccctcatttccagggcatcctggaggccagcctggaaggtgactcggggaggctgctgtggaaggataactgggtgagcttcatggacaccatgctgcagatgtccatcctgggctcggccaagcacggcctgtacctgcccacccgtgtcaccgccatccacatcgaccctgccacccacaggcagaagctgtacacactgcaggacaaggcccaagtggctgacgtggtggtgagcaggtggctgagggtcacagtggccggaggcgtccacatctccgggctccacactgagtcggccccgcggcggcagcaggagcagcaggtgcccatcctggagaagttttgcttcactccccacacggaggaggggtgcctgtctgagcgcgctgccctgcaggaggagctgcaactgtgcaaggggctggtgcaggcactgcagaccaaggtgacccagcaggggctgaagatggtggtgcccggactggatggggcccagatcccccgggacccctcacagcaggaactgccccggctgttgtcggctgcctgcaggcttcagctcaacgggaacctgcagctggagctggcgcaggtgctggcccaggagaggcccaagctgccagaggaccctctgctcagcggcctcctggactccccggcactcaaggcctgcctggacactgccgtggagaacatgcccagcctgaagatgaaggtggtggaggtgctggctggccacggtcacctgtattcccgcatcccaggcctgctcagcccccatcccctgctgcagctgagctacacggccaccgaccgccacccccaggccctggaggctgcccaggccgagctgcagcagcacgacgttgcccagggccagtgggatcccgcagaccctgcccccagcgccctgggcagcgccgacctcctggtgtgcaactgtgctgtggctgccctcggggacccggcctcagctctcagcaacatggtggctgccctgagagaagggggctttctgctcctgcacacactgctccgggggcaccccctcggggacatcgtggccttcctcacctccactgagccgcagtatggccagggcatcctgagccaggacgcgtgggagagcctcttctccagggtgtcgctgcgcctggtgggcctgaagaagtccttctacggctccacgctcttcctgtgccgccggcccaccccgcaggacagccccatcttcctgccggtggacgataccagcttccgctgggtggagtctctgaagggcatcctggctgacgaagactcttcccggcctgtgtggctgaaggccatcaactgtgccacctcgggcgtggtgggcttggtgaactgtctccgccgagagcccggcgggaaccgcctccggtgtgtgctgctctccaacctcagcagcacctcccacgtcccggaggtggacccgggctccgcagaactgcagaaggtgttgcagggagacctggtgatgaacgtctaccgcgacggggcctggggggctttccgccacttcctgctggaggaggacaagcctgaggagccgacggcacatgcctttgtgagcaccctcacccggggggacctgtcctccatccgctgggtctgctcctcgctgcgccatgcccagcccacctgccctggcgcccagctctgcacggtctactacgcctccctcaacttccgcgacatcatgctggccactggcaagctgtcccctgatgccatcccagggaagtggacctcccaggacagcctgctaggtatggagttctcgggccgagacgccagcggcaagcgtgtgatgggactggtgcctgccaagggcctggccacctctgtcctgctgtcaccggacttcctctgggatgtgccttccaactggacgctggaggaggcggcctcggtgcctgtcgtctacagcacggcctactacgcgctggtggtgcgtgggcgggtgcgccccggggagacgctgctcatccactcgggctcgggcggcgtgggccaggccgccatcgccatcgccctcagtctgggctgccgcgtcttcaccaccgtggggtcggctgagaagcgggcgtacctccaggccaggttcccccagctcgacagcaccagcttcgccaactcccgggacacatccttcgagcagcatgtgctgtggcacacgggcgggaagggcgttgacctggtcttgaactccttggcggaagagaagctgcaggccagcgtgaggtgcttggctacgcacggtcgcttcctggaaattggcaaattcgacctttctcagaaccacccgctcggcatggctatcttcctgaagaacgtgacattccacggggtcctactggatgcgttcttcaacgagagcagtgctgactggcgggaggtgtgggcgcttgtgcaggccggcatccgggatggggtggtacggcccctcaagtgcacggtgttccatggggcccaggtggaggacgccttccgctacatggcccaagggaagcacattggcaaagtcgtcgtgcaggtgcttgcggaggagccggaggcagtgctgaagggggccaaacccaagctgatgtcggccatctccaagaccttctgcccggcccacaagagctacatcatcgctggtggtctgggtggcttcggcctggagttggcgcagtggctgatacagcgtggggtgcagaagctcgtgttgacttctcgctccgggatccggacaggctaccaggccaagcaggtccgccggtggaggcgccagggcgtacaggtgcaggtgtccaccagcaacatcagctcactggagggggcccggggcctcattgccgaggcggcgcagcttgggcccgtgggcggcgtcttcaacctggccgtggtcttgagagatggcttgctggagaaccagaccccagagttcttccaggacgtctgcaagcccaagtacagcggcaccctgaacctggacagggtgacccgagaggcgtgccctgagctggactactttgtggtcttctcctctgtgagctgcgggcgtggcaatgcgggacagagcaactacggctttgccaattccgccatggagcgtatctgtgagaaacgccggcacgaaggcctcccaggcctggccgtgcagtggggcgccatcggcgacgtgggcattttggtggagacgatgagcaccaacgacacgatcgtcagtggcacgctgccccagcgcatggcgtcctgcctggaggtgctggacctcttcctgaaccagccccacatggtcctgagcagctttgtgctggctgagaaggctgcggcctatagggacagggacagccagcgggacctggtggaggccgtggcacacatcctgggcatccgcgacttggctgctgtcaacctggacagctcactggcggacctgggcctggactcgctcatgagcgtggaggtgcgccagacgctggagcgtgagctcaacctggtgctgtccgtgcgcgaggtgcggcaactcacgctccggaaactgcaggagctgtcctcaaaggcggatgaggccagcgagctggcatgccccacgcccaaggaggatggtctggcccagcagcagactcagctgaacctgcgctccctgctggtgaacccggagggccccaccctgatgcggctcaactccgtgcagagctcggagcggcccctgttcctggtgcacccaatcgagggctccaccaccgtgttccacagcctggcctcccggctcagcatccccacctatggcctgcagtgcacccgagctgcgccccttgacagcatccacagcctggctgcctactacatcgactgcatcaggcaggtgcagcccgagggcccctaccgcgtggccggctactcctacggggcctgcgtggcctttgaaatgtgctcccagctgcaggcccagcagagcccagcccccacccacaacagcctcttcctgttcgacggctcgcccacctacgtactggcctacacccagagctaccgggcaaagctgaccccaggctgtgaggctgaggctgagacggaggccatatgcttcttcgtgcagcagttcacggacatggagcacaacagggtgctggaggcgctgctgccgctgaagggcctagaggagcgtgtggcagccgccgtggacctgatcatcaagagccaccagggcctggaccgccaggagctgagctttgcggcccggtccttctactacaagctgcgtgccgctgagcagtacacacccaaggccaagtaccatggcaacgtgatgctactgcgcgccaagacgggtggcgcctacggcgaggacctgggcgcggactacaacctctcccaggtatgcgacgggaaagtatccgtccacgtcatcgagggtgaccaccgcacgctgctggagggcagcggcctggagtccatcatcagcatcatccacagctccctggctgagccacgcgtgagcgtgcgggagggctaggcccgtgcccccgcctgccaccggaggtcactccaccatccccaccccaccccaccccacccccgccatgcaacgggattgaagggtcctgccggtgggaccctgtccggcccagtgccactgccccccgaggctgctagatgtaggtgttaggcatgtcccacccacccgccgcctcccacggcacctcggggacaccagagctgccgacttggagactcctggtctgtgaagagccggtggtgcccgtgcccgcaggaactgggctgggcctcgtgcgcccgtggggtctgcgcttggtctttctgtgcttggatttgcatatttattgcattgctggtagagacccccaggcctgtccaccctgccaagactcctcaggcagcgtgtgggtcccgcactctgcccccatttccccgatgtcccctgcgggcgcgggcagccacccaagcctgctggctgcggccccctctcggccaggcattggctcagcccgctgagtggggggtcgtgggccagtccccgaggagctgggcccctgcacaggcacacagggcccggccacacccagcggccccccgcacagccacccgtggggtgctgcccttatgcccggcgccgggcaccaactccatgtttggtgtttgtctgtgtttgtttttcaagaaatgattcaaattgctgcttggattttgaaatttactgtaactgtcagtgtacacgtctggaccccgtttcatttttacaccaatttggtaaaaatgctgctctcagcctcccacaattaaaccgcatgtgatctccaccacc

SEQ ID NO: 133373 - DNA, 681 bp, Homo sapiens
  Payload ID: 6068
  Gene Symbol: FASN
  Gene Name: fatty acid synthase
  ENST ID: ENST00000580382
  CDS Start-End: 1-236
gcctggcctcccggctcagcatccccacctatggcctgcagtgcacccgaggcaggtgcagcccgagggcccctaccgcgtggccggctactcctacggggcctgcgtggcctttgaaatgtgctcccagctgcaggcccagcagagcccagcccccacccacaacagcctcttcctgttcgacggctcgcccacctacgtactggcctacacccagagctaccgggcaaagctgaccccaggctgtgaggctgaggctgagacggaggccatatgcttcttcgtgcagcagttcacggacatggagcacaacagggtgctggaggcgctgctgccgctgaagggcctagaggagcgtgtggcagccgccgtggacctgatcatcaagagccaccagggcctggaccgccaggagctgagctttgcggcccggtccttctactacaagctgcgtgccgctgagcagtacacacccaaggccaagtaccatggcaacgtgatgctactgcgcgccaagacgggtggcgcctacggcgaggacctgggcgcggactacaacctctcccaggtatgcgacgggaaagtatccgtccacgtcatcgagggtgaccaccgcacgctgctggagggcagcggcctggagtccatcatcagcatcatccacagctccctggctgagcc

SEQ ID NO: 133374 - DNA, 8407 bp, Homo sapiens
  Payload ID: 6068
  Gene Symbol: FASN
  Gene Name: fatty acid synthase
  ENST ID: ENST00000634990
  CDS Start-End: 75-7604
gcctcccgctccgccgcgctccagcctcgctctccgccgcccgcaccgccgcccgcgccctcaccagagcagccatggaggaggtggtgattgccggcatgtccgggaagctgccagagtcggagaacttgcaggagttctgggacaacctcatcggcggtgtggacatggtcacggacgatgaccgtcgctggaaggcggggctctacggcctgccccggcggtccggcaagctgaaggacctgtctaggtttgatgcctccttcttcggagtccaccccaagcaggcacacacgatggaccctcagctgcggctgctgctggaagtcacctatgaagccatcgtggacggaggcatcaacccagattcactccgaggaacacacactggcgtctgggtgggcgtgagcggctctgagacctcggaggccctgagccgagaccccgagacactcgtgggctacagcatggtgggctgccagcgagcgatgatggccaaccggctctccttcttcttcgacttcagagggcccagcatcgcactggacacagcctgctcctccagcctgatggccctgcagaacgcctaccaggccatccacagcgggcagtgccctgccgccatcgtggggggcatcaatgtcctgctgaagcccaacacctccgtgcagttcttgaggctggggatgctcagccccgagggcacctgcaaggccttcgacacagcggggaatgggtactgccgctcggagggtgtggtggccgtcctgctgaccaagaagtccctggcccggcgggtgtacgccaccatcctgaacgccggcaccaatacagatggcttcaaggagcaaggcgtgaccttcccctcaggggatatccaggagcagctcatccgctcgttgtaccagtcggccggagtggcccctgagtcatttgaatacatcgaagcccacggcacaggcaccaaggtgggcgacccccaggagctgaatggcatcacccgagccctgtgcgccacccgccaggagccgctgctcatcggctccaccaagtccaacatggggcacccggagccagcctcggggctggcagccctggccaaggtgctgctgtccctggagcacgggctctgggcccccaacctgcacttccatagccccaaccctgagatcccagcgctgttggatgggcggctgcaggtggtggaccagcccctgcccgtccgtggcggcaacgtgggcatcaactcctttggcttcgggggctccaacgtgcacatcatcctgaggcccaacacgcagccgccccccgcacccgccccacatgccaccctgccccgtctgctgcgggccagcggacgcacccctgaggccgtgcagaagctgctggagcagggcctccggcacagccaggacctggctttcctgagcatgctgaacgacatcgcggctgtccccgccaccgccatgcccttccgtggctacgctgtgctgggtggtgagcgcggtggcccagaggtgcagcaggtgcccgctggcgagcgcccgctctggttcatctgctctgggatgggcacacagtggcgcgggatggggctgagcctcatgcgcctggaccgcttccgagattccatcctacgctccgatgaggctgtgaagccattcggcctgaaggtgtcacagctgctgctgagcacagacgagagcacctttgatgacatcgtccattcgtttgtgagcctgactgccatccagataggcctcatagacctgctgagctgcatggggctgaggccagatggcatcgtcggccactccctgggggaggtggcctgtggctacgccgacggctgcctgtcccaggaggaggccgtcctcgctgcctactggaggggacagtgcatcaaagaagcccatctcccgccgggcgccatggcagccgtgggcttgtcctgggaggagtgtaaacagcgctgccccccgggcgtggtgcccgcctgccacaactccaaggacacagtcaccatctcgggacctcaggccccggtgtttgagttcgtggagcagctgaggaaggagggtgtgtttgccaaggaggtgcggaccggcggtatggccttccactcctacttcatggaggccatcgcacccccactgctgcaggagctcaagaaggtgatccgggagccgaagccacgttcagcccgctggctcagcacctctatccccgaggcccagtggcacagcagcctggcacgcacgtcctccgccgagtacaatgtcaacaacctggtgagccctgtgctgttccaggaggccctgtggcacgtgcctgagcacgcggtggtgctggagatcgcgccccacgccctgctgcaggctgtcctgaagcgtggcctgaagccgagctgcaccatcatccccctgatgaagaaggatcacagggacaacctggagttcttcctggccggcatcggcaggctgcacctctcaggcatcgacgccaaccccaatgccttgttcccacctgtggagttcccagctccccgaggaactcccctcatctccccactcatcaagtgggaccacagcctggcctgggacgtgccggccgccgaggacttccccaacggttcaggttccccctcagccgccatctacaacatcgacaccagctccgagtctcctgaccactacctggtggaccacaccctcgacggtcgcgtcctcttccccgccactggctacctgagcatagtgtggaagacgctggcccgcgccctgggcctgggcgtcgagcagctgcctgtggtgtttgaggatgtggtgctgcaccaggccaccatcctgcccaagactgggacagtgtccctggaggtacggctcctggaggcctcccgtgccttcgaggtgtcagagaacggcaacctggtagtgagtgggaaggtgtaccagtgggatgaccctgaccccaggctcttcgaccacccggaaagccccacccccaaccccacggagcccctcttcctggcccaggctgaagtttacaaggagctgcgtctgcgtggctacgactacggccctcatttccagggcatcctggaggccagcctggaaggtgactcggggaggctgctgtggaaggataactgggtgagcttcatggacaccatgctgcagatgtccatcctgggctcggccaagcacggcctgtacctgcccacccgtgtcaccgccatccacatcgaccctgccacccacaggcagaagctgtacacactgcaggacaaggcccaagtggctgacgtggtggtgagcaggtggctgagggtcacagtggccggaggcgtccacatctccgggctccacactgagtcggccccgcggcggcagcaggagcagcaggtgcccatcctggagaagttttgcttcactccccacacggaggaggggtgcctgtctgagcgcgctgccctgcaggaggagctgcaactgtgcaaggggctggtgcaggcactgcagaccaaggtgacccagcaggggctgaagatggtggtgcccggactggatggggcccagatcccccgggacccctcacagcaggaactgccccggctgttgtcggctgcctgcaggcttcagctcaacgggaacctgcagctggagctggcgcaggtgctggcccaggagaggcccaagctgccagaggaccctctgctcagcggcctcctggactccccggcactcaaggcctgcctggacactgccgtggagaacatgcccagcctgaagatgaaggtggtgctggctggccacggtcacctgtattcccgcatcccaggcctgctcagcccccatcccctgctgcagctgagctacacggccaccgaccgccacccccaggccctggaggctgcccaggccgagctgcagcagcacgacgttgcccagggccagtgggatcccgcagaccctgcccccagcgccctgggcagcgccgacctcctggtgtgcaactgtgctgtggctgccctcggggacccggcctcagctctcagcaacatggtggctgccctgagagaagggggctttctgctcctgcacacactgctccgggggcaccccctcggggacatcgtggccttcctcacctccactgagccgcagtatggccagggcatcctgagccaggacgcgtgggagagcctcttctccagggtgtcgctgcgcctggtgggcctgaagaagtccttctacggctccacgctcttcctgtgccgccggcccaccccgcaggacagccccatcttcctgccggtggacgataccagcttccgctgggtggagtctctgaagggcatcctggctgacgaagactcttcccggcctgtgtggctgaaggccatcaactgtgccacctcgggcgtggtgggcttggtgaactgtctccgccgagagcccggcgggaaccgcctccggtgtgtgctgctctccaacctcagcagcacctcccacgtcccggaggtggacccgggctccgcagaactgcagaaggtgttgcagggagacctggtgatgaacgtctaccgcgacggggcctggggggctttccgccacttcctgctggaggaggacaagcctgaggagccgacggcacatgcctttgtgagcaccctcacccggggggacctgtcctccatccgctgggtctgctcctcgctgcgccatgcccagcccacctgccctggcgcccagctctgcacggtctactacgcctccctcaacttccgcgacatcatgctggccactggcaagctgtcccctgatgccatcccagggaagtggacctcccaggacagcctgctaggtatggagttctcgggccgagacgccagcggcaagcgtgtgatgggactggtgcctgccaagggcctggccacctctgtcctgctgtcaccggacttcctctgggatgtgccttccaactggacgctggaggaggcggcctcggtgcctgtcgtctacagcacggcctactacgcgctggtggtgcgtgggcgggtgcgccccggggagacgctgctcatccactcgggctcgggcggcgtgggccaggccgccatcgccatcgccctcagtctgggctgccgcgtcttcaccaccgtggggtcggctgagaagcgggcgtacctccaggccaggttcccccagctcgacagcaccagcttcgccaactcccgggacacatccttcgagcagcatgtgctgtggcacacgggcgggaagggcgttgacctggtcttgaactccttggcggaagagaagctgcaggccagcgtgaggtgcttggctacgcacggtcgcttcctggaaattggcaaattcgacctttctcagaaccacccgctcggcatggctatcttcctgaagaacgtgacattccacggggtcctactggatgcgttcttcaacgagagcagtgctgactggcgggaggtgtgggcgcttgtgcaggccggcatccgggatggggtggtacggcccctcaagtgcacggtgttccatggggcccaggtggaggacgccttccgctacatggcccaagggaagcacattggcaaagtcgtcgtgcaggtgcttgcggaggagccggaggcagtgctgaagggggccaaacccaagctgatgtcggccatctccaagaccttctgcccggcccacaagagctacatcatcgctggtggtctgggtggcttcggcctggagttggcgcagtggctgatacagcgtggggtgcagaagctcgtgttgacttctcgctccgggatccggacaggctaccaggccaagcaggtccgccggtggaggcgccagggcgtacaggtgcaggtgtccaccagcaacatcagctcactggagggggcccggggcctcattgccgaggcggcgcagcttgggcccgtgggcggcgtcttcaacctggccgtggtcttgagagatggcttgctggagaaccagaccccagagttcttccaggacgtctgcaagcccaagtacagcggcaccctgaacctggacagggtgacccgagaggcgtgccctgagctggactactttgtggtcttctcctctgtgagctgcgggcgtggcaatgcgggacagagcaactacggctttgccaattccgccatggagcgtatctgtgagaaacgccggcacgaaggcctcccaggcctggccgtgcagtggggcgccatcggcgacgtgggcattttggtggagacgatgagcaccaacgacacgatcgtcagtggcacgctgccccagcgcatggcgtcctgcctggaggtgctggacctcttcctgaaccagccccacatggtcctgagcagctttgtgctggctgagaaggctgcggcctatagggacagggacagccagcgggacctggtggaggccgtggcacacatcctgggcatccgcgacttggctgctgtcaacctggacagctcactggcggacctgggcctggactcgctcatgagcgtggaggtgcgccagacgctggagcgtgagctcaacctggtgctgtccgtgcgcgaggtgcggcaactcacgctccggaaactgcaggagctgtcctcaaaggcggatgaggccagcgagctggcatgccccacgcccaaggaggatggtctggcccagcagcagactcagctgaacctgcgctccctgctggtgaacccggagggccccaccctgatgcggctcaactccgtgcagagctcggagcggcccctgttcctggtgcacccaatcgagggctccaccaccgtgttccacagcctggcctcccggctcagcatccccacctatggcctgcagtgcacccgagctgcgccccttgacagcatccacagcctggctgcctactacatcgactgcatcaggcaggtgcagcccgagggcccctaccgcgtggccggctactcctacggggcctgcgtggcctttgaaatgtgctcccagctgcaggcccagcagagcccagcccccacccacaacagcctcttcctgttcgacggctcgcccacctacgtactggcctacacccagagctaccgggcaaagctgaccccaggctgtgaggctgaggctgagacggaggccatatgcttcttcgtgcagcagttcacggacatggagcacaacagggtgctggaggcgctgctgccgctgaagggcctagaggagcgtgtggcagccgccgtggacctgatcatcaagagccaccagggcctggaccgccaggagctgagctttgcggcccggtccttctactacaagctgcgtgccgctgagcagtacacacccaaggccaagtaccatggcaacgtgatgctactgcgcgccaagacgggtggcgcctacggcgaggacctgggcgcggactacaacctctcccaggtatgcgacgggaaagtatccgtccacgtcatcgagggtgaccaccgcacgctgctggagggcagcggcctggagtccatcatcagcatcatccacagctccctggctgagccacgcgtgagcgtgcgggagggctaggcccgtgcccccgcctgccaccggaggtcactccaccatccccaccccaccccaccccacccccgccatgcaacgggattgaagggtcctgccggtgggaccctgtccggcccagtgccactgccccccgaggctgctagatgtaggtgttaggcatgtcccacccacccgccgcctcccacggcacctcggggacaccagagctgccgacttggagactcctggtctgtgaagagccggtggtgcccgtgcccgcaggaactgggctgggcctcgtgcgcccgtggggtctgcgcttggtctttctgtgcttggatttgcatatttattgcattgctggtagagacccccaggcctgtccaccctgccaagactcctcaggcagcgtgtgggtcccgcactctgcccccatttccccgatgtcccctgcgggcgcgggcagccacccaagcctgctggctgcggccccctctcggccaggcattggctcagcccgctgagtggggggtcgtgggccagtccccgaggagctgggcccctgcacaggcacacagggcccggccacacccagcggccccccgcacagccacccgtggggtgctgcccttatgcccggcgccgggcaccaactccatgtttggtgtttgtctgtgtttgtttttcaagaaatgattcaaattgctgcttggattttgaaatttactgtaactgtcagtgtacacgtctggaccccgtttcatttttacaccaatttggtaaaaatgctgctctcagcctcccacaattaaaccgcatgtgatctc

SEQ ID NO: 133375 - DNA, 627 bp, Homo sapiens
  Payload ID: 6068
  Gene Symbol: FASN
  Gene Name: fatty acid synthase
  ENST ID: ENST00000635197
  CDS Start-End: 177-627
gtggcgtggccgcccggggatggccgcggtttaaatagcgtcggcgccggcctagagggagccagagagacggcagcggccccggcctccctctccgccgcgcttcagcctcccgctccgccgcgctccagcctcgctctccgccgcccgcaccgccgcccgcgccctcaccagccatggaggaggtggtgattgccggcatgtccgggaagctgccagagtcggagaacttgcaggagttctgggacaacctcatcggcggtgtggacatggtcacggacgatgaccgtcgctggaaggcggggctctacggcctgccccggcggtccggcaagctgaaggacctgtctaggtttgatgcctccttcttcggagtccaccccaagcaggcacacacgatggaccctcagctgcggctgctgctggaagtcacctatgaagccatcgtggacggaggcatcaacccagattcactccgaggaacacacactggcgtctgggtgggcgtgagcggctctgagacctcggaggccctgagccgagaccccgagacactcgtgggctacagcatggtgggctgccagcgagcgatgatggccaaccggctctccttcttcttcgacttca

SEQ ID NO: 133376 - DNA, 5264 bp, Homo sapiens
  Payload ID: 6069
  Gene Symbol: FAR1
  Gene Name: fatty acyl CoA reductase 1
  Uniprot ID: Q8WVX9
  ENST ID: ENST00000354817
  CDS Start-End: 145-1692
cactgcccgtccgctcttcagcagccggtcgcgggcggtggaaaagcgagtgaagagagcgcgacggcggcggcggcggcggcgcagctattgctggacggccagtgggagagcgaggcctgagcctctgcgtctaggatcaaaatggtttcaatcccagaatactatgaaggcaagaacgtcctcctcacaggagctaccggttttctagggaaggtgcttctggaaaagttgctgaggtcttgtcctaaggtgaattcagtatatgttttggtgaggcagaaagctggacagacaccacaagagcgagtggaagaagtccttagtggcaagctttttgacagattgagagatgaaaatccagattttagagagaaaattatagcaatcaacagcgaactcacccaacctaaactggctctcagtgaagaagataaagaggtgatcatagattctaccaatattatattccactgtgcagctacagtaaggtttaatgaaaatttaagagatgctgttcagttaaatgtgattgcaacgcgacagcttattctccttgcacaacaaatgaagaatctggaagtgttcatgcatgtatcaacagcatatgcctactgtaatcgcaagcatattgatgaagtagtctatccaccacctgtggatcccaagaagctgattgattctttagagtggatggatgatggcctagtaaatgatatcacgccaaaattgataggagacagacctaatacatacatatacacaaaagcattggcagaatatgttgtacaacaagaaggagcaaaactaaatgtggcaattgtaaggccatcgattgttggtgccagttggaaagaaccttttccaggatggattgataactttaatggaccaagtggtctctttattgcggcagggaaaggaattcttcgaacaatacgtgcctccaacaatgcccttgcagatcttgttcctgtagatgtagttgtcaacatgagtcttgcggcagcctggtattccggagttaatagaccaagaaacatcatggtgtataattgtacaacaggcagcactaatcctttccactggggtgaagttgagtaccatgtaatttccactttcaagaggaatcctctcgaacaggccttcagacggcccaatgtaaatctaacctccaatcatcttttatatcattactggattgctgtaagccataaggccccagcattcctgtatgatatctacctcaggatgactggaagaagcccaaggatgatgaaaacaataactcgtcttcacaaagctatggtgtttcttgaatatttcacaagtaattcttgggtttggaatactgagaatgtcaatatgttaatgaatcaactaaaccctgaagataaaaagaccttcaatattgatgtacggcagttacattgggcagaatatatagagaactactgcttgggaactaagaagtacgtattgaatgaagaaatgtctggcctccctgcagccagaaaacatctgaacaagttgcggaatatacgttatggttttaatactatccttgtgatcctcatctggcgcatttttattgcaagatcacaaatggcaagaaatatctggtactttgtggttagtctgtgttacaagtttttgtcatacttccgagcatccagcactatgagatactgaagaccaaggattcagcattagaacatctatacatatggtgatctaaatgtacaaaatgtaaaatgtataagtcatctcactttttgtcaagacattaaaccatcttagatcggagtgtgaagtaaattatggtatattttatgtaacattttaatgtttatgctcataaaacttagtgaacacactgtgttatgccagctcaaatctacagtagccaccaaaaccatgacttaatattttgagccctagaagaaaggggtgtgctgaggacaagagtggggaaataggaacactgaccagtataactgtgcaattctggaacatattaattaaaataatatgccttaacatatagtgaatttctaattctaatgttcagtgcaatggaagacatttatttggacagtaatactagcaaagttggtagatatttgattcttcattttttgtttttttcattagttgaagtgggttttagttttgtttaaaattataaccagcgtattttcacatcattctgtaagttaaatgatatcaaacatgaaagagatgttctcatttttctttttctgattaaacgtctgatgcatatcatttttctataagtaatcagttgcttttaaaatcagaaggctatattattctaatgaccctattcgatctaaatgggtttgagaatccatatcagcaacatacgtgttttttgacagaaagtgaaaacaaattccgtaaaactgttagtatcaaaaagaataggaatacagttttcttttccacattatgatcaaataaaaatcttgtgagattgtttatgttttgaagcaggaggatttcttgagatttgatggaagtgggagttgggaaggattcaccatacttgtgttctcctccctttataaattttattcataggacttttaaaaggcttgtgctatctttccagtgaaaactgaaagtgcattattatggaagaatgtatttgcaggtagtaatagcattaaaaaatatactcgtgtgtaaacacatactaattttgaccttgaaagatgaattccttcaagaaaaataaaataatgcttaagataatgtgtacgaaattaaataaaggactttatttacatactacataaggtagcaaactgttgaatgagtttgaaggtatcacttattttttatgcatgtgattttagctttagaaagaaatgcgttatagaaacaagtaatagcaagaaaattgatgtatattttaatgatacattaaaattcccttttaatcataatagttaactctacttactgttttaacatacatttgatttaacaaattgttcagcataacacttctaattaagtttatcaagttgtactgtattagataatcagcagtgtatctggagtatgtttaaagagaacagttcgcaatacaaaaagttacatggagctttacatcttaactttctttgtcaatttaaatgcaatgtataaaaagtttattttgctattgtgaaaaactaaatgtaaaggaaatcacctactttcatgcaggtgtataatcttgaaaaggaaaaatgcttccatgttgaagccagattttctgtagtaaaacttttaaatattattttaaaagaaatatgtatataaatatctctatattctttggaatgatactaaagtctctggtctaggaccataccttatataaaggtataagagaccatgacaatgtctgaaaatggaatagataatgatgccttttatttaaagtggcccacataatatacattgagtactccatctctccaaatgtatttccataatgtgttgaaaacatgctaacatttgtatgatttttatacttctgccgaatagacttagaatcagatgaattgtctgtgtgtcttgcaaaagagttggggacaacttgggcaggcctatgaagtgcatagggagtgtatgtcttctgaatggttttattgttcttgtaatctagcttaaagaaatgttaactgggagggtgctgaggccactcactgcattaattttgtgtgtttagagttctgttgtcaaaagaaaactaatgaataaattagtttgtcattctagaatttaaagttctaagattagtataaagagtatatagattgttaatccccaccagctagactttgaacttaagtcagacttaaagatttgagaaattatttgtgtcatttactagacgtgatttttagttctgtttgattatatttcctacacaaacttcttatttaacaggatagcctactaaattaaatgtttcttatttcacttaactcatttgattaaactgtattctaaaacatttggggtttttccccctattcagttttaatcttggaatatgcatttgtaaattgtgatgtcattgagactatatttatatttgacttggcaacattaacatgtcctaagacttagtgcagagaagcttggcagtacgttctttgacttaaggatggcataaaataatcatttttgaacctgtgtaataaagcttgaaagcagggaaaagaatttccttttcccccttttttgtgttgtctataggaattaacttgggattgttttgtgggtttttgtttgttttaaatgtaaattgagaatcttttataagaaataaaagcattattgggtgcctttgtttgtaaaccaaaaagtaataaatgaatccctatatttccattatagtatttattgtatttttatgttctgaaaattacccatggaacaatatgcttaggattacaggaagcagtccttacttacacttcttgtctgttttaggtgtacttgttaattcttatgtcctaattttatttaattctgagttccttacacagcattttagggaaagaatacaggcaggatgacactttgtgttaaagtgttatttttatgtattacctggaatgaggcaggtttttttctgttttctaaaaagagtaaccaagatacctccagggtgtcattgggttccagctgctctcctccacattgaatgatatcttgttaatttataggcacatttgtggtaatttatatgtctatagagtaagtataagagataattcattagtaataggaattaactgaccccttttggatgggggagagcatcaggctggggtcaggtaagtgtaaatggccttctgagcatgctcttctaggctgactcccagccctgacttgaaaccattagcgctaacttgctctgttttgagaaaaactttccaaacttttgcatgagaaactagaaaaaggaatgtatgccacgtaactggattacagaaatgagttaattgtctctgtgataaaaaaaaaaaatgaaatattttcttattgaattaatatttttgtcttgaagcattttctagtgatagaatgtatttgtcttttttcctggtggtaccctcttagcatatatctttgctatccttaagatcctaaacaaatcatctttgtcagttaagtatagttgcgcaaaaattgttaaatcctttgtctttattaaagaaaaatttgagtaacattaa

SEQ ID NO: 133377 - DNA, 5820 bp, Homo sapiens
  Payload ID: 6069
  Gene Symbol: FAR1
  Gene Name: fatty acyl CoA reductase 1
  ENST ID: ENST00000532502
  CDS Start-End: 1829-2248
agttgccataataaagaataaatacatattcagaacatacctggcaatgtagtcataaacatctgttctaaggtatgtttaaccaaggagtgatggtgcaaagttttacatttcttattccccaatagttttcaatccagtatttttgttgcatgataaatattctataaatttcacacacaaatatatggcctttcaaatttcttccccctccccgattttttattgcaattattttttgaatggctgaattactgattgatgttagggtgattgtgtcacttgaatgaatctgaagataagattaggtgagagaattatcagtgaacaagagttaagaaaaactttttaataaggtatatataggaaaaccgtgttagctgtgtgtgtgtgtgagatttaagtatgctaaactggcgtgatagtatatattgatgtagtgacaaacttgttgtatctttttgtttagaaaaaaataatcacctaatcttttctaagagcagcatgtgtttttcccccagatgctttttatctacagaactatccctgtccagaaattgccttagatgcttgataattcgttttgtgtttgagattttattttgaagttactttattggatgaaatatagtttttttttacatagtttatattgcttcattttcttccagtattctggattcagagtttatttctaaatgtattgaattgtgttatcagaagtgcttagctaatgatacttttttgatttttttctccttatttctaatgtaatttccctccatgcccctcccatttctaaaacccctaattttgagactgtctaaactacatgatacatataatcctaatcgttattataatataaatgaaatctttaaaaagtacttctccaaaaattctttttctgttcacagaagtggggatttttttggtgtttgttttgtttcagaaagttctttcttccctttccctacttataataaatattattgtatagatgttactgctcaagttagtgttatgatatcaatgacttacagtgagccatgatatataaaatgacagatttaaagattaaagctccttgtacttttaaaaacaaagaatcacagtctttctttaaagacacactttaaaaagagtgtcacactcctttatttctgtaaggatgagtattggtggggtatggagaggtgagtggatatctatttcagatagttttcagcatgagtcattgatttcacagcacatccagatgatcaagagtggtgccaatcattgttaaagaaaagttgttttgtttttttaaatgaatagagttgactatgtggcaaacgaatatttctgtattgtttgcttcagcagtgctgaagagttggaattataaatataacacagtatgttattaattcacaggaaatcttagcaaatgcagctgtgaattaaaatgtagtttaaggaatagaaagcaaggaaatattaattgaatccattcatttgcttagtattttatgtagaaaatttaagagtattgtataccctttgagaattaattctgtatatcagcagaactctgtttaggtggtattaaatgcatttgctgctgctttcaaaaaaaatttgttttccttttggatttataaattgttcatccaagatgcagaaatagtcttattccctgctgatttggtacacttaatgattaaatgttataattttaatactaatgtctatattatagggggaaacttgcaccctgggtggtgataggatttttcctaatctatacaaaatatgaatctgtccatttttcttacaatacaggatgatgaaaacaataactcgtcttcacaaagctatggtgtttcttgaatatttcacaagtaattcttgggtttggaatactgagaatgtcaatatgttaatgaatcaactaaaccctgaagataaaaagaccttcaatattgatgtacggcagttacattgggcagaatatatagagaactactgcttgggaactaagaagtacgtattgaatgaagaaatgtctggcctccctgcagccagaaaacatctgaacaagttgcggaatatacgttatggttttaatactatccttgtgatcctcatctggcgcatttttattgcaagatcacaaatggcaagaaatatctggtactttgtggttagtctgtgttacaagtttttgtcatacttccgagcatccagcactatgagatactgaagaccaaggattcagcattagaacatctatacatatggtgatctaaatgtacaaaatgtaaaatgtataagtcatctcactttttgtcaagacattaaaccatcttagatcggagtgtgaagtaaattatggtatattttatgtaacattttaatgtttatgctcataaaacttagtgaacacactgtgttatgccagctcaaatctacagtagccaccaaaaccatgacttaatattttgagccctagaagaaaggggtgtgctgaggacaagagtggggaaataggaacactgaccagtataactgtgcaattctggaacatattaattaaaataatatgccttaacatatagtgaatttctaattctaatgttcagtgcaatggaagacatttatttggacagtaatactagcaaagttggtagatatttgattcttcattttttgtttttttcattagttgaagtgggttttagttttgtttaaaattataaccagcgtattttcacatcattctgtaagttaaatgatatcaaacatgaaagagatgttctcatttttctttttctgattaaacgtctgatgcatatcatttttctataagtaatcagttgcttttaaaatcagaaggctatattattctaatgaccctattcgatctaaatgggtttgagaatccatatcagcaacatacgtgttttttgacagaaagtgaaaacaaattccgtaaaactgttagtatcaaaaagaataggaatacagttttcttttccacattatgatcaaataaaaatcttgtgagattgtttatgttttgaagcaggaggatttcttgagatttgatggaagtgggagttgggaaggattcaccatacttgtgttctcctccctttataaattttattcataggacttttaaaaggcttgtgctatctttccagtgaaaactgaaagtgcattattatggaagaatgtatttgcaggtagtaatagcattaaaaaatatactcgtgtgtaaacacatactaattttgaccttgaaagatgaattccttcaagaaaaataaaataatgcttaagataatgtgtacgaaattaaataaaggactttatttacatactacataaggtagcaaactgttgaatgagtttgaaggtatcacttattttttatgcatgtgattttagctttagaaagaaatgcgttatagaaacaagtaatagcaagaaaattgatgtatattttaatgatacattaaaattcccttttaatcataatagttaactctacttactgttttaacatacatttgatttaacaaattgttcagcataacacttctaattaagtttatcaagttgtactgtattagataatcagcagtgtatctggagtatgtttaaagagaacagttcgcaatacaaaaagttacatggagctttacatcttaactttctttgtcaatttaaatgcaatgtataaaaagtttattttgctattgtgaaaaactaaatgtaaaggaaatcacctactttcatgcaggtgtataatcttgaaaaggaaaaatgcttccatgttgaagccagattttctgtagtaaaacttttaaatattattttaaaagaaatatgtatataaatatctctatattctttggaatgatactaaagtctctggtctaggaccataccttatataaaggtataagagaccatgacaatgtctgaaaatggaatagataatgatgccttttatttaaagtggcccacataatatacattgagtactccatctctccaaatgtatttccataatgtgttgaaaacatgctaacatttgtatgatttttatacttctgccgaatagacttagaatcagatgaattgtctgtgtgtcttgcaaaagagttggggacaacttgggcaggcctatgaagtgcatagggagtgtatgtcttctgaatggttttattgttcttgtaatctagcttaaagaaatgttaactgggagggtgctgaggccactcactgcattaattttgtgtgtttagagttctgttgtcaaaagaaaactaatgaataaattagtttgtcattctagaatttaaagttctaagattagtataaagagtatatagattgttaatccccaccagctagactttgaacttaagtcagacttaaagatttgagaaattatttgtgtcatttactagacgtgatttttagttctgtttgattatatttcctacacaaacttcttatttaacaggatagcctactaaattaaatgtttcttatttcacttaactcatttgattaaactgtattctaaaacatttggggtttttccccctattcagttttaatcttggaatatgcatttgtaaattgtgatgtcattgagactatatttatatttgacttggcaacattaacatgtcctaagacttagtgcagagaagcttggcagtacgttctttgacttaaggatggcataaaataatcatttttgaacctgtgtaataaagcttgaaagcagggaaaagaatttccttttcccccttttttgtgttgtctataggaattaacttgggattgttttgtgggtttttgtttgttttaaatgtaaattgagaatcttttataagaaataaaagcattattgggtgcctttgtttgtaaaccaaaaagtaataaatgaatccctatatttccattatagtatttattgtatttttatgttctgaaaattacccatggaacaatatgcttaggattacaggaagcagtccttacttacacttcttgtctgttttaggtgtacttgttaattcttatgtcctaattttatttaattctgagttccttacacagcattttagggaaagaatacaggcaggatgacactttgtgttaaagtgttatttttatgtattacctggaatgaggcaggtttttttctgttttctaaaaagagtaaccaagatacctccagggtgtcattgggttccagctgctctcctccacattgaatgatatcttgttaatttataggcacatttgtggtaatttatatgtctatagagtaagtataagagataattcattagtaataggaattaactgaccccttttggatgggggagagcatcaggctggggtcaggtaagtgtaaatggccttctgagcatgctcttctaggctgactcccagccctgacttgaaaccattagcgctaacttgctctgttttgagaaaaactttccaaacttttgcatgagaaactagaaaaaggaatgtatgccacgtaactggattacagaaatgagttaattgtctctgtgataaaaaaaaaaaatgaaatattttcttattgaattaatatttttgtcttgaagcattttctagtgatagaatgtatttgtcttttttcctggtggtaccctcttagcatatatctttgctatccttaagatcctaaacaaatcatctttgtcagttaagtatagttgcgcaaaaattgttaaatcctttgtctttattaaagaaaaatttgagtaacattaa

SEQ ID NO: 133378 - DNA, 1109 bp, Homo sapiens
  Payload ID: 6069
  Gene Symbol: FAR1
  Gene Name: fatty acyl CoA reductase 1
  ENST ID: ENST00000532701
  CDS Start-End: 104-1109
aaaagcgagtgaagagagcgcgacggcggcggcggcggcggcgcagctattgctggacggccagtgggagagcgaggcctgagcctctgcgtctaggatcaaaatggtttcaatcccagaatactatgaaggcaagaacgtcctcctcacaggagctaccggttttctagggaaggtgcttctggaaaagttgctgaggtcttgtcctaaggtgaattcagtatatgttttggtgaggcagaaagctggacagacaccacaagagcgagtggaagaagtccttagtggcaagctttttgacagattgagagatgaaaatccagattttagagagaaaattatagcaatcaacagcgaactcacccaacctaaactggctctcagtgaagaagataaagaggtgatcatagattctaccaatattatattccactgtgcagctacagtaaggtttaatgaaaatttaagagatgctgttcagttaaatgtgattgcaacgcgacagcttattctccttgcacaacaaatgaagaatctggaagtgttcatgcatgtatcaacagcatatgcctactgtaatcgcaagcatattgatgaagtagtctatccaccacctgtggatcccaagaagctgattgattctttagagtggatggatgatggcctagtaaatgatatcacgccaaaattgataggagacagacctaatacatacatatacacaaaagcattggcagaatatgttgtacaacaagaaggagcaaaactaaatgtggcaattgtaaggccatcgattgttggtgccagttggaaagaaccttttccaggatggattgataactttaatggaccaagtggtctctttattgcggcagggaaaggaattcttcgaacaatacgtgcctccaacaatgcccttgcagatcttgttcctgtagatgtagttgtcaacatgagtcttgcggcagcctggtattccggagttaatagaccaagaaacatcatggtgtataattgtacaacaggcagcactaatcctttccactggggtgaagttggtatgattttacctgtgtttttgaatgttagaataaatcttaaagaaccaa

SEQ ID NO: 133379 - DNA, 2095 bp, Homo sapiens
  Payload ID: 6070
  Gene Symbol: FAR2
  Gene Name:: fatty acyl CoA reductase 2
  Uniprot ID: Q96K12
  ENST ID: ENST00000182377
  CDS Start-End: 269-1816
cacagagcctttcaattcagcttggggtgagctgcacttcaggcatggggatataatagtgtgatgaaccattcttctgaaggttcttctgaaaagctgctggtcttgggatactgtgagagcccctctcattgctctttagaagtaatttaaatttttctgctacattgtctgctcagctcgtattctggtcatagaggaacctgaagccagagaaactagacaaaaaggaacctctttcaggagctataaaagaaagggaggaatcatgtccacaattgcagctttctatggcggcaagtccattctcatcacgggggccacaggctttctgggcaaagtgctgatggagaagctgtttcgcaccagcccagacctgaaagtcatttacatccttgtgaggcccaaggctggccagacactgcagcagagggttttccagatcctagacagtaagctatttgagaaagtcaaagaagtttgtccaaatgtgcatgagaagatcagagctatttatgcagatctcaatcagaatgactttgccatcagcaaagaggacatgcaggagcttctctcctgtacaaacataatatttcactgtgcagccactgtacgctttgacgacactctcagacatgctgtgcaacttaacgtcactgccacccggcagctcttgcttatggctagtcagatgccaaagctggaagcctttatacatatctctactgcctattcaaattgtaacctgaagcacatcgatgaagttatctatccgtgccctgtggagccaaaaaaaatcattgattcccttgagtggttagacgatgctattattgacgagattacacccaagctgatcagagattggcccaatatttatacctacaccaaggccttgggagaaatggtggtgcagcaagagagcaggaacctgaacattgccatcataaggccctccattgtgggagcaacttggcaggagcctttcccaggttgggttgataatataaatggacctaatggaatcattattgcgactgggaaagggtttcttcgggccataaaagctactccaatggctgtggcagacgtaattccagttgatacagtcgtcaatctcatgctagctgtaggatggtatactgcagttcacagacctaagtcaacattagtctaccacattacatctggtaacatgaatccctgcaattggcacaaaatgggagtccaagtcttggcaacctttgaaaaaatcccatttgagagacctttcaggaggccaaatgctaattttaccagcaacagcttcacatcacagtactggaatgcggtcagccaccgggcccctgccattatctatgactgctatctgcggctcactggaaggaagcccaggatgacaaagctcatgaatcggcttttaagaactgtttccatgttggagtatttcatcaaccggagttgggaatggagcacgtacaatacagaaatgctgatgtctgagctgagtcctgaagaccagagagtattcaactttgacgtgcgccagttgaactggttggaatacattgaaaattatgttttgggagttaaaaaatacttattgaaagaggatatggctgggatcccaaaagcaaagcaacgcttaaaaaggctccgaaatattcactacctctttaatactgccctcttccttatcgcctggcgccttctcattgcaagatctcagatggctcggaatgtctggttcttcattgtaagcttctgttataaattcctctcctactttagagcatccagcacgctcaaagtttaagagcatttagccatcgctttttatctggaacctctcagatacctctaaaacagcaaactgtgattctcaagattagaaagtaacaaggaatatgcccaaactgtcaaatgtcacctgttatgtattcgtccctattccttaactatgtatttttatttcagtgagagaaggaaagttgtaaactagcccatagtcacctatattttagggaaaaaaatccaaattgtttcctaacattctattttatgcccttgcgtattaaacgtgaaagtactccca

SEQ ID NO: 133380 - DNA, 3616 bp, Homo sapiens
  Payload ID: 6070
  Gene Symbol: FAR2
  Gene Name: fatty acyl CoA reductase 2
  Uniprot ID: Q96K12
  ENST ID: ENST00000536681
  CDS Start-End: 247-1794
ggcagcggcggagccggggaaggtcggagggagggtggtttcctcccgccccacacccagtctccgagccggatatatagagtgtcacgtttgggagccgaaagactggagccgtttccttgtggctggagcgcttcccgtagcctcggggaaggagcaggatttagaggaccactagttggaccccatcctcgtgctggaggaacaggaacctctttcaggagctataaaagaaagggaggaatcatgtccacaattgcagctttctatggcggcaagtccattctcatcacgggggccacaggctttctgggcaaagtgctgatggagaagctgtttcgcaccagcccagacctgaaagtcatttacatccttgtgaggcccaaggctggccagacactgcagcagagggttttccagatcctagacagtaagctatttgagaaagtcaaagaagtttgtccaaatgtgcatgagaagatcagagctatttatgcagatctcaatcagaatgactttgccatcagcaaagaggacatgcaggagcttctctcctgtacaaacataatatttcactgtgcagccactgtacgctttgacgacactctcagacatgctgtgcaacttaacgtcactgccacccggcagctcttgcttatggctagtcagatgccaaagctggaagcctttatacatatctctactgcctattcaaattgtaacctgaagcacatcgatgaagttatctatccgtgccctgtggagccaaaaaaaatcattgattcccttgagtggttagacgatgctattattgacgagattacacccaagctgatcagagattggcccaatatttatacctacaccaaggccttgggagaaatggtggtgcagcaagagagcaggaacctgaacattgccatcataaggccctccattgtgggagcaacttggcaggagcctttcccaggttgggttgataatataaatggacctaatggaatcattattgcgactgggaaagggtttcttcgggccataaaagctactccaatggctgtggcagacgtaattccagttgatacagtcgtcaatctcatgctagctgtaggatggtatactgcagttcacagacctaagtcaacattagtctaccacattacatctggtaacatgaatccctgcaattggcacaaaatgggagtccaagtcttggcaacctttgaaaaaatcccatttgagagacctttcaggaggccaaatgctaattttaccagcaacagcttcacatcacagtactggaatgcggtcagccaccgggcccctgccattatctatgactgctatctgcggctcactggaaggaagcccaggatgacaaagctcatgaatcggcttttaagaactgtttccatgttggagtatttcatcaaccggagttgggaatggagcacgtacaatacagaaatgctgatgtctgagctgagtcctgaagaccagagagtattcaactttgacgtgcgccagttgaactggttggaatacattgaaaattatgttttgggagttaaaaaatacttattgaaagaggatatggctgggatcccaaaagcaaagcaacgcttaaaaaggctccgaaatattcactacctctttaatactgccctcttccttatcgcctggcgccttctcattgcaagatctcagatggctcggaatgtctggttcttcattgtaagcttctgttataaattcctctcctactttagagcatccagcacgctcaaagtttaagagcatttagccatcgctttttatctggaacctctcagatacctctaaaacagcaaactgtgattctcaagattagaaagtaacaaggaatatgcccaaactgtcaaatgtcacctgttatgtattcgtccctattccttaactatgtatttttatttcagtgagagaaggaaagttgtaaactagcccatagtcacctatattttagggaaaaaaatccaaattgtttcctaacattctattttatgcccttgcgtattaaacgtgaaagtactcccacttttctatatttagtttttcttttctctctgagatgattcatttaaactcagtaaatatggaaagatgcatggcagaagctgaaatgagctcaagcagtactaaccttggaaccattctgggtacccaaaagaaaaatttaaaatcaagatgagtaaaaggagaatggtctcaatatcctcaaaaatgcagtaagagaagtaattccccactgaaaatgtctctctttctttctatgttataccctggagtcctggttgaggggtgggggaatcagaaaagtaggtttacatttaacatttttcttaactacattcacttcttaaaaaggaacaagaagtgtaaataagtatgtatagagtgagggattaagcatatttgcattggggactcgtgtattatgcttttaagtcaaaattaatattctcaaattcgaatttgatagctattatttctaaatctttttaatcctcaattttcctggtaaccttctttcaagagtctccttcttctaaaagttgccaaaccctttatatttaagctttttccactcaggactcaattagagtggtcaacagggagagggatggtcccatttgatctttgccactgagcaaaacaaaacttcaaatgaacttttaaactgtagctttagtcttctggtataaagtggggaagattacacttatgtgatcaccaaaggatttactagtatcttggtcattccaattgcacaatgttaactgtacaacacacagcagaaaagtgaatagacttcactaagggattctaagtttagaaaataggttttgttttcttaaaaaattttgtgtataatacaaactaatgaaaactatacatattctccaattcctatagtaataataatgtaactgttacaccaactttcctcatatttgagagatgagtacatgttggattgcagcatttcttcatgttaaaaacatggaatattattcaaatatagtacttggggcctaaacaactaaaattagtcaccgcataactagttgaaaatggcataggcataaaatgttaataaagaatggcagttatatttatgctcacttcctggagtaattgggtaatattcagaaaggcacatcgtggtagtttaagtgtacaaggccttagggcagtatctagcccagtattattccagattctcctgagctctatataaagggcattttggaggaactcttctgggcaatatctttcccaatctcatctaaattctgggaaatattttccatagcagacaacccagctctgaaactaagcacctggtgatctttagtttgagatgtctatatggtacttttgagttatatcaattaagatacaagctatagacatgataaaaatatgaaatcaagatatagctcagtgggattggattaagacataataatagttctaagaattcacttttgattgtatgttttaccaattcaataattccactaatcaagtattcacattttgacttttgattaaataaaaatttgaattaaaatta

SEQ ID NO: 133381 - DNA, 545 bp, Homo sapiens
  Payload ID: 6070
  Gene Symbol: FAR2
  Gene Name: fatty acyl CoA reductase 2
  ENST ID: ENST00000547759
  CDS Start-End: 1-68
atatggctgggatcccaaaagcaaagcaacgcttaaaaaggtcctgcactccatactctaccctgtaacacagtttcatttagacttcaccacacctctatgaggctccgaaatattcactacctctttaatactgccctcttccttatcgcctggcgccttctcattgcaagatctcagatggctcggaatgtctggttcttcattgtaagcttctgttataaattcctctcctactttagagcatccagcacgctcaaagtttaagagcatttagccatcgctttttatctggaacctctcagatacctctaaaacagcaaactgtgattctcaagattagaaagtaacaaggaatatgcccaaactgtcaaatgtcacctgttatgtattcgtccctattccttaactatgtatttttatttcagtgagagaaggaaagttgtaaactagcccatagtcacctatattttagggaaaaaaatccaaattgtttcctaacattctattttatgcccttgcgtattaaacgtgaaagtactccc

SEQ ID NO: 133382 - DNA, 425 bp, Homo sapiens
  Payload ID: 6070
  Gene Symbol: FAR2
  Gene Name: fatty acyl CoA reductase 2
  ENST ID: ENST00000551193
  CDS Start-End: 1-258
ctgagtcctgaagaccagagagtattcaactttgacgtgcgccagttgaactggttggaatacattgaaaattatgttttgggagttaaaaaatacttattgaaagaggatatggctgggatcccaaaagcaaagcaacgcttaaaaaggctccgaaatattcactacctctttaatactgccctcttccttatcgcctggcgccttctcattgcaagatctcagatggctcggaatgtctggttcttcattatgtagtttcacttatttccttcaggctttttatcagcaagaagcaatgtctgattttgataccacccatttgctatgaaaatataagaaggcgtcatcttcaaagcaacactccagttgggcttcttcatcgtttagctgcatgatttcttctacgacatttgtaacagaca

SEQ ID NO: 133383 - DNA, 1787 bp, Homo sapiens
  Payload ID: 6070
  Gene Symbol: FAR2
  Gene Name: fatty acyl CoA reductase 2
  Uniprot ID: Q96K12
  ENST ID: ENST00000547116
  CDS Start-End: 253-1509
aggttcttctgaaaagctgctggtcttgggatactgtgagagcccctctcattgctctttagaagtaatttaaatttttctgctacattgtctgctcagctcgtattctggtcatagaggaacctgaagccagagaaactagacaaaaagctatttgagaaagtcaaagaagtttgtccaaatgtgcatgagaagatcagagctatttatgcagatctcaatcagaatgactttgccatcagcaaagaggacatgcaggagcttctctcctgtacaaacataatatttcactgtgcagccactgtacgctttgacgacactctcagacatgctgtgcaacttaacgtcactgccacccggcagctcttgcttatggctagtcagatgccaaagctggaagcctttatacatatctctactgcctattcaaattgtaacctgaagcacatcgatgaagttatctatccgtgccctgtggagccaaaaaaaatcattgattcccttgagtggttagacgatgctattattgacgagattacacccaagctgatcagagattggcccaatatttatacctacaccaaggccttgggagaaatggtggtgcagcaagagagcaggaacctgaacattgccatcataaggccctccattgtgggagcaacttggcaggagcctttcccaggttgggttgataatataaatggacctaatggaatcattattgcgactgggaaagggtttcttcgggccataaaagctactccaatggctgtggcagacgtaattccagttgatacagtcgtcaatctcatgctagctgtaggatggtatactgcagttcacagacctaagtcaacattagtctaccacattacatctggtaacatgaatccctgcaattggcacaaaatgggagtccaagtcttggcaacctttgaaaaaatcccatttgagagacctttcaggaggccaaatgctaattttaccagcaacagcttcacatcacagtactggaatgcggtcagccaccgggcccctgccattatctatgactgctatctgcggctcactggaaggaagcccaggatgacaaagctcatgaatcggcttttaagaactgtttccatgttggagtatttcatcaaccggagttgggaatggagcacgtacaatacagaaatgctgatgtctgagctgagtcctgaagaccagagagtattcaactttgacgtgcgccagttgaactggttggaatacattgaaaattatgttttgggagttaaaaaatacttattgaaagaggatatggctgggatcccaaaagcaaagcaacgcttaaaaaggctccgaaatattcactacctctttaatactgccctcttccttatcgcctggcgccttctcattgcaagatctcagatggctcggaatgtctggttcttcattgtaagcttctgttataaattcctctcctactttagagcatccagcacgctcaaagtttaagagcatttagccatcgctttttatctggaacctctcagatacctctaaaacagcaaactgtgattctcaagattagaaagtaacaaggaatatgcccaaactgtcaaatgtcacctgttatgtattcgtccctattccttaactatgtatttttatttcagtgagagaaggaaagttgtaaactagcccatagtcacctatattttagggaaaaaaatccaaattgtttcctaacattctattttatgcccttgcgtattaaacgtgaaagtactccc

SEQ ID NO: 133384 - DNA, 803 bp, Homo sapiens
  Payload ID: 6070
  Gene Symbol: FAR2
  Gene Name: fatty acyl CoA reductase 2
  ENST ID: ENST00000552137
  CDS Start-End: 2-205
catgtccacaattgcagctttctatggcggcaagtccattctcatcacgggggccacaggctttctgggcaaagtgctgatggagaagctgtttcgcaccagcccagacctgaaagtcatttacatccttgtgaggcccaaggctggccagacactgcagcagagggttttccagatcctagacagtaagtttgaaagctactgatgcgaagattgctctgggcagttataaagggaaatgagttgtatgcagttattcatctgcaatgctatttgagaaagtcaaagaagtttgtccaaatgtgcatgagaagatcagagctatttatgcagatctcaatcagaatgactttgccatcagcaaagaggacatgcaggagcttctctcctgtacaaacataatatttcactgtgcagccactgtacgctttgacgacactctcagacatgctgtgcaacttaacgtcactgccacccggcagctcttgcttatggctagtcagatgccaaagctggaagcctttatacatatctctactgcctattcaaattgtaacctgaagcacatcgatgaagttatctatccgtgccctgtggagccaaaaaaaatcattgattcccttgagtggttagacgatgctattattgacgagattacacccaagctgatcagagattggcccaatatttatacctacaccaaggccttgggagaaatggtggtgcagcaagagagcaggaacctgaacattgccatcataaggccctccattgtgggagcaacttggcaggagcctttccca

SEQ ID NO: 133385 - DNA, 539 bp, Homo sapiens
  Payload ID: 6070
  Gene Symbol: FAR2
  Gene Name: fatty acyl CoA reductase 2
  ENST ID: ENST00000551451
  CDS Start-End: 408-539
gatgctgtcgcccccgcgacctgtagggccttcgctggcccctcaccctcctcccgccccgggctgaggctgccgccggtttcgcgcccagtgccgaggcagcggcggagccggggaaggtcggagggagggtggtttcctcccgccccacacccagtctccgagccggatatatagagtgtcacgtttgggagccgaaagactggagccgtttccttgtggctggagcgcttcccgtagcctcggggaaggagcaggatttagaggaccactagttggaccccatcctcgtgctggaggaacagctatttgagaaagtcaaagaagtttgtccaaatgtgcatgagaagatcagagctatttatgcagatctcaatcagaatgactttgccatcagcaaagaggacatgcaggagcttctctcctgtacaaacataatatttcactgtgcagccactgtacgctttgacgacactctcagacatgctgtgcaacttaacgtcactgccacccggcagctcttgcttatggctagtcag

SEQ ID NO: 133386 - DNA, 2158 bp, Homo sapiens
  Payload ID: 6071
  Gene Symbol: FOS
  Gene Name: FBJ murine osteosarcoma viral oncogene homolog
  Uniprot ID: P01100
  ENST ID: ENST00000303562
  CDS Start-End: 210-1352
actcattcataaaacgcttgttataaaagcagtggctgcggcgcctcgtactccaaccgcatctgcagcgagcatctgagaagccaagactgagccggcggccgcggcgcagcgaacgagcagtgaccgtgctcctacccagctctgctccacagcgcccacctgtctccgcccctcggcccctcgcccggctttgcctaaccgccacgatgatgttctcgggcttcaacgcagactacgaggcgtcatcctcccgctgcagcagcgcgtccccggccggggatagcctctcttactaccactcacccgcagactccttctccagcatgggctcgcctgtcaacgcgcaggacttctgcacggacctggccgtctccagtgccaacttcattcccacggtcactgccatctcgaccagtccggacctgcagtggctggtgcagcccgccctcgtctcctccgtggccccatcgcagaccagagcccctcaccctttcggagtccccgccccctccgctggggcttactccagggctggcgttgtgaagaccatgacaggaggccgagcgcagagcattggcaggaggggcaaggtggaacagttatctccagaagaagaagagaaaaggagaatccgaagggaaaggaataagatggctgcagccaaatgccgcaaccggaggagggagctgactgatacactccaagcggagacagaccaactagaagatgagaagtctgctttgcagaccgagattgccaacctgctgaaggagaaggaaaaactagagttcatcctggcagctcaccgacctgcctgcaagatccctgatgacctgggcttcccagaagagatgtctgtggcttcccttgatctgactgggggcctgccagaggttgccaccccggagtctgaggaggccttcaccctgcctctcctcaatgaccctgagcccaagccctcagtggaacctgtcaagagcatcagcagcatggagctgaagaccgagccctttgatgacttcctgttcccagcatcatccaggcccagtggctctgagacagcccgctccgtgccagacatggacctatctgggtccttctatgcagcagactgggagcctctgcacagtggctccctggggatggggcccatggccacagagctggagcccctgtgcactccggtggtcacctgtactcccagctgcactgcttacacgtcttccttcgtcttcacctaccccgaggctgactccttccccagctgtgcagctgcccaccgcaagggcagcagcagcaatgagccttcctctgactcgctcagctcacccacgctgctggccctgtgagggggcagggaaggggaggcagccggcacccacaagtgccactgcccgagctggtgcattacagagaggagaaacacatcttccctagagggttcctgtagacctagggaggaccttatctgtgcgtgaaacacaccaggctgtgggcctcaaggacttgaaagcatccatgtgtggactcaagtccttacctcttccggagatgtagcaaaacgcatggagtgtgtattgttcccagtgacacttcagagagctggtagttagtagcatgttgagccaggcctgggtctgtgtctcttttctctttctccttagtcttctcatagcattaactaatctattgggttcattattggaattaacctggtgctggatattttcaaattgtatctagtgcagctgattttaacaataactactgtgttcctggcaatagtgtgttctgattagaaatgaccaatattatactaagaaaagatacgactttattttctggtagatagaaataaatagctatatccatgtactgtagtttttcttcaacatcaatgttcattgtaatgttactgatcatgcattgttgaggtggtctgaatgttctgacattaacagttttccatgaaaacgttttattgtgtttttaatttatttattaagatggattctcagatatttatatttttattttatttttttctaccttgaggtcttttgacatgtggaaagtgaatttgaatgaaaaatttaagcattgtttgcttattgttccaagacattgtcaataaaagcatttaagttgaatgcga

SEQ ID NO: 133387 - DNA, 1402 bp, Homo sapiens
  Payload ID: 6071
  Gene Symbol: FOS
  Gene Name: FBJ murine osteosarcoma viral oncogene homolog
  Uniprot ID: P01100
  ENST ID: ENST00000535987
  CDS Start-End: 156-1190
aaccgcatctgcagcgagcatctgagaagccaagactgagccggcggccgcggcgcagcgaacgagcagtgaccgtgctcctacccagctctgctccacagcgcccacctgtctccgcccctcggcccctcgcccggctttgcctaaccgccacgatgatgttctcgggcttcaacgcagactacgaggcgtcatcctcccgctgcagcagcgcgtccccggccggggatagcctctcttactaccactcacccgcagactccttctccagcatgggctcgcctgtcaacgcgcaggacttctgcacggacctggccgtctccagtgccaacttcattcccacggtcactgccatctcgaccagtccggacctgcagtggctggtgcagcccgccctcgtctcctccgtggccccatcgcagaccagagcccctcaccctttcggagtccccgccccctccgctggggcttactccagggctggcgttgtgaagaccatgacaggaggccgagcgcagagcattggcaggaggggcaaggtggaacaggagacagaccaactagaagatgagaagtctgctttgcagaccgagattgccaacctgctgaaggagaaggaaaaactagagttcatcctggcagctcaccgacctgcctgcaagatccctgatgacctgggcttcccagaagagatgtctgtggcttcccttgatctgactgggggcctgccagaggttgccaccccggagtctgaggaggccttcaccctgcctctcctcaatgaccctgagcccaagccctcagtggaacctgtcaagagcatcagcagcatggagctgaagaccgagccctttgatgacttcctgttcccagcatcatccaggcccagtggctctgagacagcccgctccgtgccagacatggacctatctgggtccttctatgcagcagactgggagcctctgcacagtggctccctggggatggggcccatggccacagagctggagcccctgtgcactccggtggtcacctgtactcccagctgcactgcttacacgtcttccttcgtcttcacctaccccgaggctgactccttccccagctgtgcagctgcccaccgcaagggcagcagcagcaatgagccttcctctgactcgctcagctcacccacgctgctggccctgtgagggggcagggaaggggaggcagccggcacccacaagtgccactgcccgagctggtgcattacagagaggagaaacacatcttccctagagggttcctgtagacctagggaggaccttatctgtgcgtgaaacacaccaggctgtgggcctcaaggacttgaaagcatccatgtgtggactcaagtccttacctcttccggagatgtagcaaa

SEQ ID NO: 133388 - DNA, 796 bp, Homo sapiens
  Payload ID: 6071
  Gene Symbol: FOS
  Gene Name: FBJ murine osteosarcoma viral oncogene homolog
  ENST ID: ENST00000554617
  CDS Start-End: 158-670
ccaaccgcatctgcagcgagcatctgagaagccaagactgagccggcggccgcggcgcagcgaacgagcagtgaccgtgctcctacccagctctgctccacagcgcccacctgtctccgcccctcggcccctcgcccggctttgcctaaccgccacgatgatgttctcgggcttcaacgcagactacgaggcgtcatcctcccgctgcagcagcgcgtccccggccggggatagcctctcttactaccactcacccgcagactccttctccagcatgggctcgcctgtcaacgcgcaggacttctgcacggacctggccgtctccagtgccaacttcattcccacggtcactgccatctcgaccagtccggacctgcagtggctggtgcagcccgccctcgtctcctccgtggccccatcgcagaccagagcccctcaccctttcggagtccccgccccctccgctggggcttactccagggctggcgttgtgaagaccatgacaggaggccgagcgcagagcattggcaggaggggcaaggtggaacaggtgaggaactctagcgtactcttcctgggaatgtgggggctgggtgggaagcagccccggagatgcaggagcccagtacagaggatgaagccactgatggggctggctgcacatccgtaactgggagccctggctccaagcccattccatcccaactcagactctgagtctcaccctaagaagtactctcatagtttcttccctaagtttcttaccgcatgctttcagactgggctcttctttgtt

SEQ ID NO: 133389 - DNA, 1280 bp, Homo sapiens
  Payload ID: 6071
  Gene Symbol: FOS
  Gene Name: FBJ murine osteosarcoma viral oncogene homolog
  ENST ID: ENST00000555347
  CDS Start-End: 419-1117
gcaggagcccagtacagaggatgaagccactgatggggctggctgcacatccgtaactgggagccctggctccaagcccattccatcccaactcagactctgagtctcaccctaagaagtactctcatagtttcttccctaagtttcttaccgcatgctttcagactgggctcttctttgttctcttgctgaggatcttattttaaatgcaagtcacacctagtctgcaactgcaggtcagaaatggtttcacagtggggtgccaggaagcagggaagctgcaggagccagttctactggggtgggtgaatggaggtgatggcagacacttttactgaatgtcggtctttttttgtgattattctagttatctccagaagaagaagagaaaaggagaatccgaagggaaaggaataagatggctgcagccaaatgccgcaaccggaggagggagctgactgatacactccaagcggagacagaccaactagaagatgagaagtctgctttgcagaccgagattgccaacctgctgaaggagaaggaaaaactagagttcatcctggcagctcaccgacctgcctgcaagatccctgatgacctgggcttcccagaagagatgtctgtggcttcccttgatctgactgggggcctgccagaggttgccaccccggagtctgaggaggccttcaccctgcctctcctcaatgaccctgagcccaagccctcagtggaacctgtcaagagcatcagcagcatggagctgaagaccgagccctttgatgacttcctgttcccagcatcatccaggcccagtggctctgagacagcccgctccgtgccagacatggacctatctgggtccttctatgcagcagactgggagcctctgcacagtggctccctggggatggggcccatggccacagagctggagcccctgtgcactccggtggtcacctgtactcccagctgcactgcttacacgtcttccttcgtcttcacctaccccgaggctgactccttccccagctgtgcagctgcccaccgcaagggcagcagcagcaatgagccttcctctgactcgctcagctcacccacgctgctggccctgtgagggggcagggaaggggaggcagccggcacccacaagtgccactgcccgagctggtgcattacagagaggagaaacacatcttccctagagggttcctgtagacctagggaggaccttatctgtgcgtgaaacacaccaggctgtgggcctcaaggacttgaaa

SEQ ID NO: 133390 - DNA, 249 bp, Homo sapiens
  Payload ID: 6071
  Gene Symbol: FOS
  Gene Name: FBJ murine osteosarcoma viral oncogene homolog
  ENST ID: ENST00000557139
  CDS Start-End: 1-249
cgtctcctccgtggccccatcgcagaccagagcccctcaccctttcggagtccccgccccctccgctggggcttactccagggctggcgttgtgaagaccatgacaggaggccgagcgcagagcattggcaggaggggcaaggtggaacagaagaagaagagaaaaggagaatccgaagggaaaggaataagatggctgcagccaaatgccgcaaccggaggagggagctgactgatacactccaagcg

SEQ ID NO: 133391 - DNA, 629 bp, Homo sapiens
  Payload ID: 6071
  Gene Symbol: FOS
  Gene Name: FBJ murine osteosarcoma viral oncogene homolog
  ENST ID: ENST00000555242
  CDS Start-End: 7-537
gccacgatgatgttctcgggcttcaacgcagactacgaggcgtcatcctcccgctgcagcagcgcgtccccggccggggatagcctctcttactaccactcacccgcagactccttctccagcatgggctcgcctgtcaacgcgcaggacttctgcacggacctggccgtctccagtgccaacttcattcccacggtcactgccatctcgaccagtccggacctgcagtggctggtgcagcccgccctcgtctcctccgtggccccatcgcagaccagagcccctcaccctttcggagtccccgccccctccgctggggcttactccagggctggcgttgtgaagaccatgacaggaggccgagcgcagagcattggcaggaggggcaaggtggaacagttatctccagaagaagaagagaaaaggagaatccgaagggaaaggaataagatggctgcagccaaatgccgcaaccggaggagggagctgactgatacactccaagcggtaggtactctgtgggttgctcctttttaaaacttaaggggaaagttggagattgagcataagggcccttgagtaagactgtgtcttatgctttcctttatccctctgtatacaggagacag

SEQ ID NO: 133392 - DNA, 834 bp, Homo sapiens
  Payload ID: 6071
  Gene Symbol: FOS
  Gene Name: FBJ murine osteosarcoma viral oncogene homolog
  ENST ID: ENST00000555672
  CDS Start-End: 409-834
cggcaggatggaagagacaggcactgcgctgcggaatgcctgggaggaaaagggggagacctttcatccaggatgagggacatttaagatgaaatgtccgtggcaggatcgtttctcttcactgctgcatgcggcactgggaactcgccccacctgtgtccggaacctgctcgctcacgtcggctttccccttctgttttgttctaggacttctgcacggacctggccgtctccagtgccaacttcattcccacggtcactgccatctcgaccagtccggacctgcagtggctggtgcagcccgccctcgtctcctccgtggccccatcgcagaccagagcccctcaccctttcggagtccccgccccctccgctggggcttactccagggctggcgttgtgaagaccatgacaggaggccgagcgcagagcattggcaggaggggcaaggtggaacaggagacagaccaactagaagatgagaagtctgctttgcagaccgagattgccaacctgctgaaggagaaggaaaaactagagttcatcctggcagctcaccgacctgcctgcaagatccctgatgacctgggcttcccagaagagatgtctgtggcttcccttgatctgactgggggcctgccagaggttgccaccccggagtctgaggaggccttcaccctgcctctcctcaatgaccctgagcccaagccctcagtggaacctgtcaagagcatcagcagcatggagctgaagaccgagccctttgatgacttcctgttcccagcatcatccaggcccagtggctctgagacagcccgctccgtgccagacatg

SEQ ID NO: 133393 - DNA, 567 bp, Homo sapiens
  Payload ID: 6071
  Gene Symbol: FOS
  Gene Name: FBJ murine osteosarcoma viral oncogene homolog
  ENST ID: ENST00000554212
  CDS Start-End: 156-567
aaccgcatctgcagcgagcatctgagaagccaagactgagccggcggccgcggcgcagcgaacgagcagtgaccgtgctcctacccagctctgctccacagcgcccacctgtctccgcccctcggcccctcgcccggctttgcctaaccgccacgatgatgttctcgggcttcaacgcagactacgaggcgtcatcctcccgctgcagcagcgcgtccccggccggggatagcctctcttactaccactcacccgcagactccttctccagcatgggctcgcctgtcaacgcgcagtgccaacttcattcccacggtcactgccatctcgaccagtccggacctgcagtggctggtgcagcccgccctcgtctcctccgtggccccatcgcagaccagagcccctcaccctttcggagtccccgccccctccgctggggcttactccagggctggcgttgtgaagaccatgacaggaggccgagcgcagagcattggcaggaggggcaaggtggaacagttatctccagaagaagaagagaaaaggagaatccgaagggaaaggaat

SEQ ID NO: 133394 - DNA, 1496 bp, Homo sapiens
  Payload ID: 6071
  Gene Symbol: FOS
  Gene Name: FBJ murine osteosarcoma viral oncogene homolog
  Uniprot ID: P01100
  ENST ID: ENST00000555686
  CDS Start-End: 436-1236
gatgctgaagggataacgggaacgcagcggcaggatggaagagacaggcactgcgctgcggaatgcctgggaggaaaagggggagacctttcatccaggatgagggacatttaagatgaaatgtccgtggcaggatcgtttctcttcactgctgcatgcggcactgggaactcgccccacctgtgtccggaacctgctcgctcacgtcggctttccccttctgttttgttctaggacttctgcacggacctggccgtctccagtgccaacttcattcccacggtcactgccatctcgaccagtccggacctgcagtggctggtgcagcccgccctcgtctcctccgtggccccatcgcagaccagagcccctcaccctttcggagtccccgccccctccgctggggcttactccagggctggcgttgtgaagaccatgacaggaggccgagcgcagagcattggcaggaggggcaaggtggaacagttatctccagaagaagaagagaaaaggagaatccgaagggaaaggaataagatggctgcagccaaatgccgcaaccggaggagggagctgactgatacactccaagcggagacagaccaactagaagatgagaagtctgctttgcagaccgagattgccaacctgctgaaggagaaggaaaaactagagttcatcctggcagctcaccgacctgcctgcaagatccctgatgacctgggcttcccagaagagatgtctgtggcttcccttgatctgactgggggcctgccagaggttgccaccccggagtctgaggaggccttcaccctgcctctcctcaatgaccctgagcccaagccctcagtggaacctgtcaagagcatcagcagcatggagctgaagaccgagccctttgatgacttcctgttcccagcatcatccaggcccagtggctctgagacagcccgctccgtgccagacatggacctatctgggtccttctatgcagcagactgggagcctctgcacagtggctccctggggatggggcccatggccacagagctggagcccctgtgcactccggtggtcacctgtactcccagctgcactgcttacacgtcttccttcgtcttcacctaccccgaggctgactccttccccagctgtgcagctgcccaccgcaagggcagcagcagcaatgagccttcctctgactcgctcagctcacccacgctgctggccctgtgagggggcagggaaggggaggcagccggcacccacaagtgccactgcccgagctggtgcattacagagaggagaaacacatcttccctagagggttcctgtagacctagggaggaccttatctgtgcgtgaaacacaccaggctgtgggcctcaaggacttgaaagcatccatgtgtggactcaagtccttacctcttccggagatgtagcaaaacgcatggagtgtgtattgttcccagtgacacttcagagagctggtag

SEQ ID NO: 133395 - DNA, 3775 bp, Homo sapiens
  Payload ID: 6072
  Gene Symbol: FOSB
  Gene Name: FBJ murine osteosarcoma viral oncogene homolog B
  Uniprot ID: P53539
  ENST ID: ENST00000353609
  CDS Start-End: 593-1609
cattcataagactcagagctacggccacggcagggacacgcggaaccaagacttggaaacttgattgttgtggttcttcttgggggttatgaaatttcattaatctttttttttccggggagaaagtttttggaaagattcttccagatatttcttcattttcttttggaggaccgacttactttttttggtcttctttattactcccctccccccgtgggacccgccggacgcgtggaggagaccgtagctgaagctgattctgtacagcgggacagcgctttctgcccctgggggagcaacccctccctcgcccctgggtcctacggagcctgcactttcaagaggtacagcggcatcctgtgggggcctgggcaccgcaggaagactgcacagaaactttgccattgttggaacgggacgttgctccttccccgagcttccccggacagcgtactttgaggactcgctcagctcaccggggactcccacggctcaccccggacttgcaccttacttccccaacccggccatagccttggcttcccggcgacctcagcgtggtcacaggggcccccctgtgcccagggaaatgtttcaggctttccccggagactacgactccggctcccggtgcagctcctcaccctctgccgagtctcaatatctgtcttcggtggactccttcggcagtccacccaccgccgccgcctcccaggagtgcgccggtctcggggaaatgcccggttccttcgtgcccacggtcaccgcgatcacaaccagccaggacctccagtggcttgtgcaacccaccctcatctcttccatggcccagtcccaggggcagccactggcctcccagcccccggtcgtcgacccctacgacatgccgggaaccagctactccacaccaggcatgagtggctacagcagtggcggagcgagtggcagtggtgggccttccaccagcggaactaccagtgggcctgggcctgcccgcccagcccgagcccggcctaggagaccccgagaggagacgctcaccccagaggaagaggagaagcgaagggtgcgccgggaacgaaataaactagcagcagctaaatgcaggaaccggcggagggagctgaccgaccgactccaggcggagacagatcagttggaggaagaaaaagcagagctggagtcggagatcgccgagctccaaaaggagaaggaacgtctggagtttgtgctggtggcccacaaaccgggctgcaagatcccctacgaagaggggcccgggccgggcccgctggcggaggtgagagatttgccgggctcagcaccggctaaggaagatggcttcagctggctgctgccgcccccgccaccaccgcccctgcccttccagaccagccaagacgcaccccccaacctgacggcttctctctttacacacagtgaagttcaagtcctcggcgaccccttccccgttgttaacccttcgtacacttcttcgtttgtcctcacctgcccggaggtctccgcgttcgccggcgcccaacgcaccagcggcagtgaccagccttccgatcccctgaactcgccctccctcctcgctctgtgaactctttagacacacaaaacaaacaaacacatgggggagagagacttggaagaggaggaggaggaggagaaggaggagagagaggggaagagacaaagtgggtgtgtggcctccctggctcctccgtctgaccctctgcggccactgcgccactgccatcggacaggaggattccttgtgttttgtcctgcctcttgtttctgtgccccggcgaggccggagagctggtgactttggggacagggggtgggaaggggatggacacccccagctgactgttggctctctgacgtcaacccaagctctggggatgggtggggaggggggcgggtgacgcccaccttcgggcagtcctgtgtgaggattaagggacgggggtgggaggtaggctgtggggtgggctggagtcctctccagagaggctcaacaaggaaaaatgccactccctacccaatgtctcccacacccaccctttttttggggtgcctaggttggtttcccctgcactcccgaccttagcttattgatcccacatttccatggtgtgagatcctctttactctgggcagaagtgagccccccccttaaagggaattcgatgcccccctagaataatctcatccccccacccgacttcttttgaaatgtgaacgtccttccttgactgtctagccactccctcccagaaaaactggctctgattggaatttctggcctcctaaggctccccaccccgaaatcagcccccagccttgtttctgatgacagtgttatcccaagaccctgccccctgccagccgaccctcctggccttcctcgttgggccgctctgatttcaggcagcaggggctgctgtgatgccgtcctgctggagtgatttatactgtgaaatgagttggccagattgtggggtgcagctgggtggggcagcacacctctggggggataatgtccccactcccgaaagcctttcctcggtctcccttccgtccatcccccttcttcctcccctcaacagtgagttagactcaagggggtgacagaaccgagaagggggtgacagtcctccatccacgtggcctctctctctctcctcaggaccctcagccctggcctttttctttaaggtcccccgaccaatccccagcctaggacgccaacttctcccaccccttggcccctcacatcctctccaggaagggagtgaggggctgtgacatttttccggagaagatttcagagctgaggctttggtacccccaaacccccaatatttttggactggcagactcaaggggctggaatctcatgattccatgcccgagtccgcccatccctgaccatggttttggctctcccaccccgccgttccctgcgcttcatctcatgaggatttctttatgaggcaaatttatattttttaatatcggggggtggaccacgccgccctccatccgtgctgcatgaaaaacattccacgtgccccttgtcgcgcgtctcccatcctgatcccagacccattccttagctatttatccctttcctggtttccgaaaggcaattatatctattatgtataagtaaatatattatatatggatgtgtgtgtgtgcgtgcgcgtgagtgtgtgagcgcttctgcagcctcggcctaggtcacgttggccctcaaagcgagccgttgaattggaaactgcttctagaaactctggctcagcctgtctcgggctgacccttttctgatcgtctcggcccctctgattgttcccgatggtctctctccctctgtcttttctcctccgcctgtgtccatctgaccgttttcacttgtctcctttctgactgtccctgccaatgctccagctgtcgtctgactctgggttcgttggggacatgagattttattttttgtgagtgagactgagggatcgtagatttttacaatctgtatctttgacaattctgggtgcgagtgtgagagtgtgagcagggcttgctcctgccaaccacaattcaatgaatccccgacccccctaccccatgctgtacttgtggttctctttttgtattttgcatctgaccccggggggctgggacagattggcaatgggccgtcccctctccccttggttctgcactgttgccaataaaaagctcttaaaaacgc

SEQ ID NO: 133396 - DNA, 3667 bp, Homo sapiens
  Payload ID: 6072
  Gene Symbol: FOSB
  Gene Name: FBJ murine osteosarcoma viral oncogene homolog B
  Uniprot ID: P53539
  ENST ID: ENST00000417353
  CDS Start-End: 593-1501
cattcataagactcagagctacggccacggcagggacacgcggaaccaagacttggaaacttgattgttgtggttcttcttgggggttatgaaatttcattaatctttttttttccggggagaaagtttttggaaagattcttccagatatttcttcattttcttttggaggaccgacttactttttttggtcttctttattactcccctccccccgtgggacccgccggacgcgtggaggagaccgtagctgaagctgattctgtacagcgggacagcgctttctgcccctgggggagcaacccctccctcgcccctgggtcctacggagcctgcactttcaagaggtacagcggcatcctgtgggggcctgggcaccgcaggaagactgcacagaaactttgccattgttggaacgggacgttgctccttccccgagcttccccggacagcgtactttgaggactcgctcagctcaccggggactcccacggctcaccccggacttgcaccttacttccccaacccggccatagccttggcttcccggcgacctcagcgtggtcacaggggcccccctgtgcccagggaaatgtttcaggctttccccggagactacgactccggctcccggtgcagctcctcaccctctgccgagtctcaatatctgtcttcggtggactccttcggcagtccacccaccgccgccgcctcccaggagtgcgccggtctcggggaaatgcccggttccttcgtgcccacggtcaccgcgatcacaaccagccaggacctccagtggcttgtgcaacccaccctcatctcttccatggcccagtcccaggggcagccactggcctcccagcccccggtcgtcgacccctacgacatgccgggaaccagctactccacaccaggcatgagtggctacagcagtggcggagcgagtggcagtggtgggccttccaccagcggaactaccagtgggcctgggcctgcccgcccagcccgagcccggcctaggagaccccgagaggagacggagacagatcagttggaggaagaaaaagcagagctggagtcggagatcgccgagctccaaaaggagaaggaacgtctggagtttgtgctggtggcccacaaaccgggctgcaagatcccctacgaagaggggcccgggccgggcccgctggcggaggtgagagatttgccgggctcagcaccggctaaggaagatggcttcagctggctgctgccgcccccgccaccaccgcccctgcccttccagaccagccaagacgcaccccccaacctgacggcttctctctttacacacagtgaagttcaagtcctcggcgaccccttccccgttgttaacccttcgtacacttcttcgtttgtcctcacctgcccggaggtctccgcgttcgccggcgcccaacgcaccagcggcagtgaccagccttccgatcccctgaactcgccctccctcctcgctctgtgaactctttagacacacaaaacaaacaaacacatgggggagagagacttggaagaggaggaggaggaggagaaggaggagagagaggggaagagacaaagtgggtgtgtggcctccctggctcctccgtctgaccctctgcggccactgcgccactgccatcggacaggaggattccttgtgttttgtcctgcctcttgtttctgtgccccggcgaggccggagagctggtgactttggggacagggggtgggaaggggatggacacccccagctgactgttggctctctgacgtcaacccaagctctggggatgggtggggaggggggcgggtgacgcccaccttcgggcagtcctgtgtgaggattaagggacgggggtgggaggtaggctgtggggtgggctggagtcctctccagagaggctcaacaaggaaaaatgccactccctacccaatgtctcccacacccaccctttttttggggtgcctaggttggtttcccctgcactcccgaccttagcttattgatcccacatttccatggtgtgagatcctctttactctgggcagaagtgagccccccccttaaagggaattcgatgcccccctagaataatctcatccccccacccgacttcttttgaaatgtgaacgtccttccttgactgtctagccactccctcccagaaaaactggctctgattggaatttctggcctcctaaggctccccaccccgaaatcagcccccagccttgtttctgatgacagtgttatcccaagaccctgccccctgccagccgaccctcctggccttcctcgttgggccgctctgatttcaggcagcaggggctgctgtgatgccgtcctgctggagtgatttatactgtgaaatgagttggccagattgtggggtgcagctgggtggggcagcacacctctggggggataatgtccccactcccgaaagcctttcctcggtctcccttccgtccatcccccttcttcctcccctcaacagtgagttagactcaagggggtgacagaaccgagaagggggtgacagtcctccatccacgtggcctctctctctctcctcaggaccctcagccctggcctttttctttaaggtcccccgaccaatccccagcctaggacgccaacttctcccaccccttggcccctcacatcctctccaggaagggagtgaggggctgtgacatttttccggagaagatttcagagctgaggctttggtacccccaaacccccaatatttttggactggcagactcaaggggctggaatctcatgattccatgcccgagtccgcccatccctgaccatggttttggctctcccaccccgccgttccctgcgcttcatctcatgaggatttctttatgaggcaaatttatattttttaatatcggggggtggaccacgccgccctccatccgtgctgcatgaaaaacattccacgtgccccttgtcgcgcgtctcccatcctgatcccagacccattccttagctatttatccctttcctggtttccgaaaggcaattatatctattatgtataagtaaatatattatatatggatgtgtgtgtgtgcgtgcgcgtgagtgtgtgagcgcttctgcagcctcggcctaggtcacgttggccctcaaagcgagccgttgaattggaaactgcttctagaaactctggctcagcctgtctcgggctgacccttttctgatcgtctcggcccctctgattgttcccgatggtctctctccctctgtcttttctcctccgcctgtgtccatctgaccgttttcacttgtctcctttctgactgtccctgccaatgctccagctgtcgtctgactctgggttcgttggggacatgagattttattttttgtgagtgagactgagggatcgtagatttttacaatctgtatctttgacaattctgggtgcgagtgtgagagtgtgagcagggcttgctcctgccaaccacaattcaatgaatccccgacccccctaccccatgctgtacttgtggttctctttttgtattttgcatctgaccccggggggctgggacagattggcaatgggccgtcccctctccccttggttctgcactgttgccaataaaaagctcttaaaaacgc

SEQ ID NO: 133397 - DNA, 3346 bp, Homo sapiens
  Payload ID: 6072
  Gene Symbol: FOSB
  Gene Name: FBJ murine osteosarcoma viral oncogene homolog B
  Uniprot ID: P53539
  ENST ID: ENST00000443841
  CDS Start-End: 593-1180
cattcataagactcagagctacggccacggcagggacacgcggaaccaagacttggaaacttgattgttgtggttcttcttgggggttatgaaatttcattaatctttttttttccggggagaaagtttttggaaagattcttccagatatttcttcattttcttttggaggaccgacttactttttttggtcttctttattactcccctccccccgtgggacccgccggacgcgtggaggagaccgtagctgaagctgattctgtacagcgggacagcgctttctgcccctgggggagcaacccctccctcgcccctgggtcctacggagcctgcactttcaagaggtacagcggcatcctgtgggggcctgggcaccgcaggaagactgcacagaaactttgccattgttggaacgggacgttgctccttccccgagcttccccggacagcgtactttgaggactcgctcagctcaccggggactcccacggctcaccccggacttgcaccttacttccccaacccggccatagccttggcttcccggcgacctcagcgtggtcacaggggcccccctgtgcccagggaaatgtttcaggctttccccggagactacgactccggctcccggtgcagctcctcaccctctgccgagtctcaatatctgtcttcggtggactccttcggcagtccacccaccgccgccgcctcccaggagacagatcagttggaggaagaaaaagcagagctggagtcggagatcgccgagctccaaaaggagaaggaacgtctggagtttgtgctggtggcccacaaaccgggctgcaagatcccctacgaagaggggcccgggccgggcccgctggcggaggtgagagatttgccgggctcagcaccggctaaggaagatggcttcagctggctgctgccgcccccgccaccaccgcccctgcccttccagaccagccaagacgcaccccccaacctgacggcttctctctttacacacagtgaagttcaagtcctcggcgaccccttccccgttgttaacccttcgtacacttcttcgtttgtcctcacctgcccggaggtctccgcgttcgccggcgcccaacgcaccagcggcagtgaccagccttccgatcccctgaactcgccctccctcctcgctctgtgaactctttagacacacaaaacaaacaaacacatgggggagagagacttggaagaggaggaggaggaggagaaggaggagagagaggggaagagacaaagtgggtgtgtggcctccctggctcctccgtctgaccctctgcggccactgcgccactgccatcggacaggaggattccttgtgttttgtcctgcctcttgtttctgtgccccggcgaggccggagagctggtgactttggggacagggggtgggaaggggatggacacccccagctgactgttggctctctgacgtcaacccaagctctggggatgggtggggaggggggcgggtgacgcccaccttcgggcagtcctgtgtgaggattaagggacgggggtgggaggtaggctgtggggtgggctggagtcctctccagagaggctcaacaaggaaaaatgccactccctacccaatgtctcccacacccaccctttttttggggtgcctaggttggtttcccctgcactcccgaccttagcttattgatcccacatttccatggtgtgagatcctctttactctgggcagaagtgagccccccccttaaagggaattcgatgcccccctagaataatctcatccccccacccgacttcttttgaaatgtgaacgtccttccttgactgtctagccactccctcccagaaaaactggctctgattggaatttctggcctcctaaggctccccaccccgaaatcagcccccagccttgtttctgatgacagtgttatcccaagaccctgccccctgccagccgaccctcctggccttcctcgttgggccgctctgatttcaggcagcaggggctgctgtgatgccgtcctgctggagtgatttatactgtgaaatgagttggccagattgtggggtgcagctgggtggggcagcacacctctggggggataatgtccccactcccgaaagcctttcctcggtctcccttccgtccatcccccttcttcctcccctcaacagtgagttagactcaagggggtgacagaaccgagaagggggtgacagtcctccatccacgtggcctctctctctctcctcaggaccctcagccctggcctttttctttaaggtcccccgaccaatccccagcctaggacgccaacttctcccaccccttggcccctcacatcctctccaggaagggagtgaggggctgtgacatttttccggagaagatttcagagctgaggctttggtacccccaaacccccaatatttttggactggcagactcaaggggctggaatctcatgattccatgcccgagtccgcccatccctgaccatggttttggctctcccaccccgccgttccctgcgcttcatctcatgaggatttctttatgaggcaaatttatattttttaatatcggggggtggaccacgccgccctccatccgtgctgcatgaaaaacattccacgtgccccttgtcgcgcgtctcccatcctgatcccagacccattccttagctatttatccctttcctggtttccgaaaggcaattatatctattatgtataagtaaatatattatatatggatgtgtgtgtgtgcgtgcgcgtgagtgtgtgagcgcttctgcagcctcggcctaggtcacgttggccctcaaagcgagccgttgaattggaaactgcttctagaaactctggctcagcctgtctcgggctgacccttttctgatcgtctcggcccctctgattgttcccgatggtctctctccctctgtcttttctcctccgcctgtgtccatctgaccgttttcacttgtctcctttctgactgtccctgccaatgctccagctgtcgtctgactctgggttcgttggggacatgagattttattttttgtgagtgagactgagggatcgtagatttttacaatctgtatctttgacaattctgggtgcgagtgtgagagtgtgagcagggcttgctcctgccaaccacaattcaatgaatccccgacccccctaccccatgctgtacttgtggttctctttttgtattttgcatctgaccccggggggctgggacagattggcaatgggccgtcccctctccccttggttctgcactgttgccaataaaaagctcttaaaaacgc

SEQ ID NO: 133398 - DNA, 2170 bp, Homo sapiens
  Payload ID: 6072
  Gene Symbol: FOSB
  Gene Name: FBJ murine osteosarcoma viral oncogene homolog B
  ENST ID: ENST00000590335
  CDS Start-End: 592-1125
attcataagactcagagctacggccacggcagggacacgcggaaccaagacttggaaacttgattgttgtggttcttcttgggggttatgaaatttcattaatctttttttttccggggagaaagtttttggaaagattcttccagatatttcttcattttcttttggaggaccgacttactttttttggtcttctttattactcccctccccccgtgggacccgccggacgcgtggaggagaccgtagctgaagctgattctgtacagcgggacagcgctttctgcccctgggggagcaacccctccctcgcccctgggtcctacggagcctgcactttcaagaggtacagcggcatcctgtgggggcctgggcaccgcaggaagactgcacagaaactttgccattgttggaacgggacgttgctccttccccgagcttccccggacagcgtactttgaggactcgctcagctcaccggggactcccacggctcaccccggacttgcaccttacttccccaacccggccatagccttggcttcccggcgacctcagcgtggtcacaggggcccccctgtgcccagggaaatgtttcaggctttccccggagactacgactccggctcccggtgcagctcctcaccctctgccgagtctcaatatctgtcttcggtggactccttcggcagtccacccaccgccgccgcctcccaggagtgcgccggtctcggggaaatgcccggttccttcgtgcccacggtcaccgcgatcacaaccagccaggacctccagtggcttgtgcaacccaccctcatctcttccatggcccagtcccaggggcagccactggcctcccagcccccggtcgtcgacccctacgacatgccgggaaccagctactccacaccaggcatgagtggctacagcagtggcggagcgagtggcagtggtgggccttccaccagcggaactaccagtgggcctgggcctgcccgcccagcccgagcccggcctaggagaccccgagaggagacggtgagtaagggacatcagaacttggcctgggtagggggaagcaagagaggcaggaagtttcttatgaatggaggggggctccactaaggcctcagtgttacagaaaccccaagatccttgctacacgagcgaggaccggaggcttgttttttggctcttgggggttctgaaagaagtagaggttcgggatgggtggaggagtgctgtatccccaaatctcatggcctctatctccctgactcagctcaccccagaggaagaggagaagcgaagggtgcgccgggaacgaaataaactagcagcagctaaatgcaggaaccggcggagggagctgaccgaccgactccaggcggtgaggacaggccctggggtgggagaggggatgttgaggggagctctctccccattctctgccccctctccacctgtacccttatcctgggttgagaactagacgttccacacatggaactaggtactgctgtggccagactgggtagcccagggcacaaacacagacccccatggacttaagtcaactcctggtcccccccccatttcctgaccccacggactactctcctagccttcatttcatcccaaggggccacatggggcccttgaggagaggggcgcccccatcatttctcccatctggtcttcagcaagtaacaacccattttgcctcagtttctccatctctgcaaaccctcatcaaatctcccgggctctttctacccttaacactctggaaagcctgtgaaatgaaattattccacctcctgccctagccacccacagctctcctggtgctggtggcatcccccaaaacccactcccttcctacgtcctcccttggtctgagagttccctgctgtatgcctgcagggtgagctgttactccttgagggaacaagggaattgtcaactttccttctctactttttctcttccccgggaggtagagagggaggggtaatagaagggaacacattaaaaacacataacagtggctcatgcctgtgatcccagcactttgagaggccaaggcaggaggattgcttgagcccaggagtttgagaccagcctgggaaacatagggaggacttgtctctaccaagaaaaaaaaaaa

SEQ ID NO: 133399 - DNA, 580 bp, Homo sapiens
  Payload ID: 6072
  Gene Symbol: FOSB
  Gene Name: FBJ murine osteosarcoma viral oncogene homolog B
  ENST ID: ENST00000589593
  CDS Start-End: 170-580
gtgtgtggctgtggctccgtcccgggggttctgtcacccggctgtgtccagcctcctctccaccccccatacctaagagtcaccaacccggggtgtgattcaccacccgctggaaccgtgcaacctttccccgaggaagaaggaggaggagtgcgccggtctcggggaaatgcccggttccttcgtgcccacggtcaccgcgatcacaaccagccaggacctccagtggcttgtgcaacccaccctcatctcttccatggcccagtcccaggggcagccactggcctcccagcccccggtcgtcgacccctacgacatgccgggaaccagctactccacaccaggcatgagtggctacagcagtggcggagcgagtggcagtggtgggccttccaccagcggaactaccagtgggcctgggcctgcccgcccagcccgagcccggcctaggagaccccgagaggagacgctcaccccagaggaagaggagaagcgaagggtgcgccgggaacgaaataaactagcagcagctaaatgcaggaaccggcggagggagctgaccgaccgactccaggcggag

SEQ ID NO: 133400 - DNA, 1057 bp, Homo sapiens
  Payload ID: 6072
  Gene Symbol: FOSB
  Gene Name: FBJ murine osteosarcoma viral oncogene homolog B
  ENST ID: ENST00000592436
  CDS Start-End: 153-866
ttccccggacagcgtactttgaggactcgctcagctcaccggggactcccacggctcaccccggacttgcaccttacttccccaacccggccatagccttggcttcccggcgacctcagcgtggtcacaggggcccccctgtgcccagggaaatgtttcaggctttccccggagactacgactccggctcccggtgcagctcctcaccctctgccgagtctcaatatctgtcttcggtggactccttcggcagtccacccaccgccgccgcctcccaggagtgcgccggtctcggggaaatgcccggttccttcgtgcccacggtcaccgcgatcacaaccagccaggacctccagtggcttgtgcaacccaccctcatctcttccatggcccagtcccaggggcagccactggcctcccagcccccggtcgtcgacccctacgacatgccgggaaccagctactccacaccaggcatgagtggctacagcagtggcggagcgagtggcagtggtgggccttccaccagcggaactaccagtgggcctgggcctgcccgcccagcccgagcccggcctaggagaccccgagaggagacgctcaccccagaggaagaggagaagcgaagggtgcgccgggaacgaaataaactagcagcagctaaatgcaggaaccggcggagggagctgaccgaccgactccaggcggagacagatcagttggaggaagaaaaagcagagctggagtcggagatcgccgagctccaaaaggagaaggaacgtctggagtttgtgctggtggcccacaaaccgggctgcaagatcccctacgaagaggggcccgggccgggcccgctggcggagtgaagttcaagtcctcggcgaccccttccccgttgttaacccttcgtacacttcttcgtttgtcctcacctgcccggaggtctccgcgttcgccggcgcccaacgcaccagcggcagtgaccagccttccgatcccctgaactcgccctccctcctcgctctgtgaactctttagacacacaaaacaaacaaac

SEQ ID NO: 133401 - DNA, 3658 bp, Homo sapiens
  Payload ID: 6072
  Gene Symbol: FOSB
  Gene Name: FBJ murine osteosarcoma viral oncogene homolog B
  Uniprot ID: P53539
  ENST ID: ENST00000591858
  CDS Start-End: 593-1492
cattcataagactcagagctacggccacggcagggacacgcggaaccaagacttggaaacttgattgttgtggttcttcttgggggttatgaaatttcattaatctttttttttccggggagaaagtttttggaaagattcttccagatatttcttcattttcttttggaggaccgacttactttttttggtcttctttattactcccctccccccgtgggacccgccggacgcgtggaggagaccgtagctgaagctgattctgtacagcgggacagcgctttctgcccctgggggagcaacccctccctcgcccctgggtcctacggagcctgcactttcaagaggtacagcggcatcctgtgggggcctgggcaccgcaggaagactgcacagaaactttgccattgttggaacgggacgttgctccttccccgagcttccccggacagcgtactttgaggactcgctcagctcaccggggactcccacggctcaccccggacttgcaccttacttccccaacccggccatagccttggcttcccggcgacctcagcgtggtcacaggggcccccctgtgcccagggaaatgtttcaggctttccccggagactacgactccggctcccggtgcagctcctcaccctctgccgagtctcaatatctgtcttcggtggactccttcggcagtccacccaccgccgccgcctcccagtcccaggggcagccactggcctcccagcccccggtcgtcgacccctacgacatgccgggaaccagctactccacaccaggcatgagtggctacagcagtggcggagcgagtggcagtggtgggccttccaccagcggaactaccagtgggcctgggcctgcccgcccagcccgagcccggcctaggagaccccgagaggagacgctcaccccagaggaagaggagaagcgaagggtgcgccgggaacgaaataaactagcagcagctaaatgcaggaaccggcggagggagctgaccgaccgactccaggcggagacagatcagttggaggaagaaaaagcagagctggagtcggagatcgccgagctccaaaaggagaaggaacgtctggagtttgtgctggtggcccacaaaccgggctgcaagatcccctacgaagaggggcccgggccgggcccgctggcggaggtgagagatttgccgggctcagcaccggctaaggaagatggcttcagctggctgctgccgcccccgccaccaccgcccctgcccttccagaccagccaagacgcaccccccaacctgacggcttctctctttacacacagtgaagttcaagtcctcggcgaccccttccccgttgttaacccttcgtacacttcttcgtttgtcctcacctgcccggaggtctccgcgttcgccggcgcccaacgcaccagcggcagtgaccagccttccgatcccctgaactcgccctccctcctcgctctgtgaactctttagacacacaaaacaaacaaacacatgggggagagagacttggaagaggaggaggaggaggagaaggaggagagagaggggaagagacaaagtgggtgtgtggcctccctggctcctccgtctgaccctctgcggccactgcgccactgccatcggacaggaggattccttgtgttttgtcctgcctcttgtttctgtgccccggcgaggccggagagctggtgactttggggacagggggtgggaaggggatggacacccccagctgactgttggctctctgacgtcaacccaagctctggggatgggtggggaggggggcgggtgacgcccaccttcgggcagtcctgtgtgaggattaagggacgggggtgggaggtaggctgtggggtgggctggagtcctctccagagaggctcaacaaggaaaaatgccactccctacccaatgtctcccacacccaccctttttttggggtgcctaggttggtttcccctgcactcccgaccttagcttattgatcccacatttccatggtgtgagatcctctttactctgggcagaagtgagccccccccttaaagggaattcgatgcccccctagaataatctcatccccccacccgacttcttttgaaatgtgaacgtccttccttgactgtctagccactccctcccagaaaaactggctctgattggaatttctggcctcctaaggctccccaccccgaaatcagcccccagccttgtttctgatgacagtgttatcccaagaccctgccccctgccagccgaccctcctggccttcctcgttgggccgctctgatttcaggcagcaggggctgctgtgatgccgtcctgctggagtgatttatactgtgaaatgagttggccagattgtggggtgcagctgggtggggcagcacacctctggggggataatgtccccactcccgaaagcctttcctcggtctcccttccgtccatcccccttcttcctcccctcaacagtgagttagactcaagggggtgacagaaccgagaagggggtgacagtcctccatccacgtggcctctctctctctcctcaggaccctcagccctggcctttttctttaaggtcccccgaccaatccccagcctaggacgccaacttctcccaccccttggcccctcacatcctctccaggaagggagtgaggggctgtgacatttttccggagaagatttcagagctgaggctttggtacccccaaacccccaatatttttggactggcagactcaaggggctggaatctcatgattccatgcccgagtccgcccatccctgaccatggttttggctctcccaccccgccgttccctgcgcttcatctcatgaggatttctttatgaggcaaatttatattttttaatatcggggggtggaccacgccgccctccatccgtgctgcatgaaaaacattccacgtgccccttgtcgcgcgtctcccatcctgatcccagacccattccttagctatttatccctttcctggtttccgaaaggcaattatatctattatgtataagtaaatatattatatatggatgtgtgtgtgtgcgtgcgcgtgagtgtgtgagcgcttctgcagcctcggcctaggtcacgttggccctcaaagcgagccgttgaattggaaactgcttctagaaactctggctcagcctgtctcgggctgacccttttctgatcgtctcggcccctctgattgttcccgatggtctctctccctctgtcttttctcctccgcctgtgtccatctgaccgttttcacttgtctcctttctgactgtccctgccaatgctccagctgtcgtctgactctgggttcgttggggacatgagattttattttttgtgagtgagactgagggatcgtagatttttacaatctgtatctttgacaattctgggtgcgagtgtgagagtgtgagcagggcttgctcctgccaaccacaattcaatgaatccccgacccccctaccccatgctgtacttgtggttctctttttgtattttgcatctgaccccggggggctgggacagattggcaatgggccgtcccctctccccttggttctgcactgttgccaataaaaagctcttaaaaacgc

SEQ ID NO: 133402 - DNA, 3550 bp, Homo sapiens
  Payload ID: 6072
  Gene Symbol: FOSB
  Gene Name: FBJ murine osteosarcoma viral oncogene homolog B
  Uniprot ID: P53539
  ENST ID: ENST00000585836
  CDS Start-End: 593-1384
cattcataagactcagagctacggccacggcagggacacgcggaaccaagacttggaaacttgattgttgtggttcttcttgggggttatgaaatttcattaatctttttttttccggggagaaagtttttggaaagattcttccagatatttcttcattttcttttggaggaccgacttactttttttggtcttctttattactcccctccccccgtgggacccgccggacgcgtggaggagaccgtagctgaagctgattctgtacagcgggacagcgctttctgcccctgggggagcaacccctccctcgcccctgggtcctacggagcctgcactttcaagaggtacagcggcatcctgtgggggcctgggcaccgcaggaagactgcacagaaactttgccattgttggaacgggacgttgctccttccccgagcttccccggacagcgtactttgaggactcgctcagctcaccggggactcccacggctcaccccggacttgcaccttacttccccaacccggccatagccttggcttcccggcgacctcagcgtggtcacaggggcccccctgtgcccagggaaatgtttcaggctttccccggagactacgactccggctcccggtgcagctcctcaccctctgccgagtctcaatatctgtcttcggtggactccttcggcagtccacccaccgccgccgcctcccagtcccaggggcagccactggcctcccagcccccggtcgtcgacccctacgacatgccgggaaccagctactccacaccaggcatgagtggctacagcagtggcggagcgagtggcagtggtgggccttccaccagcggaactaccagtgggcctgggcctgcccgcccagcccgagcccggcctaggagaccccgagaggagacggagacagatcagttggaggaagaaaaagcagagctggagtcggagatcgccgagctccaaaaggagaaggaacgtctggagtttgtgctggtggcccacaaaccgggctgcaagatcccctacgaagaggggcccgggccgggcccgctggcggaggtgagagatttgccgggctcagcaccggctaaggaagatggcttcagctggctgctgccgcccccgccaccaccgcccctgcccttccagaccagccaagacgcaccccccaacctgacggcttctctctttacacacagtgaagttcaagtcctcggcgaccccttccccgttgttaacccttcgtacacttcttcgtttgtcctcacctgcccggaggtctccgcgttcgccggcgcccaacgcaccagcggcagtgaccagccttccgatcccctgaactcgccctccctcctcgctctgtgaactctttagacacacaaaacaaacaaacacatgggggagagagacttggaagaggaggaggaggaggagaaggaggagagagaggggaagagacaaagtgggtgtgtggcctccctggctcctccgtctgaccctctgcggccactgcgccactgccatcggacaggaggattccttgtgttttgtcctgcctcttgtttctgtgccccggcgaggccggagagctggtgactttggggacagggggtgggaaggggatggacacccccagctgactgttggctctctgacgtcaacccaagctctggggatgggtggggaggggggcgggtgacgcccaccttcgggcagtcctgtgtgaggattaagggacgggggtgggaggtaggctgtggggtgggctggagtcctctccagagaggctcaacaaggaaaaatgccactccctacccaatgtctcccacacccaccctttttttggggtgcctaggttggtttcccctgcactcccgaccttagcttattgatcccacatttccatggtgtgagatcctctttactctgggcagaagtgagccccccccttaaagggaattcgatgcccccctagaataatctcatccccccacccgacttcttttgaaatgtgaacgtccttccttgactgtctagccactccctcccagaaaaactggctctgattggaatttctggcctcctaaggctccccaccccgaaatcagcccccagccttgtttctgatgacagtgttatcccaagaccctgccccctgccagccgaccctcctggccttcctcgttgggccgctctgatttcaggcagcaggggctgctgtgatgccgtcctgctggagtgatttatactgtgaaatgagttggccagattgtggggtgcagctgggtggggcagcacacctctggggggataatgtccccactcccgaaagcctttcctcggtctcccttccgtccatcccccttcttcctcccctcaacagtgagttagactcaagggggtgacagaaccgagaagggggtgacagtcctccatccacgtggcctctctctctctcctcaggaccctcagccctggcctttttctttaaggtcccccgaccaatccccagcctaggacgccaacttctcccaccccttggcccctcacatcctctccaggaagggagtgaggggctgtgacatttttccggagaagatttcagagctgaggctttggtacccccaaacccccaatatttttggactggcagactcaaggggctggaatctcatgattccatgcccgagtccgcccatccctgaccatggttttggctctcccaccccgccgttccctgcgcttcatctcatgaggatttctttatgaggcaaatttatattttttaatatcggggggtggaccacgccgccctccatccgtgctgcatgaaaaacattccacgtgccccttgtcgcgcgtctcccatcctgatcccagacccattccttagctatttatccctttcctggtttccgaaaggcaattatatctattatgtataagtaaatatattatatatggatgtgtgtgtgtgcgtgcgcgtgagtgtgtgagcgcttctgcagcctcggcctaggtcacgttggccctcaaagcgagccgttgaattggaaactgcttctagaaactctggctcagcctgtctcgggctgacccttttctgatcgtctcggcccctctgattgttcccgatggtctctctccctctgtcttttctcctccgcctgtgtccatctgaccgttttcacttgtctcctttctgactgtccctgccaatgctccagctgtcgtctgactctgggttcgttggggacatgagattttattttttgtgagtgagactgagggatcgtagatttttacaatctgtatctttgacaattctgggtgcgagtgtgagagtgtgagcagggcttgctcctgccaaccacaattcaatgaatccccgacccccctaccccatgctgtacttgtggttctctttttgtattttgcatctgaccccggggggctgggacagattggcaatgggccgtcccctctccccttggttctgcactgttgccaataaaaagctcttaaaaacgc

SEQ ID NO: 133403 - DNA, 3774 bp, Homo sapiens
  Payload ID: 6072
  Gene Symbol: FOSB
  Gene Name: FBJ murine osteosarcoma viral oncogene homolog B
  Uniprot ID: P53539
  ENST ID: ENST00000586615
  CDS Start-End: 738-1607
catttacgggaggggggagatgagcgctgctgaggcttgggggctcaggtcccgcaccattccccctccgcgacaatctgagagagctccagtggttacttttatctacctgtccgttcaccctaaactgtcactcgtcagtctcactctgagaagagacagtaacttgaaacgttgttctaaactcctaggcccgtcccccaaacacccttttgactgggacccccgcccctgcatgggacctcgcgcagaggggggtgtgtatgtgtgtgagtgtagaggaaggcttggcctaaggcctctccttctccctccccttgcctctggggtgggggtggggtgttgtggctgtgtgtgtggctgtggctccgtcccgggggttctgtcacccggctgtgtccagcctcctctccaccccccatacctaagagtcaccaacccggggtgtgattcaccacccgctggaaccgtgcaacctttccccgaggaagaaggaggaggtagaagccagttgagcagaaatcctctcattaaccactgcgtcacggtgtagtggaagggtgggtgttgtggctttttccctgtgacacacacatccacactcgctcaccctgtgctcactcacggggtcggtgtgtgttatgtgtgttgggtgtgtgtgtgtcggtgtctttgtttgtgtgtctacgcctgtgtgtgtatgtgtcaccccgtaggagtgcgccggtctcggggaaatgcccggttccttcgtgcccacggtcaccgcgatcacaaccagccaggacctccagtggcttgtgcaacccaccctcatctcttccatggcccagtcccaggggcagccactggcctcccagcccccggtcgtcgacccctacgacatgccgggaaccagctactccacaccaggcatgagtggctacagcagtggcggagcgagtggcagtggtgggccttccaccagcggaactaccagtgggcctgggcctgcccgcccagcccgagcccggcctaggagaccccgagaggagacgctcaccccagaggaagaggagaagcgaagggtgcgccgggaacgaaataaactagcagcagctaaatgcaggaaccggcggagggagctgaccgaccgactccaggcggagacagatcagttggaggaagaaaaagcagagctggagtcggagatcgccgagctccaaaaggagaaggaacgtctggagtttgtgctggtggcccacaaaccgggctgcaagatcccctacgaagaggggcccgggccgggcccgctggcggaggtgagagatttgccgggctcagcaccggctaaggaagatggcttcagctggctgctgccgcccccgccaccaccgcccctgcccttccagaccagccaagacgcaccccccaacctgacggcttctctctttacacacagtgaagttcaagtcctcggcgaccccttccccgttgttaacccttcgtacacttcttcgtttgtcctcacctgcccggaggtctccgcgttcgccggcgcccaacgcaccagcggcagtgaccagccttccgatcccctgaactcgccctccctcctcgctctgtgaactctttagacacacaaaacaaacaaacacatgggggagagagacttggaagaggaggaggaggaggagaaggaggagagagaggggaagagacaaagtgggtgtgtggcctccctggctcctccgtctgaccctctgcggccactgcgccactgccatcggacaggaggattccttgtgttttgtcctgcctcttgtttctgtgccccggcgaggccggagagctggtgactttggggacagggggtgggaaggggatggacacccccagctgactgttggctctctgacgtcaacccaagctctggggatgggtggggaggggggcgggtgacgcccaccttcgggcagtcctgtgtgaggattaagggacgggggtgggaggtaggctgtggggtgggctggagtcctctccagagaggctcaacaaggaaaaatgccactccctacccaatgtctcccacacccaccctttttttggggtgcctaggttggtttcccctgcactcccgaccttagcttattgatcccacatttccatggtgtgagatcctctttactctgggcagaagtgagccccccccttaaagggaattcgatgcccccctagaataatctcatccccccacccgacttcttttgaaatgtgaacgtccttccttgactgtctagccactccctcccagaaaaactggctctgattggaatttctggcctcctaaggctccccaccccgaaatcagcccccagccttgtttctgatgacagtgttatcccaagaccctgccccctgccagccgaccctcctggccttcctcgttgggccgctctgatttcaggcagcaggggctgctgtgatgccgtcctgctggagtgatttatactgtgaaatgagttggccagattgtggggtgcagctgggtggggcagcacacctctggggggataatgtccccactcccgaaagcctttcctcggtctcccttccgtccatcccccttcttcctcccctcaacagtgagttagactcaagggggtgacagaaccgagaagggggtgacagtcctccatccacgtggcctctctctctctcctcaggaccctcagccctggcctttttctttaaggtcccccgaccaatccccagcctaggacgccaacttctcccaccccttggcccctcacatcctctccaggaagggagtgaggggctgtgacatttttccggagaagatttcagagctgaggctttggtacccccaaacccccaatatttttggactggcagactcaaggggctggaatctcatgattccatgcccgagtccgcccatccctgaccatggttttggctctcccaccccgccgttccctgcgcttcatctcatgaggatttctttatgaggcaaatttatattttttaatatcggggggtggaccacgccgccctccatccgtgctgcatgaaaaacattccacgtgccccttgtcgcgcgtctcccatcctgatcccagacccattccttagctatttatccctttcctggtttccgaaaggcaattatatctattatgtataagtaaatatattatatatggatgtgtgtgtgtgcgtgcgcgtgagtgtgtgagcgcttctgcagcctcggcctaggtcacgttggccctcaaagcgagccgttgaattggaaactgcttctagaaactctggctcagcctgtctcgggctgacccttttctgatcgtctcggcccctctgattgttcccgatggtctctctccctctgtcttttctcctccgcctgtgtccatctgaccgttttcacttgtctcctttctgactgtccctgccaatgctccagctgtcgtctgactctgggttcgttggggacatgagattttattttttgtgagtgagactgagggatcgtagatttttacaatctgtatctttgacaattctgggtgcgagtgtgagagtgtgagcagggcttgctcctgccaaccacaattcaatgaatccccgacccccctaccccatgctgtacttgtggttctctttttgtattttgcatctgaccccggggggctgggacagattggcaatgggccgtcccctctccccttggttctgcactgttgccaataaaaagctcttaaaaacgca

SEQ ID NO: 133404 - DNA, 3089 bp, Homo sapiens
  Payload ID: 6072
  Gene Symbol: FOSB
  Gene Name: FBJ murine osteosarcoma viral oncogene homolog B
  ENST ID: ENST00000592811
  CDS Start-End: 775-1341
agagagtagttaagccttcagagcagttccaggagtccatttacgggaggggggagatgagcgctgctgaggcttgggggctcaggtcccgcaccattccccctccgcgacaatctgagagagctccagtggttacttttatctacctgtccgttcaccctaaactgtcactcgtcagtctcactctgagaagagacagtaacttgaaacgttgttctaaactcctaggcccgtcccccaaacacccttttgactgggacccccgcccctgcatgggacctcgcgcagaggggggtgtgtatgtgtgtgagtgtagaggaaggcttggcctaaggcctctccttctccctccccttgcctctggggtgggggtggggtgttgtggctgtgtgtgtggctgtggctccgtcccgggggttctgtcacccggctgtgtccagcctcctctccaccccccatacctaagagtcaccaacccggggtgtgattcaccacccgctggaaccgtgcaacctttccccgaggaagaaggaggaggtagaagccagttgagcagaaatcctctcattaaccactgcgtcacggtgtagtggaagggtgggtgttgtggctttttccctgtgacacacacatccacactcgctcaccctgtgctcactcacggggtcggtgtgtgttatgtgtgttgggtgtgtgtgtgtcggtgtctttgtttgtgtgtctacgcctgtgtgtgtatgtgtcaccccgtaggagtgcgccggtctcggggaaatgcccggttccttcgtgcccacggtcaccgcgatcacaaccagccaggacctccagtggcttgtgcaacccaccctcatctcttccatggcccagtcccaggggcagccactggcctcccagcccccggtcgtcgacccctacgacatgccgggaaccagctactccacaccaggcatgagtggctacagcagtggcggagcgagtggcagtggtgggccttccaccagcggaactaccagtgggcctgggcctgcccgcccagcccgagcccggcctaggagaccccgagaggagacgctcaccccagaggaagaggagaagcgaagggtgcgccgggaacgaaataaactagcagcagctaaatgcaggaaccggcggagggagctgaccgaccgactccaggcggagacagatcagttggaggaagaaaaagcagagctggagtcggagatcgccgagctccaaaaggagaaggaacgtctggagtttgtgctggtggcccacaaaccgggctgcaagatcccctacgaagaggggcccgggccgggcccgctggcggagtgaagttcaagtcctcggcgaccccttccccgttgttaacccttcgtacacttcttcgtttgtcctcacctgcccggaggtctccgcgttcgccggcgcccaacgcaccagcggcagtgaccagccttccgatcccctgaactcgccctccctcctcgctctgtgaactctttagacacacaaaacaaacaaacacatgggggagagagacttggaagaggaggaggaggaggagaaggaggagagagaggggaagagacaaagtgggtgtgtggcctccctggctcctccgtctgaccctctgcggccactgcgccactgccatcggacaggaggattccttgtgttttgtcctgcctcttgtttctgtgccccggcgaggccggagagctggtgactttggggacagggggtgggaaggggatggacacccccagctgactgttggctctctgacgtcaacccaagctctggggatgggtggggaggggggcgggtgacgcccaccttcgggcagtcctgtgtgaggattaagggacgggggtgggaggtaggctgtggggtgggctggagtcctctccagagaggctcaacaaggaaaaatgccactccctacccaatgtctcccacacccaccctttttttggggtgcctaggttggtttcccctgcactcccgaccttagcttattgatcccacatttccatggtgtgagatcctctttactctgggcagaagtgagccccccccttaaagggaattcgatgcccccctagaataatctcatccccccacccgacttcttttgaaatgtgaacgtccttccttgactgtctagccactccctcccagaaaaactggctctgattggaatttctggcctcctaaggctccccaccccgaaatcagcccccagccttgtttctgatgacagtgttatcccaagaccctgccccctgccagccgaccctcctggccttcctcgttgggccgctctgatttcaggcagcaggggctgctgtgatgccgtcctgctggagtgatttatactgtgaaatgagttggccagattgtggggtgcagctgggtggggcagcacacctctggggggataatgtccccactcccgaaagcctttcctcggtctcccttccgtccatcccccttcttcctcccctcaacagtgagttagactcaagggggtgacagaaccgagaagggggtgacagtcctccatccacgtggcctctctctctctcctcaggaccctcagccctggcctttttctttaaggtcccccgaccaatccccagcctaggacgccaacttctcccaccccttggcccctcacatcctctccaggaagggagtgaggggctgtgacatttttccggagaagatttcagagctgaggctttggtacccccaaacccccaatatttttggactggcagactcaaggggctggaatctcatgattccatgcccgagtccgcccatccctgaccatggttttggctctcccaccccgccgttccctgcgcttcatctcatgaggatttctttatgaggcaaatttatattttttaatatcggggggtggaccacgccgccctccatccgtgctgcatgaaaaacattccacgtgccccttgtcgcgcgtctcccatcctgatcccagacccattccttagctatttatccctttcctggtttccgaaaggcaattatatctattatgtataagtaaa

SEQ ID NO: 133405 - DNA, 1468 bp, Homo sapiens
  Payload ID: 6072
  Gene Symbol: FOSB
  Gene Name: FBJ murine osteosarcoma viral oncogene homolog B
  Uniprot ID: P53539
  ENST ID: ENST00000615753
  CDS Start-End: 593-1468
cattcataagactcagagctacggccacggcagggacacgcggaaccaagacttggaaacttgattgttgtggttcttcttgggggttatgaaatttcattaatctttttttttccggggagaaagtttttggaaagattcttccagatatttcttcattttcttttggaggaccgacttactttttttggtcttctttattactcccctccccccgtgggacccgccggacgcgtggaggagaccgtagctgaagctgattctgtacagcgggacagcgctttctgcccctgggggagcaacccctccctcgcccctgggtcctacggagcctgcactttcaagaggtacagcggcatcctgtgggggcctgggcaccgcaggaagactgcacagaaactttgccattgttggaacgggacgttgctccttccccgagcttccccggacagcgtactttgaggactcgctcagctcaccggggactcccacggctcaccccggacttgcaccttacttccccaacccggccatagccttggcttcccggcgacctcagcgtggtcacaggggcccccctgtgcccagggaaatgtttcaggctttccccggagactacgactccggctcccggtgcagctcctcaccctctgccgagtctcaatatctgtcttcggtggactccttcggcagtccacccaccgccgccgcctcccaggagtgcgccggtctcggggaaatgcccggttccttcgtgcccacggtcaccgcgatcacaaccagccaggacctccagtggcttgtgcaacccaccctcatctcttccatggcccagtcccaggggcagccactggcctcccagcccccggtcgtcgacccctacgacatgccgggaaccagctactccacaccaggcatgagtggctacagcagtggcggagcgagtggcagtggtgggccttccaccagcggaactaccagtgggcctgggcctgcccgcccagcccgagcccggcctaggagaccccgagaggagacgctcaccccagaggaagaggagaagcgaagggtgcgccgggaacgaaataaactagcagcagctaaatgcaggaaccggcggagggagctgaccgaccgactccaggcggagacagatcagttggaggaagaaaaagcagagctggagtcggagatcgccgagctccaaaaggagaaggaacgtctggagtttgtgctggtggcccacaaaccgggctgcaagatcccctacgaagaggggcccgggccgggcccgctggcggaggaagttcaagtcctcggcgaccccttccccgttgttaacccttcgtacacttcttcgtttgtcctcacctgcccggaggtctccgcgttcgccggcgcccaacgcaccagcggcagtgaccagccttccgatcccctgaactcgccctccctcctcgctctgtga

SEQ ID NO: 133406 - DNA, 1852 bp, Homo sapiens
  Payload ID: 6073
  Gene Symbol: FBXL12
  Gene Name: F-box and leucine-rich repeat protein 12
  Uniprot ID: Q9NXK8
  ENST ID: ENST00000247977
  CDS Start-End: 243-1223
aatcacgcctcagccacctcccgcaagcctctcactgcctcagccacgctttccaggctggtttctggtccccatccgcggctggtccggccctgggaccgaatcacttcccagcgagaggaaggtcaaatttctcgaccggctacgggaaggtcgcggccgccgccctgtcagccgcctcggcgcccccaggacccctcgggtctctttaaccggaagcggaagtgcgtgtcggcgggatcatggcgactttggtcgaactgccggactcggtcctgctcgagatcttctcttacctcccggtacgggaccggatccgcatctccagggtctgtcaccgctggaagaggctggtggacgaccggtggctgtggcgacatgtcgacctgacgctctacacgatgcgacctaaagtcatgtggcacctccttcgaaggtacatggcatcccggctccattccctgcggatgggtggctacctgttctctggctcccaggccccccagttgtcccctgctctgttgagagccctgggccagaagtgccccaacctgaagcgcctctgcctgcacgtggccgacctgagcatggtgcccatcaccagcctgcccagcaccttgaggaccctggagctgcacagctgcgagatctccatggcctggctccacaagcagcaggaccccaccgtgctgcccctgcttgaatgcatcgtgctggaccgcgtccccgccttccgtgacgagcacctgcagggcctgacgcgcttccgggccttgcgctcgctggtgctgggtggtacctaccgtgtgaccgagacagggctggatgctggcctgcaggagctcagctatctgcagaggcttgaggtgctgggctgcaccctgtctgccgacagcaccctgctggccatcagccgccacctccgagatgtgcgcaagatccggctgaccgtgaggggcctctctgcccctggcctggctgtgctggagggaatgccggccctggagagtctgtgcctgcagggtcccctcgtcaccccagaaatgccctcccccactgaaatcctctcctcctgcctcactatgcccaagctcagagtccttgagctgcaggggctggggtgggagggtcaggaggcggagaagatcctgtgtaaggggctgccccactgtatggtcatcgtcagggcttgccccaaagagtctatggactggtggatgtaactactccacctgcccttgggacccatcccagttttcatcattgagccccagaccctctgagcagcaccttgaagagggcagataatcagacttgaggaaactgaaagccccaggttgagagaacagaggcctagggacctccagaccattggaatcactgtttgccagctgtgtggccttggtcatatcatcagcctctgggaagcctagttcccacatctggaaataaggatgatcatagctacctcacggttacattgcaaagccttactctaaaagctcccagcctccagaggctctcaatgaagagtcaccttcatggtcgtcttcaggaacaggacggatgaagaaggggtggggttaagactcaggggcacctgagggtctgagcccccttatgagtacccaagaaggactgtctatgcatgcacacccacaagcctatacaccatttatatacctacacgcacgcaagagacgcggagagataggcgatgcagactcgcgattcaatgatcgatatgctcataaaagtgctcaattatattttctgtattttgtatgctgtattttccaagacgtatattattttactattaaagaaaaaaatcatttttttttcccgagaa

SEQ ID NO: 133407 - DNA, 879 bp, Homo sapiens
  Payload ID: 6073
  Gene Symbol: FBXL12
  Gene Name: F-box and leucine-rich repeat protein 12
  ENST ID: ENST00000592067
  CDS Start-End: 267-434
ggtcttagttcccagtcgcggccaaatcacgcctcagccacctcccgcaagcctctcactgcctcagccacgctttccaggctggtttctggtccccatccgcggctggtccggccctgggaccgaatcacttcccagcgagaggaaggtcaaatttctcgaccggctacgggaaggtcgcggccgccgccctgtcagccgcctcggcgcccccaggacccctcgggtctctttaaccggaagcggaagtgcgtgtcggcgggatcatggcgactttggtcgaactgccggactcggtcctgctcgagatcttctcttacctcccgggtctgtcaccgctggaagaggctggtggacgaccggtggctgtggcgacatgtcgacctgacgctctacacggccctatgatgccaagtagagaaatccagcaataaaaggcagatatgcgacctaaagtcatgtggcacctccttcgaaggtacatggcatcccggctccattccctgcggatgggtggctacctgttctctggctcccaggccccccagttgtcccctgctctgttgagagccctgggccagaagtgccccaacctgaagcgcctctgcctgcacgtggccgacctgagcatggtgcccatcaccagcctgcccagcaccttgaggaccctggagctgcacagctgcgagatctccatggcctggctccacaagcagcaggaccccaccgtgctgcccctgcttgaatgcatcgtgctggaccgcgtccccgccttccgtgacgagcacctgcagggcctgacgcgcttccgggccttgcgctcgctggtgctgggtggtacctaccgtgtgaccgagacagggctggatgctggcctgc

SEQ ID NO: 133408 - DNA, 1920 bp, Homo sapiens
  Payload ID: 6073
  Gene Symbol: FBXL12
  Gene Name: F-box and leucine-rich repeat protein 12
  ENST ID: ENST00000589626
  CDS Start-End: 267-434
ggtcttagttcccagtcgcggccaaatcacgcctcagccacctcccgcaagcctctcactgcctcagccacgctttccaggctggtttctggtccccatccgcggctggtccggccctgggaccgaatcacttcccagcgagaggaaggtcaaatttctcgaccggctacgggaaggtcgcggccgccgccctgtcagccgcctcggcgcccccaggacccctcgggtctctttaaccggaagcggaagtgcgtgtcggcgggatcatggcgactttggtcgaactgccggactcggtcctgctcgagatcttctcttacctcccggtacgggaccggatccgcatctccagggtctgtcaccgctggaagaggctggtggacgaccggtggctgtggcgacatgtcgacctgacgctctacacggccctatgatgccaagtagagaaatccagcaataaaaggcagatatgcgacctaaagtcatgtggcacctccttcgaaggtacatggcatcccggctccattccctgcggatgggtggctacctgttctctggctcccaggccccccagttgtcccctgctctgttgagagccctgggccagaagtgccccaacctgaagcgcctctgcctgcacgtggccgacctgagcatggtgcccatcaccagcctgcccagcaccttgaggaccctggagctgcacagctgcgagatctccatggcctggctccacaagcagcaggaccccaccgtgctgcccctgcttgaatgcatcgtgctggaccgcgtccccgccttccgtgacgagcacctgcagggcctgacgcgcttccgggccttgcgctcgctggtgctgggtggtacctaccgtgtgaccgagacagggctggatgctggcctgcaggagctcagctatctgcagaggcttgaggtgctgggctgcaccctgtctgccgacagcaccctgctggccatcagccgccacctccgagatgtgcgcaagatccggctgaccgtgaggggcctctctgcccctggcctggctgtgctggagggaatgccggccctggagagtctgtgcctgcagggtcccctcgtcaccccagaaatgccctcccccactgaaatcctctcctcctgcctcactatgcccaagctcagagtccttgagctgcaggggctggggtgggagggtcaggaggcggagaagatcctgtgtaaggggctgccccactgtatggtcatcgtcagggcttgccccaaagagtctatggactggtggatgtaactactccacctgcccttgggacccatcccagttttcatcattgagccccagaccctctgagcagcaccttgaagagggcagataatcagacttgaggaaactgaaagccccaggttgagagaacagaggcctagggacctccagaccattggaatcactgtttgccagctgtgtggccttggtcatatcatcagcctctgggaagcctagttcccacatctggaaataaggatgatcatagctacctcacggttacattgcaaagccttactctaaaagctcccagcctccagaggctctcaatgaagagtcaccttcatggtcgtcttcaggaacaggacggatgaagaaggggtggggttaagactcaggggcacctgagggtctgagcccccttatgagtacccaagaaggactgtctatgcatgcacacccacaagcctatacaccatttatatacctacacgcacgcaagagacgcggagagataggcgatgcagactcgcgattcaatgatcgatatgctcataaaagtgctcaattatattttctgtattttgtatgctgtattttccaagacgtatattattttactattaaagaaaaaaatcatttttttttcccgagaa

SEQ ID NO: 133409 - DNA, 582 bp, Homo sapiens
  Payload ID: 6073
  Gene Symbol: FBXL12
  Gene Name: F-box and leucine-rich repeat protein 12
  ENST ID: ENST00000586073
  CDS Start-End: 33-437
aaccggaagcggaagtgcgtgtcggcgggatcatggcgactttggtcgaactgccggactcggtcctgctcgagatcttctcttacctcccggtacgggaccggatccgcatctccagggtctgtcaccgctggaagaggctggtggacgaccggtggctgtggcgacatgtcgacctgacgctctacacggtacgcgcagctggccgggcgggcctgggccgcggtcgcggtgcccggaccccgaagaccacctctcccaccctgggactgtgtgtcggggcccgggctggggatttagagccaggcgatccggggcctatctcggcatcatcgcttaccagctcctcttcgacctcagggcctcaatttcctcatccctgcaatggggataaaggacagtacctgcctcacggggctattatgggacttcactgagatcacgcagggaaagggcttagaacagtctggcacatatttatcattcgataaatgctaatttatgactatgttatcaagtttttgttttgtttttgagacagagtctcgctctgctgctcaggctggagtgcagtggtgcgat

SEQ ID NO: 133410 - DNA, 777 bp, Homo sapiens
  Payload ID: 6073
  Gene Symbol: FBXL12
  Gene Name: F-box and leucine-rich repeat protein 12
  ENST ID: ENST00000590808
  CDS Start-End: 4-165
atcatggcgactttggtcgaactgccggactcggtcctgctcgagatcttctcttacctcccggtacgggaccggatccgcatctccagggtctgtcaccgctggaagaggctggtggacgaccggtggctgtggcgacatgtcgacctgacgctctacacgtagaaacggggttttgtcatgttggccaggatggtctcaatctcctgacctcgtgatccgcccgcatcggccttccaaagtgctgggattatgggcatgagccactgcgcccgggcttctttctcattttctcttgctgccgccatgtaagaagtgcctttcacctcctgccatgattttgaggcctccccagccatgtggaactatgcgacctaaagtcatgtggcacctccttcgaaggtacatggcatcccggctccattccctgcggatgggtggctacctgttctctggctcccaggccccccagttgtcccctgctctgttgagagccctgggccagaagtgccccaacctgaagcgcctctgcctgcacgtggccgacctgagcatggtgcccatcaccagcctgcccagcaccttgaggaccctggagctgcacagctgcgagatctccatggcctggctccacaagcagcaggaccccaccgtgctgcccctgcttgaatgcatcgtgctggaccgcgtccccgccttccgtgacgagcacctgcagggcctgacgcgcttccgggccttgcgctcgctggtgctgggtggtacctaccgtgtgac

SEQ ID NO: 133411 - DNA, 1736 bp, Homo sapiens
  Payload ID: 6073
  Gene Symbol: FBXL12
  Gene Name: F-box and leucine-rich repeat protein 12
  ENST ID: ENST00000586651
  CDS Start-End: 17-274
gcgtgtcggcgggatcatggcgactttggtcgaactgccggactcggtcctgctcgagatcttctcttacctcccggtacgggaccggatccgcatctccaggtgcggccccgcctccggggggaagggcagggcggagggcgcagctggcacctggagatgcgatgtggcccggggctggggtcgttctaaccgcgcgtcccctcccccagggtctgtcaccgctggaagaggctggtggacgaccggtggctgtggcgacatgtcgacctgacgctctacacgatgcgacctaaagtcatgtggcacctccttcgaaggtacatggcatcccggctccattccctgcggatgggtggctacctgttctctggctcccaggccccccagttgtcccctgctctgttgagagccctgggccagaagtgccccaacctgaagcgcctctgcctgcacgtggccgacctgagcatggtgcccatcaccagcctgcccagcaccttgaggaccctggagctgcacagctgcgagatctccatggcctggctccacaagcagcaggaccccaccgtgctgcccctgcttgaatgcatcgtgctggaccgcgtccccgccttccgtgacgagcacctgcagggcctgacgcgcttccgggccttgcgctcgctggtgctgggtggtacctaccgtgtgaccgagacagggctggatgctggcctgcaggagctcagctatctgcagaggcttgaggtgctgggctgcaccctgtctgccgacagcaccctgctggccatcagccgccacctccgagatgtgcgcaagatccggctgaccgtgaggggcctctctgcccctggcctggctgtgctggagggaatgccggccctggagagtctgtgcctgcagggtcccctcgtcaccccagaaatgccctcccccactgaaatcctctcctcctgcctcactatgcccaagctcagagtccttgagctgcaggggctggggtgggagggtcaggaggcggagaagatcctgtgtaaggggctgccccactgtatggtcatcgtcagggcttgccccaaagagtctatggactggtggatgtaactactccacctgcccttgggacccatcccagttttcatcattgagccccagaccctctgagcagcaccttgaagagggcagataatcagacttgaggaaactgaaagccccaggttgagagaacagaggcctagggacctccagaccattggaatcactgtttgccagctgtgtggccttggtcatatcatcagcctctgggaagcctagttcccacatctggaaataaggatgatcatagctacctcacggttacattgcaaagccttactctaaaagctcccagcctccagaggctctcaatgaagagtcaccttcatggtcgtcttcaggaacaggacggatgaagaaggggtggggttaagactcaggggcacctgagggtctgagcccccttatgagtacccaagaaggactgtctatgcatgcacacccacaagcctatacaccatttatatacctacacgcacgcaagagacgcggagagataggcgatgcagactcgcgattcaatgatcgatatgctcataaaagtgctcaattatattttctgtattttgtatgctgtattttccaagacgtatattattttactattaaagaaaaaaatcatttttttttcccgagaa

SEQ ID NO: 133412 - DNA, 956 bp, Homo sapiens
  Payload ID: 6073
  Gene Symbol: FBXL12
  Gene Name: F-box and leucine-rich repeat protein 12
  Uniprot ID: Q9NXK8
  ENST ID: ENST00000585379
  CDS Start-End: 100-921
gtctgtggtgtgtttgctgttcccagggtctgtcaccgctggaagaggctggtggacgaccggtggctgtggcgacatgtcgacctgacgctctacacgatgcgacctaaagtcatgtggcacctccttcgaaggtacatggcatcccggctccattccctgcggatgggtggctacctgttctctggctcccaggccccccagttgtcccctgctctgttgagagccctgggccagaagtgccccaacctgaagcgcctctgcctgcacgtggccgacctgagcatggtgcccatcaccagcctgcccagcaccttgaggaccctggagctgcacagctgcgagatctccatggcctggctccacaagcagcaggaccccaccgtgctgcccctgcttgaatgcatcgtgctggaccgcgtccccgccttccgtgacgagcacctgcagggcctgacgcgcttccgggccttgcgctcgctggtgctgggtggtacctaccgtgtgaccgagacagggctggatgctggcctgcaggagctcagctatctgcagaggcttgaggtgctgggctgcaccctgtctgccgacagcaccctgctggccatcagccgccacctccgagatgtgcgcaagatccggctgaccgtgaggggcctctctgcccctggcctggctgtgctggagggaatgccggccctggagagtctgtgcctgcagggtcccctcgtcaccccagaaatgccctcccccactgaaatcctctcctcctgcctcactatgcccaagctcagagtccttgagctgcaggggctggggtgggagggtcaggaggcggagaagatcctgtgtaaggggctgccccactgtatggtcatcgtcagggcttgccccaaagagtctatggactggtggatgtaactactccacctgcccttgggacccatcccagtttt

SEQ ID NO: 133413 - DNA, 581 bp, Homo sapiens
  Payload ID: 6073
  Gene Symbol: FBXL12
  Gene Name: F-box and leucine-rich repeat protein 12
  ENST ID: ENST00000590277
  CDS Start-End: 318-581
ttagttcccagtcgcggccaaatcacgcctcagccacctcccgcaagcctctcactgcctcagccacgctttccaggctggtttctggtccccatccgcggctggtccggccctgggaccgaatcacttcccagcgagaggaaggtcaaatttctcgaccggctacgggaaggtcgcggccgccgccctgtcagccgcctcggcgcccccaggacccctcgggtctctttaaccggaagcggaaggtctgtcaccgctggaagaggctggtggacgaccggtggctgtggcgacatgtcgacctgacgctctacacgatgcgacctaaagtcatgtggcacctccttcgaaggtacatggcatcccggctccattccctgcggatgggtggctacctgttctctggctcccaggccccccagttgtcccctgctctgttgagagccctgggccagaagtgccccaacctgaagcgcctctgcctgcacgtggccgacctgagcatggtgcccatcaccagcctgcccagcaccttgaggaccctggagctgcacagctgcgagatctccatggcctggctc

SEQ ID NO: 133414 - DNA, 1033 bp, Homo sapiens
  Payload ID: 6073
  Gene Symbol: FBXL12
  Gene Name: F-box and leucine-rich repeat protein 12
  ENST ID: ENST00000589438
  CDS Start-End: 1-258
atggcgactttggtcgaactgccggactcggtcctgctcgagatcttctcttacctcccggtacgggaccggatccgcatctccaggtgcggccccgcctccggggggaagggcagggcggagggcgcagctggcacctggagatgcgatgtggcccggggctggggtcgttctaaccgcgcgtcccctcccccagggtctgtcaccgctggaagaggctggtggacgaccggtggctgtggcgacatgtcgacctgacgctctacacgaaacggggttttgtcatgttggccaggatggtctcaatctcctgacctcgtgatccgcccgcatcggccttccaaagtgctgggattatgggcatgagccactgcgcccgggcttctttctcattttctcttgctgccgccatgtaagaagtgcctttcacctcctgccatgattttgaggcctccccagccatgtggaactatgcgacctaaagtcatgtggcacctccttcgaaggtacatggcatcccggctccattccctgcggatgggtggctacctgttctctggctcccaggccccccagttgtcccctgctctgttgagagccctgggccagaagtgccccaacctgaagcgcctctgcctgcacgtggccgacctgagcatggtgcccatcaccagcctgcccagcaccttgaggaccctggagctgcacagctgcgagatctccatggcctggctccacaagcagcaggaccccaccgtgctgcccctgcttgaatgcatcgtgctggaccgcgtccccgccttccgtgacgagcacctgcagggcctgacgcgcttccgggccttgcgctcgctggtgctgggtggtacctaccgtgtgaccgagacagggctggatgctggcctgcaggagctcagctatctgcagaggcttgaggtgctgggctgcaccctgtctgccgacagcaccctgctggccatcagccgccacctccgagatgtgcgcaagatccggctgaccgtgaggggcctct

SEQ ID NO: 133415 - DNA, 544 bp, Homo sapiens
  Payload ID: 6073
  Gene Symbol: FBXL12
  Gene Name: F-box and leucine-rich repeat protein 12
  ENST ID: ENST00000586469
  CDS Start-End: 291-500
actccagccccgccttctggacttggtcttagttcccagtcgcggccaaatcacgcctcagccacctcccgcaagcctctcactgcctcagccacgctttccaggctggtttctggtccccatccgcggctggtccggccctgggaccgaatcacttcccagcgagaggaaggtcaaatttctcgaccggctacgggaaggtcgcggccgccgccctgtcagccgcctcggcgcccccaggacccctcgggtctctttaaccggaagcggaagtgcgtgtcggcgggatcatggcgactttggtcgaactgccggactcggtcctgctcgagatcttctcttacctcccggtacgggaccggatccgcatctccagatgcgacctaaagtcatgtggcacctccttcgaaggtacatggcatcccggctccattccctgcggatgggtggctacctgttctctggctcccaggccccccagttgtcccctgctctgttgagagccctgggccagaagtgccccaacctgaagcgcctctgcctg

SEQ ID NO: 133416 - DNA, 1843 bp, Homo sapiens
  Payload ID: 6073
  Gene Symbol: FBXL12
  Gene Name: F-box and leucine-rich repeat protein 12
  ENST ID: ENST00000588922
  CDS Start-End: 264-407
cttagttcccagtcgcggccaaatcacgcctcagccacctcccgcaagcctctcactgcctcagccacgctttccaggctggtttctggtccccatccgcggctggtccggccctgggaccgaatcacttcccagcgagaggaaggtcaaatttctcgaccggctacgggaaggtcgcggccgccgccctgtcagccgcctcggcgcccccaggacccctcgggtctctttaaccggaagcggaagtgcgtgtcggcgggatcatggcgactttggtcgaactgccggactcggtcctgctcgagatcttctcttacctcccgggtctgtcaccgctggaagaggctggtggacgaccggtggctgtggcgacatgtcgacctgacgctctacacgatgcgacctaaagtcatgtggcacctccttcgaaggtacatggcatcccggctccattccctgcggatgggtggctacctgttctctggctcccaggccccccagttgtcccctgctctgttgagagccctgggccagaagtgccccaacctgaagcgcctctgcctgcacgtggccgacctgagcatggtgcccatcaccagcctgcccagcaccttgaggaccctggagctgcacagctgcgagatctccatggcctggctccacaagcagcaggaccccaccgtgctgcccctgcttgaatgcatcgtgctggaccgcgtccccgccttccgtgacgagcacctgcagggcctgacgcgcttccgggccttgcgctcgctggtgctgggtggtacctaccgtgtgaccgagacagggctggatgctggcctgcaggagctcagctatctgcagaggcttgaggtgctgggctgcaccctgtctgccgacagcaccctgctggccatcagccgccacctccgagatgtgcgcaagatccggctgaccgtgaggggcctctctgcccctggcctggctgtgctggagggaatgccggccctggagagtctgtgcctgcagggtcccctcgtcaccccagaaatgccctcccccactgaaatcctctcctcctgcctcactatgcccaagctcagagtccttgagctgcaggggctggggtgggagggtcaggaggcggagaagatcctgtgtaaggggctgccccactgtatggtcatcgtcagggcttgccccaaagagtctatggactggtggatgtaactactccacctgcccttgggacccatcccagttttcatcattgagccccagaccctctgagcagcaccttgaagagggcagataatcagacttgaggaaactgaaagccccaggttgagagaacagaggcctagggacctccagaccattggaatcactgtttgccagctgtgtggccttggtcatatcatcagcctctgggaagcctagttcccacatctggaaataaggatgatcatagctacctcacggttacattgcaaagccttactctaaaagctcccagcctccagaggctctcaatgaagagtcaccttcatggtcgtcttcaggaacaggacggatgaagaaggggtggggttaagactcaggggcacctgagggtctgagcccccttatgagtacccaagaaggactgtctatgcatgcacacccacaagcctatacaccatttatatacctacacgcacgcaagagacgcggagagataggcgatgcagactcgcgattcaatgatcgatatgctcataaaagtgctcaattatattttctgtattttgtatgctgtattttccaagacgtatattattttactattaaagaaaaaaatcatttttttttcccg

SEQ ID NO: 133417 - DNA, 1005 bp, Homo sapiens
  Payload ID: 6073
  Gene Symbol: FBXL12
  Gene Name: F-box and leucine-rich repeat protein 12
  Uniprot ID: Q9NXK8
  ENST ID: ENST00000591009
  CDS Start-End: 184-1005
cggtgactgagatcgtgccattgcactccagcctgggcaacaagcaaaactccgtctcaaaaaaaaagaaaagaaaagaaacacctttgtaagcacacataaagaatatgttattagacaattttcctttttccattaggccctatgatgccaagtagagaaatccagcaataaaaggcagatatgcgacctaaagtcatgtggcacctccttcgaaggtacatggcatcccggctccattccctgcggatgggtggctacctgttctctggctcccaggccccccagttgtcccctgctctgttgagagccctgggccagaagtgccccaacctgaagcgcctctgcctgcacgtggccgacctgagcatggtgcccatcaccagcctgcccagcaccttgaggaccctggagctgcacagctgcgagatctccatggcctggctccacaagcagcaggaccccaccgtgctgcccctgcttgaatgcatcgtgctggaccgcgtccccgccttccgtgacgagcacctgcagggcctgacgcgcttccgggccttgcgctcgctggtgctgggtggtacctaccgtgtgaccgagacagggctggatgctggcctgcaggagctcagctatctgcagaggcttgaggtgctgggctgcaccctgtctgccgacagcaccctgctggccatcagccgccacctccgagatgtgcgcaagatccggctgaccgtgaggggcctctctgcccctggcctggctgtgctggagggaatgccggccctggagagtctgtgcctgcagggtcccctcgtcaccccagaaatgccctcccccactgaaatcctctcctcctgcctcactatgcccaagctcagagtccttgagctgcaggggctggggtgggagggtcaggaggcggagaagatcctgtgtaaggggctgccccactgtatggtcatcgtcagggcttgccccaaagagtctatggactggtggatgtaa

SEQ ID NO: 133418 - DNA, 795 bp, Homo sapiens
  Payload ID: 6073
  Gene Symbol: FBXL12
  Gene Name: F-box and leucine-rich repeat protein 12
  ENST ID: ENST00000592732
  CDS Start-End: 1-125
cggtcctgctcgagatcttctcttacctcccgggtctgtcaccgctggaagaggctggtggacgaccggtggctgtggcgacatgtcgacctgacgctctacacggctggagtgcagtggtatgatctcagctcactgcaacctctgcctcctgggttcaagtgattcccctgcctcagcctcctgagaagctgggactacagatgcgacctaaagtcatgtggcacctccttcgaaggtacatggcatcccggctccattccctgcggatgggtggctacctgttctctggctcccaggccccccagttgtcccctgctctgttgagagccctgggccagaagtgccccaacctgaagcgcctctgcctgcacgtggccgacctgagcatggtgcccatcaccagcctgcccagcaccttgaggaccctggagctgcacagctgcgagatctccatggcctggctccacaagcagcaggaccccaccgtgctgcccctgcttgaatgcatcgtgctggaccgcgtccccgccttccgtgacgagcacctgcagggcctgacgcgcttccgggccttgcgctcgctggtgctgggtggtacctaccgtgtgaccgagacagggctggatgctggcctgcaggagctcagctatctgcagaggcttgaggtgctgggctgcaccctgtctgccgacagcaccctgctggccatcagccgccacctccgagatgtgcgcaagatccggctgaccgtgaggggcctctctgcccctggcctggctgtgctggagggaa

SEQ ID NO: 133419 - DNA, 2744 bp, Homo sapiens
  Payload ID: 6074
  Gene Symbol: FBXL13
  Gene Name: F-box and leucine-rich repeat protein 13
  Uniprot ID: Q8NEE6
  ENST ID: ENST00000313221
  CDS Start-End: 428-2635
agaatgcgagaaagtgaagtcaaattcggacttgtaggcgatcagggctgaagacgctgattagagagaaaacagagggtgatggtggctgcacgtggggaatgggtgacatctcccagggggaatgagcacaaggcccagatcggaaaccccaaactcagattttaaggtttggacaagaagtacctgaggagtggaggagtgagaaagaagtgccagagagcctgaggaggaaaatcagcagactggcattatgaagaatgttgtcagaagtagggagtaggcactagtcacctaagataaggagctggattctgcccaaggcactgttatgtggtatacttgttacatgtcctgaggatccgctgaggtatttagagggaatgatcatggttataatcaaaagtggtcttcagaatcttctttgatgactccggaattgatgataaaagcctgtagcttttatactggacatttagtaaagactcatttttgcacttggagagacatagctcgtacaaatgaaaatgtcgtcctggctgaaaaaatgaacagagcagtgacatgctacaatttcagacttcaaaaatctgtatttcatcactggcactcttatatggaagaccagaaagaaaaacttaaaaatattctattgcggatacaacagatcatctattgtcacaagctaaccattatcctaacaaaatggcggaatacagcaagacataagagtaaaaagaaagaagatgagctgatattaaaacatgaacttcaattgaaaaaatggaaaaataggttaatactcaaaagagctgctgcagaagaatccaattttcctgaacgaagttcttctgaagtctttcttgtagatgagactctaaaatgtgacatttcactgttacctgaaagagcaatattacagattttcttctacctcagtttaaaagatgtgataatatgtggtcaagttaatcatgcctggatgttgatgacacaactaaactcactgtggaatgctattgatttttcctcagtgaaaaatgtgattccagataaatatatagtgtctactttgcaaaggtggcgtttaaatgtgctgcgtttgaattttcgtggttgtcttctccgacccaaaactttcagatctgtcagccactgtaggaacttgcaagagttgaatgtctctgactgcccaacattcacagatgaatcaatgagacacatttctgagggctgcccgggggtcctgtgtctcaatctgtctaacacaactatcaccaacaggacgatgcgactcctgccgaggcacttccacaacttacagaatcttagtttggcttattgcagacggttcacagacaaaggcttacagtacctgaacttggggaatggatgccacaagctcatctatctggacctctctggctgcacccagatttcagtccaaggcttcaggtacattgcaaacagctgcactggaattatgcatcttaccattaatgacatgccaactctgacggacaactgtgtaaaagctttagttgaaaaatgctctcgtattacatcgctggttttcactggtgcaccgcatatctccgattgtactttcagagctctttctgcttgtaaactcagaaagatccgatttgaaggaaataaaagggttactgatgcatccttcaaatttatagacaagaattatccaaatctcagtcacatttatatggctgactgcaagggaataacagacagcagcctcagatccctttcacctttgaagcaactgactgtgttgaatttggcaaattgtgtaagaattggtgatatgggactaaagcaatttcttgatggtcctgcaagcatgaggataagagagctaaatttaagcaactgtgtgcggctaagtgatgcctctgttatgaaactatctgagcgctgccctaatttaaactacttgagtttacgaaattgtgaacatttgactgcccaaggaattggatatattgtaaacatcttttccttggtatcaatagatctctctggaacagacatctctaatgagggtttgaatgtgctttccagacataaaaaattgaaggaactttctgtatctgaatgttatagaatcactgatgatggaattcaggcattctgcaaaagctcactgatcttggaacatttggatgtctcttattgctcccagctgtcagatatgattatcaaagcactggccatttactgcattaacctcacatctctcagcattgctggctgtccaaagattactgactcagcaatggagatgttatcggcaaaatgccattacctgcacattttggatatctctggttgtgtcttgcttactgaccaaatccttgaggaccttcagataggctgcaaacaactccggatccttaagatgcaatactgcacaaatatttccaagaaggcagctcaaagaatgtcatctaaagttcagcagcaggaatacaacactaatgaccctccacgttggtttggctatgatagggaaggaaaccctgttacagagcttgacaacataacatcatctaaaggagccttagaattaacagtgaaaaagtcaacatacagcagtgaagaccaagcagcgtgaccttcagcctcaagcaggaagaacaaaaaatcaagaacttggcaagttttctccatttgttgcaagtatgtttactagctgaatctcaataacaatgtaaacaagcaac

SEQ ID NO: 133420 - DNA, 2478 bp, Homo sapiens
  Payload ID: 6074
  Gene Symbol: FBXL13
  Gene Name: F-box and leucine-rich repeat protein 13
  Uniprot ID: Q8NEE6
  ENST ID: ENST00000379305
  CDS Start-End: 243-2366
gcccggcccctagtcccagcgcggggagggtactatcgcagcttctccgtcaggccttgggccatggcctcgctacgcaatgccaacccgaggctgaagaactacttcaaggagaactacattcctcaggtctgcgaggcactgttatgtggtatacttgttacatgtcctgaggatccgctgaggtatttagagggaatgatcatggttataatcaaaagtggtcttcagaatcttctttgatgactccggaattgatgataaaagcctgtagcttttatactggacatttagtaaagactcatttttgcacttggagagacatagctcgtacaaatgaaaatgtcgtcctggctgaaaaaatgaacagagcagtgacatgctacaatttcagacttcaaaaatctgtatttcatcactggcactcttatatggaagaccagaaagaaaaacttaaaaatattctattgcggatacaacagatcatctattgtcacaagctaaccattatcctaacaaaatggcggaatacagcaagacataagagtaaaaagaaagaagatgagctgatattaaaacatgaacttcaattgaaaaaatggaaaaataggttaatactcaaaagagctgctgcagaagaatccaattttcctgaacgaagttcttctgaagtctttcttgtagatgagactctaaaatgtgacatttcactgttacctgaaagagcaatattacagattttcttctacctcagtttaaaagatgtgataatatgtggtcaagttaatcatgcctggatgttgatgacacaactaaactcactgtggaatgctattgatttttcctcagtgaaaaatgtgattccagataaatatatagtgtctactttgcaaaggtggcgtttaaatgtgctgcgtttgaattttcgtggttgtcttctccgacccaaaactttcagatctgtcagccactgtaggaacttgcaagagttgaatgtctctgactgcccaacattcacagatgaatcaatgagacacatttctgagggctgcccgggggtcctgtgtctcaatctgtctaacacaactatcaccaacaggacgatgcgactcctgccgaggcacttccacaacttacagaatcttagtttggcttattgcagacggttcacagacaaaggcttacagtacctgaacttggggaatggatgccacaagctcatctatctggacctctctggctgcacccagatttcagtccaaggcttcaggtacattgcaaacagctgcactggaattatgcatcttaccattaatgacatgccaactctgacggacaactgtgtaaaagctttagttgaaaaatgctctcgtattacatcgctggttttcactggtgcaccgcatatctccgattgtactttcagagctctttctgcttgtaaactcagaaagatccgatttgaaggaaataaaagggttactgatgcatccttcaaatttatagacaagaattatccaaatctcagtcacatttatatggctgactgcaagggaataacagacagcagcctcagatccctttcacctttgaagcaactgactgtgttgaatttggcaaattgtgtaagaattggtgatatgggactaaagcaatttcttgatggtcctgcaagcatgaggataagagagctaaatttaagcaactgtgtgcggctaagtgatgcctctgttatgaaactatctgagcgctgccctaatttaaactacttgagtttacgaaattgtgaacatttgactgcccaaggaattggatatattgtaaacatcttttccttggtatcaatagatctctctggaacagacatctctaatgaggcattctgcaaaagctcactgatcttggaacatttggatgtctcttattgctcccagctgtcagatatgattatcaaagcactggccatttactgcattaacctcacatctctcagcattgctggctgtccaaagattactgactcagcaatggagatgttatcggcaaaatgccattacctgcacattttggatatctctggttgtgtcttgcttactgaccaaatccttgaggaccttcagataggctgcaaacaactccggatccttaagatgcaatactgcacaaatatttccaagaaggcagctcaaagaatgtcatctaaagttcagcagcaggaatacaacactaatgaccctccacgttggtttggctatgatagggaaggaaaccctgttacagagcttgacaacataacatcatctaaaggagccttagaattaacagtgaaaaagtcaacatacagcagtgaagaccaagcagcgtgaccttcagcctcaagcaggaagaacaaaaaatcaagaacttggcaagttttctccatttgttgcaagtatgtttactagctgaatctcaataacaatgtaaacaagcaacaaa

SEQ ID NO: 133421 - DNA, 2577 bp, Homo sapiens
  Payload ID: 6074
  Gene Symbol: FBXL13
  Gene Name: F-box and leucine-rich repeat protein 13
  ENST ID: ENST00000379308
  CDS Start-End: 74-2125
gcccgcacgcgcccggcccctagtcccagcgcggggagggtactatcgcagcttctccgtcaggccttgggccatggcctcgctacgcaatgccaacccgaggctgaagaactacttcaaggagaactacattcctcaggtctgcgaggcactgttatgtggtatacttgttacatgtcctgaggatccgctgaggtatttagagggaatgatcatggttataatcaaaagtggtcttcagaatcttctttgggatatgtgcattactccatcaatgaaaccaaacattcgaagattgtctgaaacttacctggaacaactttttgaattggatgatcagctgatgactccggaattgatgataaaagcctgtagcttttatactggacatttagtaaagactcatttttgcacttggagagacatagctcgtacaaatgaaaatgtcgtcctggctgaaaaaatgaacagagcagtgacatgctacaatttcagacttcaaaaatctgtatttcatcactggcactcttatatggaagaccagaaagaaaaacttaaaaatattctattgcggatacaacagatcatctattgtcacaagctaaccattatcctaacaaaatggcggaatacagcaagacataagagtaaaaagaaagaagatgagctgatattaaaacatgaacttcaattgaaaaaatggaaaaataggttaatactcaaaagagctgctgcagaagaatccaattttcctgaacgaagttcttctgaagtctttcttgtagatgagactctaaaatgtgacatttcactgttacctgaaagagcaatattacagattttcttctacctcagtttaaaagatgtgataatatgtggtcaagttaatcatgcctggatgttgatgacacaactaaactcactgtggaatgctattgatttttcctcagtgaaaaatgtgattccagataaatatatagtgtctactttgcaaaggtggcgtttaaatgtgctgcgtttgaattttcgtggttgtcttctccgacccaaaactttcagatctgtcagccactgtaggaacttgcaagagttgaatgtctctgactgcccaacattcacagatgaatcaatgagacacatttctgagggctgcccgggggtcctgtgtctcaatctgtctaacacaactatcaccaacaggacgatgcgactcctgccgaggcacttccacaacttacagaatcttagtttggcttattgcagacggttcacagacaaaggcttacagtacctgaacttggggaatggatgccacaagctcatctatctggacctctctggctgcacccagatttcagtccaaggcttcaggtacattgcaaacagctgcactggaattatgcatcttaccattaatgacatgccaactctgacggacaactgtgtaaaagctttagttgaaaaatgctctcgtattacatcgctggttttcactggtgcaccgcatatctccgattgtactttcagagctctttctgcttgtaaactcagaaagatccgatttgaaggaaataaaagggttactgatgcatccttcaaatttatagacaagaattatccaaatctcagtcacatttatatggctgactgcaagggaataacagacagcagcctcagatccctttcacctttgaagcaactgactgtgttgaatttggcaaattgtgtaagaattggtgatatgggactaaagcaatttcttgatggtcctgcaagcatgaggataagagagctaaatttaagcaactgtgtgcggctaagtgatgcctctgttatgaaactatctgagcgctgccctaatttaaactacttgagtttacgaaattgtgaacatttgactgcccaaggaattggatatattgtaaacatcttttccttggtatcaatagatctctctggaacagacatctctaatgagggtttgaatgtgctttccagacataaaaaattgaaggaactttctgtatctgaatgttatagaatcactgatgatggaattcaggtaagatcattaagatcatctgttaaagaagtacttactttggctctgtgttcagattactgactcagcaatggagatgttatcggcaaaatgccattacctgcacattttggatatctctggttgtgtcttgcttactgaccaaatccttgaggaccttcagataggctgcaaacaactccggatccttaagatgcaatactgcacaaatatttccaagaaggcagctcaaagaatgtcatctaaagttcagcagcaggaatacaacactaatgaccctccacgttggtttggctatgatagggaaggaaaccctgttacagagcttgacaacataacatcatctaaaggagccttagaattaacagtgaaaaagtcaacatacagcagtgaagaccaagcagcgtgaccttcagcctcaagcaggaagaacaaaaaatcaagaacttggcaagttttctccatttgttgcaagtatgtttactagctgaatctcaataacaatgtaaacaagc

SEQ ID NO: 133422 - DNA, 2577 bp, Homo sapiens
  Payload ID: 6074
  Gene Symbol: FBXL13
  Gene Name: F-box and leucine-rich repeat protein 13
  Uniprot ID: Q8NEE6
  ENST ID: ENST00000436908
  CDS Start-End: 261-2468
ataagcctgttgttcaagacgacccagcaaactgtatattttcaccaggtaaagaaagtttttatggttcaccgaggataatcaactgcttcacagtctagaacctaaagactggatcttttgagaacatcagagaaagactgtgcttgccatccacactgcaacaaaactttggaaccttgaactttaagttcataatctcacaactgagaagggtccctccacactattggaactgtacacccattggaacccttaagatgactccggaattgatgataaaagcctgtagcttttatactggacatttagtaaagactcatttttgcacttggagagacatagctcgtacaaatgaaaatgtcgtcctggctgaaaaaatgaacagagcagtgacatgctacaatttcagacttcaaaaatctgtatttcatcactggcactcttatatggaagaccagaaagaaaaacttaaaaatattctattgcggatacaacagatcatctattgtcacaagctaaccattatcctaacaaaatggcggaatacagcaagacataagagtaaaaagaaagaagatgagctgatattaaaacatgaacttcaattgaaaaaatggaaaaataggttaatactcaaaagagctgctgcagaagaatccaattttcctgaacgaagttcttctgaagtctttcttgtagatgagactctaaaatgtgacatttcactgttacctgaaagagcaatattacagattttcttctacctcagtttaaaagatgtgataatatgtggtcaagttaatcatgcctggatgttgatgacacaactaaactcactgtggaatgctattgatttttcctcagtgaaaaatgtgattccagataaatatatagtgtctactttgcaaaggtggcgtttaaatgtgctgcgtttgaattttcgtggttgtcttctccgacccaaaactttcagatctgtcagccactgtaggaacttgcaagagttgaatgtctctgactgcccaacattcacagatgaatcaatgagacacatttctgagggctgcccgggggtcctgtgtctcaatctgtctaacacaactatcaccaacaggacgatgcgactcctgccgaggcacttccacaacttacagaatcttagtttggcttattgcagacggttcacagacaaaggcttacagtacctgaacttggggaatggatgccacaagctcatctatctggacctctctggctgcacccagatttcagtccaaggcttcaggtacattgcaaacagctgcactggaattatgcatcttaccattaatgacatgccaactctgacggacaactgtgtaaaagctttagttgaaaaatgctctcgtattacatcgctggttttcactggtgcaccgcatatctccgattgtactttcagagctctttctgcttgtaaactcagaaagatccgatttgaaggaaataaaagggttactgatgcatccttcaaatttatagacaagaattatccaaatctcagtcacatttatatggctgactgcaagggaataacagacagcagcctcagatccctttcacctttgaagcaactgactgtgttgaatttggcaaattgtgtaagaattggtgatatgggactaaagcaatttcttgatggtcctgcaagcatgaggataagagagctaaatttaagcaactgtgtgcggctaagtgatgcctctgttatgaaactatctgagcgctgccctaatttaaactacttgagtttacgaaattgtgaacatttgactgcccaaggaattggatatattgtaaacatcttttccttggtatcaatagatctctctggaacagacatctctaatgagggtttgaatgtgctttccagacataaaaaattgaaggaactttctgtatctgaatgttatagaatcactgatgatggaattcaggcattctgcaaaagctcactgatcttggaacatttggatgtctcttattgctcccagctgtcagatatgattatcaaagcactggccatttactgcattaacctcacatctctcagcattgctggctgtccaaagattactgactcagcaatggagatgttatcggcaaaatgccattacctgcacattttggatatctctggttgtgtcttgcttactgaccaaatccttgaggaccttcagataggctgcaaacaactccggatccttaagatgcaatactgcacaaatatttccaagaaggcagctcaaagaatgtcatctaaagttcagcagcaggaatacaacactaatgaccctccacgttggtttggctatgatagggaaggaaaccctgttacagagcttgacaacataacatcatctaaaggagccttagaattaacagtgaaaaagtcaacatacagcagtgaagaccaagcagcgtgaccttcagcctcaagcaggaagaacaaaaaatcaagaacttggcaagttttctccatttgttgcaagtatgtttactagctgaatctcaataacaatgtaaacaagcaac

SEQ ID NO: 133423 - DNA, 672 bp, Homo sapiens
  Payload ID: 6074
  Gene Symbol: FBXL13
  Gene Name: F-box and leucine-rich repeat protein 13
  ENST ID: ENST00000440067
  CDS Start-End: 42-672
ggggagggtactatcgcagcttctccgtcaggccttgggccatggcctcgctacgcaatgccaacccgaggctgaagaactacttcaaggagaactacattcctcaggtctgcgaggcactgttatgtggtatacttgttacatgtcctgaggatccgctgaggtatttagagggaatgatcatggttataatcaaaagtggtcttcagaatcttctttgggatatgtgcattactccatcaatgaaaccaaacattcgaagattgtctgaaacttacctggaacaactttttgaattggatgatcagctgatgactccggaattgatgataaaagcctgtagcttttatactggacatttagtaaagactcatttttgcacttggagagacatagctcgtacaaatgaaaatgtcgtcctggctgaaaaaatgaacagagcagtgacatgctacaatttcagacttcaaaaatctgtatttcatcactggcactcttatatggaagaccagaaagaaaaacttaaaaatattctattgcggatacaacagatcatctattgtcacaagctaaccattatcctaacaaaatggcggaatacagcaagacataagagtaaaaagaaagaagatgagctgatattaaaacatgaacttcaattgaaaaaatgga

SEQ ID NO: 133424 - DNA, 2274 bp, Homo sapiens
  Payload ID: 6074
  Gene Symbol: FBXL13
  Gene Name: F-box and leucine-rich repeat protein 13
  Uniprot ID: Q8NEE6
  ENST ID: ENST00000455112
  CDS Start-End: 135-2207
aaggagaactacattcctcaggtctgcgaggcactgttatgtggtatacttgttacatgtcctgaggatccgctgaggtatttagagggaatgatcatggttataatcaaaagtggtcttcagaatcttctttgatgactccggaattgatgataaaagcctgtagcttttatactggacatttagtaaagactcatttttgcacttggagagacatagctcgtacaaatgaaaatgtcgtcctggctgaaaaaatgaacagagcagtgacatgctacaatttcagacttcaaaaatctgtatttcatcactggcactcttatatggaagaccagaaagaaaaacttaaaaatattctattgcggatacaacagatcatctattgtcacaagctaaccattatcctaacaaaatggcggaatacagcaagacataagagtaaaaagaaagaagatgagctgatattaaaacatgaacttcaattgaaaaaatggaaaaataggttaatactcaaaagagctgctgcagaagaatccaattttcctgaacgaagttcttctgaagtctttcttgtagatgagactctaaaatgtgacatttcactgttacctgaaagagcaatattacagattttcttctacctcagtttaaaagatgtgataatatgtggtcaagttaatcatgcctggatgttgatgacacaactaaactcactgtggaatgctattgatttttcctcagtgaaaaatgtgattccagataaatatatagtgtctactttgcaaaggtggcgtttaaatgtgctgcgtttgaattttcgtggttgtcttctccgacccaaaactttcagatctgtcagccactgtaggaacttgcaagagttgaatgtctctgactgcccaacattcacagatgaatcaatgagacacatttctgagggctgcccgggggtcctgtgtctcaatctgtctaacacaactatcaccaacaggacgatgcgactcctgccgaggcacttccacaacttacagaatcttagtttggcttattgcagacggttcacagacaaaggcttacagtacctgaacttggggaatggatgccacaagctcatctatctggacctctctggctgcacccagatttcagtccaaggcttcaggtacattgcaaacagctgcactggaattatgcatcttaccattaatgacatgccaactctgacggacaactgtgtaaaagctttagttgaaaaatgctctcgtattacatcgctggttttcactggtgcaccgcatatctccgattgtactttcagagctctttctgcttgtaaactcagaaagatccgatttgaaggaaataaaagggttactgatgcatccttcaaatttatagacaagaattatccaaatctcagtcacatttatatggctgactgcaagggaataacagacagcagcctcagatccctttcacctttgaagcaactgactgtgttgaatttggcaaattgtgtaagaattggtgatatgggactaaagcaatttcttgatggtcctgcaagcatgaggataagagagctaaatttaagcaactgtgtgcggctaagtgatgcctctgttatgaaactatctgagcgctgccctaatttaaactacttgagtttacgaaattgtgaacatttgactgcccaaggaattggatatattgtaaacatcttttccttggtatcaatagatctctctggaacagacatctctaatgagggtttgaatgtgctttccagacataaaaaattgaaggaactttctgtatctgaatgttatagaatcactgatgatggaattcagattactgactcagcaatggagatgttatcggcaaaatgccattacctgcacattttggatatctctggttgtgtcttgcttactgaccaaatccttgaggaccttcagataggctgcaaacaactccggatccttaagatgcaatactgcacaaatatttccaagaaggcagctcaaagaatgtcatctaaagttcagcagcaggaatacaacactaatgaccctccacgttggtttggctatgatagggaaggaaaccctgttacagagcttgacaacataacatcatctaaaggagccttagaattaacagtgaaaaagtcaacatacagcagtgaagaccaagcagcgtgaccttcagcctcaagcaggaagaacaaaaaatcaagaacttggcaagttttctccatttgttgcaagt

SEQ ID NO: 133425 - DNA, 2582 bp, Homo sapiens
  Payload ID: 6074
  Gene Symbol: FBXL13
  Gene Name: F-box and leucine-rich repeat protein 13
  ENST ID: ENST00000448002
  CDS Start-End: 70-2124
gcacgcgcccggcccctagtcccagcgcggggagggtactatcgcagcttctccgtcaggccttgggccatggcctcgctacgcaatgccaacccgaggctgaagaactacttcaaggagaactacattcctcaggtctgcgaggcactgttatgtggtatacttgttacatgtcctgaggatccgctgaggtatttagagggaatgatcatggttataatcaaaagtggtcttcagaatcttctttgggatatgtgcattactccatcaatgaaaccaaacattcgaagattgtctgaaacttacctggaacaactttttgaattggatgatcagctgatgactccggaattgatgataaaagcctgtagcttttatactggacatttagtaaagactcatttttgcacttggagagacatagctcgtacaaatgaaaatgtcgtcctggctgaaaaaatgaacagagcagtgacatgctacaatttcagacttcaaaaatctgtatttcatcactggcactcttatatggaagaccagaaagaaaaacttaaaaatattctattgcggatacaacagatcatctattgtcacaagctaaccattatcctaacaaaatggcggaatacagcaagacataagagtaaaaagaaagaagatgagctgatattaaaacatgaacttcaattgaaaaaatggaaaaataggttaatactcaaaagagctgctgcagaagaatccaattttcctgaacgaagttcttctgaagtctttcttgtagatgagactctaaaatgtgacatttcactgttacctgaaagagcaatattacagattttcttctacctcagtttaaaagatgtgataatatgtggtcaagttaatcatgcctggatgttgatgacacaactaaactcactgtggaatgctattgatttttcctcagtgaaaaatgtgattccagataaatatatagtgtctactttgcaaaggtggcgtttaaatgtgctgcgtttgaattttcgtggttgtcttctccgacccaaaactttcagatctgtcagccactgtaggaacttgcaagagttgaatgtctctgactgcccaacattcacagatgaatcaatgagacacatttctgagggctgcccgggggtcctgtgtctcaatctgtctaacacaactatcaccaacaggacgatgcgactcctgccgaggcacttccacaacttacagaatcttagtttggcttattgcagacggttcacagacaaaggcttacagtacctgaacttggggaatggatgccacaagctcatctatctggacctctctggctgcacccagatttcagtccaaggcttcaggtacattgcaaacagctgcactggaattatgcatcttaccattaatgacatgccaactctgacggacaactgtgtaaaagctttagttgaaaaatgctctcgtattacatcgctggttttcactggtgcaccgcatatctccgattgtactttcagagctctttctgcttgtaaactcagaaagatccgatttgaaggaaataaaagggttactgatgcatccttcaaatttatagacaagaattatccaaatctcagtcacatttatatggctgactgcaagggaataacagacagcagcctcagatccctttcacctttgaagcaactgactgtgttgaatttggcaaattgtgtaagaattggtgatatgggactaaagcaatttcttgatggtcctgcaagcatgaggataagagagctaaatttaagcaactgtgtgcggctaagtgatgcctctgttatgaaactatctgagcgctgccctaatttaaactacttgagtttacgaaattgtgaacatttgactgcccaaggaattggatatattgtaaacatcttttccttggtatcaatagatctctctggaacagacatctctaatgagggtttgaatgtgctttccagacataaaaaattgaaggaactttctgtatctgaatgttatagaatcactgatgatggaattcagatagcaagaatggaggcatctgcaaataaggagggacttcccaagacaccaattgcagattactgactcagcaatggagatgttatcggcaaaatgccattacctgcacattttggatatctctggttgtgtcttgcttactgaccaaatccttgaggaccttcagataggctgcaaacaactccggatccttaagatgcaatactgcacaaatatttccaagaaggcagctcaaagaatgtcatctaaagttcagcagcaggaatacaacactaatgaccctccacgttggtttggctatgatagggaaggaaaccctgttacagagcttgacaacataacatcatctaaaggagccttagaattaacagtgaaaaagtcaacatacagcagtgaagaccaagcagcgtgaccttcagcctcaagcaggaagaacaaaaaatcaagaacttggcaagttttctccatttgttgcaagtatgtttactagctgaatctcaataacaatgtaaacaagcaacaaa

SEQ ID NO: 133426 - DNA, 1605 bp, Homo sapiens
  Payload ID: 6074
  Gene Symbol: FBXL13
  Gene Name: F-box and leucine-rich repeat protein 13
  Uniprot ID: Q8NEE6
  ENST ID: ENST00000456695
  CDS Start-End: 135-1496
aaggagaactacattcctcaggtctgcgaggcactgttatgtggtatacttgttacatgtcctgaggatccgctgaggtatttagagggaatgatcatggttataatcaaaagtggtcttcagaatcttctttgatgactccggaattgatgataaaagcctgtagcttttatactggacatttagtaaagactcatttttgcacttggagagacatagctcgtacaaatgaaaatgtcgtcctggctgaaaaaatgaacagagcagtgacatgctacaatttcagacttcaaaaatctgtatttcatcactggcactcttatatggaagaccagaaagaaaaacttaaaaatattctattgcggatacaacagatcatctattgtcacaagctaaccattatcctaacaaaatggcggaatacagcaagacataagagtaaaaagaaagaagatgagctgatattaaaacatgaacttcaattgaaaaaatggaaaaataggttaatactcaaaagagctgctgcagaagaatccaattttcctgaacgaagttcttctgaagtctttcttgtagatgagactctaaaatgtgacatttcactgttacctgaaagagcaatattacagattttcttctacctcagtttaaaagatgtgataatatgtggtcaagttaatcatgcctggatgttgatgacacaactaaactcactgtggaatgctattgatttttcctcagtgaaaaatgtgattccagataaatatatagtgtctactttgcaaaggtggcgtttaaatgtgctgcgtttgaattttcgtggttgtcttctccgacccaaaactttcagatctgtcagccactgtaggaacttgcaagagttgaatgtctctgactgcccaacattcacagatgaatcaatgagacacatttctgagggctgcccgggggtcctgtgtctcaatctgtctaacacaactatcaccaacaggacgatgcgactcctgccgaggcacttccacaacttacagaatcttagtttggcttattgcagacggttcacagacaaaggcttacagtacctgaacttggggaatggatgccacaagctcatctatctggacctctctggctgcacccagattactgactcagcaatggagatgttatcggcaaaatgccattacctgcacattttggatatctctggttgtgtcttgcttactgaccaaatccttgaggaccttcagataggctgcaaacaactccggatccttaagatgcaatactgcacaaatatttccaagaaggcagctcaaagaatgtcatctaaagttcagcagcaggaatacaacactaatgaccctccacgttggtttggctatgatagggaaggaaaccctgttacagagcttgacaacataacatcatctaaaggagccttagaattaacagtgaaaaagtcaacatacagcagtgaagaccaagcagcgtgaccttcagcctcaagcaggaagaacaaaaaatcaagaacttggcaagttttctccatttgttgcaagtatgtttactagctgaatctcaataacaatgtaaacaagcaac

SEQ ID NO: 133427 - DNA, 2111 bp, Homo sapiens
  Payload ID: 6075
  Gene Symbol: FBXL14
  Gene Name: F-box and leucine-rich repeat protein 14
  Uniprot ID: Q8N1E6
  ENST ID: ENST00000339235
  CDS Start-End: 100-1356
ggcggcggctggggagaagcgctctcgtcgcctgcccgaggccggagcggcggggcccgcgcctcctccccccagcgccgcggaggggggaggaggaagatggagacccacatctcatgcctgttcccggagctgctggccatgatcttcggctacctggacgtccgggacaaggggcgcgcggcgcaggtgtgcaccgcctggcgggacgccgcctaccacaagtcggtgtggcggggggtggaggccaagctgcacctgcgccgggccaacccgtcgctgttccccagcctgcaggcccggggcatccgccgggtgcagatcctgagcctccgccgcagcctcagctacgtgatccagggcatggccaacatcgagagcctcaacctcagcggctgctacaacctcaccgacaacgggctgggccacgcgtttgtgcaggagatcggctccctgcgcgctctcaacctgagcctctgcaagcagatcactgacagcagcctgggccgcatagcccagtacctcaagggcctggaggtgctggagctgggaggttgcagcaacatcaccaacactggccttctgctcatcgcctggggtctgcagcgcctcaagagccttaacctccgcagctgccgccacctttcggatgtgggcatcgggcacctggccggcatgacgcgcagcgcggcggagggctgcctgggcctggagcagctcacgctacaggactgccagaagctcacagatctttctctaaagcacatctcccgagggctgacgggcctgaggctcctcaacctcagcttctgtgggggaatctcggacgctggcctcctgcacctgtcgcacatgggcagcctgcgcagcctcaacctgcgctcctgtgacaacatcagtgacacgggcatcatgcatctggccatgggcagcctgcgcctctcggggctggatgtttcgttctgtgacaaggtgggagaccagagtctggcttacatagcccaggggctggatggcctcaagtctctctccctctgctcctgccacatcagtgatgatggcatcaaccgcatggtgcggcagatgcacgggctgcgcacgctcaacattggacagtgtgtgcgcatcacggacaagggcctggagctgatcgctgagcacctgagccaactcaccggcatagacctgtacggctgcacccgaatcaccaagcgcggcctggagcgcatcacgcagctgccgtgcctcaaggtactcaacctgggactctggcagatgacggacagtgagaaggaggcacgaggggatttttctccattattcactgtgagaactcggggaagctccagaaggtgagggagaggggacaacgacatggttcccgtggatctttaacttccagacttgcccgctctgcgcctccggcactctggtgatgacagctcaggtttccctgcctgtcactgctcgggcagaggctgctgcccagggcttctgctccggtaccttgtgaagctgcattctcctgccggtttctccagttctggggacagtggtttgctctgagacctcgcttcctttatggatccaaggagacttgctttttcagtctgttcagctttttacttgctaggatggaattgcaatttgcaagcttcttcgacaggaaactacaagttccacactttaattttatacatataaatatatacatgtgtacatatatctatgtacaggggtattatatatatacatataagatgatgatatatataatgatgatatgtattactgagaacgtaaaatatcattacatagtgatagctggacacacaaggaattcacaactccccaaagaaaatacatctggatgacctgcctagcagtttccccatgagatagaggaatgtctacgtatttcattccctgttcctgccctgaaacaatttcaatcactgacaaatcattatcattcattaataatgtttactgagtgcccatatgtgaaagaaatccactctacattccacagatgcatttcctctccccacggggtttccattttaatgggaacaatgtagaatatatctgtcttccctttatagattcca

SEQ ID NO: 133428 - DNA, 2362 bp, Homo sapiens
  Payload ID: 6076
  Gene Symbol: FBXL15
  Gene Name: F-box and leucine-rich repeat protein 15
  Uniprot ID: Q9H469
  ENST ID: ENST00000224862
  CDS Start-End: 1317-2219
tgtcctcccagctaccccctccctaagcaggctgaggaagaagagatagcaagccctcacctaacttgacccctttcttgtctctccccgctgctagcttctcccttctcgctgccttgcggggtggggaaacgtggaaggaattctgggaaaaccagatgtctgggttctctattcccgtctggcttgattctggacaaggggcttcctctccagggcctcggtttccccatctttaaaatggactgatagcatagacctgcccacctttcagaggtgcccgaagccttgacgagataacagatgagaagtggttttcgttgtgatgagccagctgaagcggttgcaccggagcgccagaccgtcagcggtgcagtggctctcgcgtccttcacatccccccacacccatcccgtggatgatgggggaaggcactactcctggggttccccgaagcggatcctgggactgggacctggggacgcggtgagaggcagccctgaagctgagtccagaggtctggggcgtcattgtcccagggcggacccagccccagaccctacaactaaacccaaggccagccgagaagcactaccactggcgggctgagctgagctctcattcttcttaggactctggacctttggaggaaatgaaagggacccagttggaaatatagtctttcttcgcgccccctacatctctctcccccggcggaaacgcggcccaaactgttacgaagtggaagaggctggatagctcttcataattaatcaggaatgggaggtttgagcaggtttacttgatgagggaaacattatagcctcgccaattcattcattatttcaacaattacttattgaacacctgctacgtggcagacagtaagagcctggatagtttctccccgtttttcaaagtcgctaaacgcgaccagagggcagaggagaggccggtaacctaagagtcctggctccgccccctccgcgtttggccttgcctgctcctcccaccaccacttcgctcagaggcggctactggctcaagaggacgacagaagccagtctctgatgcccaccgcattctccagcttcaggcctcaagccctgtagccgagaaggcgaggcctaatgttacaccaccggtctgttccgcctccgtttcggggtccacccgaaaagctttcagatcggatcctcggtgagacggcactcgattaaataggtctgtctctacaggccaaggaggcgggtttggtgcggccactccaaggccaaagcgagaaaatcttactgcgcacgcgcaatagacagccgatggagccaccgatggagccgtccggaggggagcaagagcccggagccgtcaggttcctggacctgccctgggaagacgtgctgctcccacacgtcctgaaccgggtcccgctgcgccagctgctccggctgcagcgcgttagccgggccttccggtcgctggtgcagcttcacctggccgggctgcgtcgcttcgatgccgcgcaggtgggtccgcagatcccgcgggccgcattggcccggctgctgcgggatgccgaggggctgcaggagctggcactggcgccgtgtcacgaatggctgtcagacgaggacctggtgccggtgctggcgcggaatccgcagctgcggagtgtggcgttgggcggctgcgggcaactgagtcgccgggcgcttggggctttggccgagggctgcccacgcctgcagcgcctgtcgctcgcgcactgtgactgggtggacgggctggcgctgcgcggcctcgctgatcgctgcccggccctggaggagctggatctcaccgcctgccgccagctcaaggacgaggccatcgtgtacctggcgcagaggcgcggcgctggtctccgcagcctctctctggccgtcaacgccaacgtgggggacgccgcggttcaagagttggctcggaactgcccagaactccaccaccttgacctcaccggctgcctccgcgtcggaagcgacggtgtcaggacattggccgagtactgccccgtgctgcgttcgctgcgggtgcggcactgccaccatgtggcggagtccagcctgagccgcttgcggaagcgcggcgtggacatcgacgtggagccgccgctgcaccaggccctggtgctgctgcaggatatggcgggcttcgcaccttttgtcaacctgcaggtctgacccgcctgccaatcggagcacagctggactgtgtggctggggcctgacactgagctgtagggaaactgaactgtgaggacctctggtgagaggccagtgccctgccccaccctggagcttcaaataaagagctttttaccccc

SEQ ID NO: 133429 - DNA, 2344 bp, Homo sapiens
  Payload ID: 6076
  Gene Symbol: FBXL15
  Gene Name: F-box and leucine-rich repeat protein 15
  ENST ID: ENST00000369956
  CDS Start-End: 1311-2201
ctccctaagcaggctgaggaagaagagatagcaagccctcacctaacttgacccctttcttgtctctccccgctgctagcttctcccttctcgctgccttgcggggtggggaaacgtggaaggaattctgggaaaaccagatgtctgggttctctattcccgtctggcttgattctggacaaggggcttcctctccagggcctcggtttccccatctttaaaatggactgatagcatagacctgcccacctttcagaggtgcccgaagccttgacgagataacagatgagaagtggttttcgttgtgatgagccagctgaagcggttgcaccggagcgccagaccgtcagcggtgcagtggctctcgcgtccttcacatccccccacacccatcccgtggatgatgggggaaggcactactcctggggttccccgaagcggatcctgggactgggacctggggacgcggtgagaggcagccctgaagctgagtccagaggtctggggcgtcattgtcccagggcggacccagccccagaccctacaactaaacccaaggccagccgagaagcactaccactggcgggctgagctgagctctcattcttcttaggactctggacctttggaggaaatgaaagggacccagttggaaatatagtctttcttcgcgccccctacatctctctcccccggcggaaacgcggcccaaactgttacgaagtggaagaggctggatagctcttcataattaatcaggaatgggaggtttgagcaggtttacttgatgagggaaacattatagcctcgccaattcattcattatttcaacaattacttattgaacacctgctacgtggcagacagtaagagcctggatagtttctccccgtttttcaaagtcgctaaacgcgaccagagggcagaggagaggccggtaacctaagagtcctggctccgccccctccgcgtttggccttgcctgctcctcccaccaccacttcgctcagaggcggctactggctcaagaggacgacagaagccagtctctgatgcccaccgcattctccagcttcaggcctcaagccctgtagccgagaaggcgaggcctaatgttacaccaccggtctgttccgcctccgtttcggggtccacccgaaaagctttcagatcggatcctcggtgagacggcactcgattaaataggtctgtctctacaggccaaggaggcgggtttggtgcggccactccaaggccaaagcgagaaaatcttactgcgcacgcgcaatagacagccgatggagccaccgatggagccgtccggaggggagcaagagcccggagccgtcaggttcctggacctgccctgggaagacgtgctgctcccacacgtcctgaaccgggtcccgctgcgccagctgctccggctgcagcgcgttagccgggccttccggtcgctggtgcagcttcacctggccgggctgcgtcgcttcgatgccgcgcaggtgggtccgcagatcccgcgggccgcattggcccggctgctgcgggatgccgaggggctgcaggagctggcactggcgccgtgtcacgaatggctgtcagacgaggacctggtgccggtgctggcgcggaatccgcagctgcggagtgtggcgttgggcggctgcgggcaactgagtcgccgggcgcttggggctttggccgagggctgcccacgcctgcagcgcctgtcgctcgcgcactgtgactgggtggacgggctggcgctgcgcggcctcgctgatcgctgcccggccctggaggagctggatctcaccgcctgccgccagctcaaggacgaggccatcgtgtacctggcgcagaggcgcggcgctggtctccgcagcctctctctggccgtcaacgccaacgtgggggacgccgcggttcaagagttggctcggaactgcccagaactccaccaccttgacctcaccggctgcctccgcgtcggaagcgacggtgtcaggacattggccgagtactgccccgtgctgcgttcgctgcgggtgcggcactgccaccatgtggcggagtccagcctgagccgcttgcggaagcgcggcgtggacatcgacgtggagccgccgctgcaccaggccctggtgctgctgcaggatatggcgggcttcgcaccttttgtcaacctgcaggtctgacccgcctgccaatcggagcacagctggactgtgtggctggggcctgacactgagctgtagggaaactgaactgtgaggacctctggtgagaggccagtgccctgccccaccctggagcttcaaataaagagctttttaccccc

SEQ ID NO: 133430 - DNA, 776 bp, Homo sapiens
  Payload ID: 6076
  Gene Symbol: FBXL15
  Gene Name: F-box and leucine-rich repeat protein 15
  ENST ID: ENST00000457067
  CDS Start-End: 304-776
tgtcctcccagctaccccctccctaagcaggctgaggaagaagagatagcaagccctcacctaacttgacccctttcttgtctctccccgctgctagcttctcccttctcgctgccttgcggggtggggaaacgtggaaggaattctgggaaaaccagatgtctgggttctctattcccgtctggcttgattctggacaaggggcttcctctccagggcctcggtttccccatctttaaaatggactgatagcatagacctgcccacctttcagaggtgcccgaagccttgacgagataacagatgagaagtggttttcgttgtgatgagccagctgaagcggttgcaccggagcgccagaccgtcagcggtgcagtggctctcgcgtccttcacatccccccacacccatcccgtggatgatgggggaaggcactactcctggggttccccgaagcggatcctgggactgggacctggggacgcggccaaggaggcgggtttggtgcggccactccaaggccaaagcgagaaaatcttactgcgcacgcgcaatagacagccgatggagccaccgatggagccgtccggaggggagcaagagcccggagccgtcaggttcctggacctgccctgggaagacgtgctgctcccacacgtcctgaaccgggtcccgctgcgccagctgctccggctgcagcgcgttagccgggccttccggtcgctggtgcagcttcacctggccgggctgcgtcgcttcgatgccgcgcaggtgag

SEQ ID NO: 133431 - DNA, 804 bp, Homo sapiens
  Payload ID: 6076
  Gene Symbol: FBXL15
  Gene Name: F-box and leucine-rich repeat protein 15
  ENST ID: ENST00000425536
  CDS Start-End: 196-804
gaggcggctactggctcaagaggacgacagaagccagtctctgatgcccaccgcattctccagcttcaggcctcaagccctgtagccgagaaggcgaggcctaatgttacaccaccggccaaggaggcgggtttggtgcggccactccaaggccaaagcgagaaaatcttactgcgcacgcgcaatagacagccgatggagccaccgatggagccgtccggaggggagcaagagcccggagccgtcaggttcctggacctgccctgggaagacgtgctgctcccacacgtcctgaaccgggtcccgctgcgccagctgctccggctgcagcgcgttagccgggccttccggtcgctggtgcagcttcacctggccgggctgcgtcgcttcgatgccgcgcaggtgggtccgcagatcccgcgggccgcattggcccggctgctgcgggatgccgaggggctgcaggagctggcactggcgccgtgtcacgaatggctgtcagacgaggacctggtgccggtgctggcgcggaatccgcagctgcggagtgtggcgttgggcggctgcgggcaactgagtcgccgggcgcttggggctttggccgagggctgcccacgcctgcagcgcctgtcgctcgcgcactgtgactgggtggacgggctggcgctgcgcggcctcgctgatcgctgcccggccctggaggagctggatctcaccgcctgccgccagctcaaggacgaggccatcgtgtacctggcgcagaggcgcggcgctggtctccgcagcctctctctggccgtcaac

SEQ ID NO: 133432 - DNA, 871 bp, Homo sapiens
  Payload ID: 6076
  Gene Symbol: FBXL15
  Gene Name: F-box and leucine-rich repeat protein 15
  ENST ID: ENST00000440407
  CDS Start-End: 248-871
ggaaacgcggcccaaactgttacgaagtggaagaggctggatagctcttcataattaatcaggaatgggaggtttgagcaggtttacttgatgagggaaacattatagcctcgccaattcattcattatttcaacaattacttattgaacacctgctacgtggcagacagccaaggaggcgggtttggtgcggccactccaaggccaaagcgagaaaatcttactgcgcacgcgcaatagacagccgatggagccaccgatggagccgtccggaggggagcaagagcccggagccgtcaggttcctggacctgccctgggaagacgtgctgctcccacacgtcctgaaccgggtcccgctgcgccagctgctccggctgcagcgcgttagccgggccttccggtcgctggtgcagcttcacctggccgggctgcgtcgcttcgatgccgcgcaggtgggtccgcagatcccgcgggccgcattggcccggctgctgcgggatgccgaggggctgcaggagctggcactggcgccgtgtcacgaatggctgtcagacgaggacctggtgccggtgctggcgcggaatccgcagctgcggagtgtggcgttgggcggctgcgggcaactgagtcgccgggcgcttggggctttggccgagggctgcccacgcctgcagcgcctgtcgctcgcgcactgtgactgggtggacgggctggcgctgcgcggcctcgctgatcgctgcccggccctggaggagctggatctcaccgcctgccgccagctcaaggacgaggccatcgtgtacctggcgcagaggcgcggcgctggtctccgcagcctctctctggccgtcaacgccaacgtgggggac

SEQ ID NO: 133433 - DNA, 874 bp, Homo sapiens
  Payload ID: 6076
  Gene Symbol: FBXL15
  Gene Name: F-box and leucine-rich repeat protein 15
  ENST ID: ENST00000432590
  CDS Start-End: 305-874
acacggtatgggtgtagactggacccgccccctaaatccaggagaccatcaactatggaaaggagatctagggaacaccgtcttgaacccgccaggggttttgagtctcggacccaggagatccaaccctgaccaccctcccaggatgcagcagggggatgttaaatcagacttcaggaagaacttccttgctgcctgagttaggtgtcgtcacgcctgcccaggggccaaggaggcgggtttggtgcggccactccaaggccaaagcgagaaaatcttactgcgcacgcgcaatagacagccgatggagccaccgatggagccgtccggaggggagcaagagcccggagccgtcaggttcctggacctgccctgggaagacgtgctgctcccacacgtcctgaaccgggtcccgctgcgccagctgctccggctgcagcgcgttagccgggccttccggtcgctggtgcagcttcacctggccgggctgcgtcgcttcgatgccgcgcaggtgggtccgcagatcccgcgggccgcattggcccggctgctgcgggatgccgaggggctgcaggagctggcactggcgccgtgtcacgaatggctgtcagacgaggacctggtgccggtgctggcgcggaatccgcagctgcggagtgtggcgttgggcggctgcgggcaactgagtcgccgggcgcttggggctttggccgagggctgcccacgcctgcagcgcctgtcgctcgcgcactgtgactgggtggacgggctggcgctgcgcggcctcgctgatcgctgcccggccctggaggagctggatctcaccgcctgccgccagctcaaggacgaggccatcgtgtacctggcgcagagg

SEQ ID NO: 133434 - DNA, 3411 bp, Homo sapiens
  Payload ID: 6077
  Gene Symbol: FBXL16
  Gene Name: F-box and leucine-rich repeat protein 16
  Uniprot ID: Q8N461
  ENST ID: ENST00000324361
  CDS Start-End: 204-1643
aggggaggaggaggcgcccgcctggttccctgcaaagcggccttatttatctgggcacagcctcagcctccccggtgggaggcttggggcggccgatcctctcccaccggggagctcctttccgtgcgctccccatgacgggaggtcgcccggcggacagcgtggcatgagccaggagcccgggccgagagcgtgccaggaagatgtcgagcccgggcatcgacggcgaccccaagcctccatgcttgcctcgaaacggtctggtgaagctgccgggccagcccaacggcctgggtgcggccagcatcaccaagggcacgccagccaccaagaaccgcccctgccagccaccacccccacccaccctcccaccacccagcctggctgctccactgtcccgggctgccctggctgggggcccgtgcaccccggcaggtggaccagcctcagccttggcacctgggcacccagcggagcggccgccgctggccacggacgagaagatcctcaatgggctcttctggtatttctcggcctgcgagaagtgtgtgctggcccaggtgtgcaaggcctggcggcgcgtgctgtaccagcccaagttctgggcaggcctcacgccggtgctgcatgccaaggagctctacaacgtgctgcctggtggcgagaaggagttcgtgaacctgcagggttttgccgccagaggcttcgagggcttctgcctggttggcgtctccgacctggacatctgtgagttcattgacaactatgcgctctccaagaagggtgtcaaagccatgagcctcaagcgctccaccatcacggacgcaggcctcgaggttatgcttgaacagatgcagggcgtggtgcgtctggagctgtcgggctgcaacgacttcaccgaggccgggctgtggtccagcctgagcgcgcgcatcacctcgctgagcgtgagtgactgcatcaacgtggccgacgacgccatcgcggccatctcgcagctgctgcccaacctggcggagctgagcctgcaggcctaccacgtgacggacacggcgctggcctacttcacggcgcgccagggccacagcacgcacacgctgcgcctgctctcctgctgggagatcaccaaccacggcgtggtcaacgtggtgcacagcctgcccaacctcaccgcgctcagcctctcgggctgctccaaggtcaccgacgacggcgtggagctcgtggccgagaacctgcgcaagctgcgcagccttgacctctcgtggtgcccacgcatcaccgacatggcgctggagtacgtggcctgcgacctgcaccgcctagaggagctcgtgctcgacaggtgtgtacgcatcacggacactggcctcagctatctgtccaccatgtcgtccctccgcagcctctacctgcgatggtgctgccaggtgcaagacttcgggctgaagcacctcctggccctggggagtttgcgcctcctgtctctggcaggctgcccgctgctcaccaccaccgggctgtcgggcctggtgcagctgcaggagctggaggagctggagctgaccaactgccccggggccacccccgagctcttcaagtatttctcgcagcacctgccccgctgcctcgtcattgagtagcgcgaggcccccgccccggtcgcgggaacccggccatgacctgggcgggggcgcggggcgccgccgagccccctcttcccgccttgcgctcgggggagcccccgcgcccccggcccagcgcgggaggcggggcgagccgagggaaagcccctccccgaccttcggtccctccgccctcccagccccgccccgggcaggggggcggcgggtgggcccgccccacgcacgcacgcacactcggggactttgtgcatgcccctcgtgcccgcactgcacgccgccctccgccacgccacagccacagccgccgccatcactcgctcgccctcccgcttggggggcggggctcggtccttgggggggctttgagctctccagactgtgcccttaccgccttccccgccacacccgctctgtcttcccactgtcccccccatcccgggcagggcccagtgggattgagggggctgggtcccccaggacacgggcccagaagagccccacgggcttcctgcatcttccaccgcaccatacctggagccctccgaggggtgtcaggggaaacaggccaccgccaaagccatggcccgccgccgagagcccaggccccacccgcacctcctcacccatccagcctgacccacgcggcctctcctcctccttgccgctgtgtggggcagtcccctgtccgccccaaaacccggccttggtccctggccaggctgagagaattgggcagggagagggcggaagggctggcgatcgcttggagtcattaacgtgatcccagctgactccggtcggcctcaacccaggggtggcgcaggcaccttgcaagcctcgagctgtagccaccctcaggcctgggaagaggcctgggccgacctcacacctcagcccttgcacccggccgggctcagttcaggcctgggcaccgagcttcaccctgggtgggtctcctcaggtggagtctgcagagtggacccagccaagggtcagggtcagcactgggtcagcgactccaatcttccagtggccagcacaccctagacaccccgaggagggagggctcctttctagcctgcccccccacccccacttcacccctccccagcttcccaaacttctgtctgcccaaatgggctctgaccgtgctctgtcggcccgagacatttggaagtcctgggggatgctggcaaatctcagctgttgctgaggagggggctgggaccccttcccatcccaaccttgagccccaggagataccgcgcccacacccaatcttgggacactccctatctggttggaagagagtaaccagtttccagagagccagagagtgagagagagaaagagagtgagagagagagagaaagagagagagagatgctgttgaatcagaaacagatcaacagcccaaagattttcctgtccctggagtgccagccccaggaagctccagggctgagtggtcaggagccagtttctccagcccctcctccccacaacccctagtggggaggggcagctgtccatttgcccaaagtattaatgcaactgaagctgtgatatttccaacgactgtaggaggaaaaattaaggggagagaggaaaacaaaaccaaccaacccctaaaatcattttcttattgtacataacgacctcattctcctgtatatgcggaagatataaccttatatttggtaagtgtttcttgtgctattttatcacgtgacctgtttataaaaatatatattaaaaaagttgt

SEQ ID NO: 133435 - DNA, 3547 bp, Homo sapiens
  Payload ID: 6077
  Gene Symbol: FBXL16
  Gene Name: F-box and leucine-rich repeat protein 16
  Uniprot ID: Q8N461
  ENST ID: ENST00000397621
  CDS Start-End: 333-1772
cggaggagcgcggggagggcgaggggaggaggaggcgcccgcctggttccctgcaaagcggccttatttatctgggcacagcctcagcctccccggtgggaggcttggggcggccgatcctctcccaccggggagctcctttccgtgcgctgccgagggggcccggccaggacgggacgcggggcgcagggcgcggccgggccctgccggccagtccagcaccccggcggcccccgcgcgccgacgcccatgccgggctccccatgacgggaggtcgcccggcggacagcgtggcatgagccaggagcccgggccgagagcgtgccaggaagatgtcgagcccgggcatcgacggcgaccccaagcctccatgcttgcctcgaaacggtctggtgaagctgccgggccagcccaacggcctgggtgcggccagcatcaccaagggcacgccagccaccaagaaccgcccctgccagccaccacccccacccaccctcccaccacccagcctggctgctccactgtcccgggctgccctggctgggggcccgtgcaccccggcaggtggaccagcctcagccttggcacctgggcacccagcggagcggccgccgctggccacggacgagaagatcctcaatgggctcttctggtatttctcggcctgcgagaagtgtgtgctggcccaggtgtgcaaggcctggcggcgcgtgctgtaccagcccaagttctgggcaggcctcacgccggtgctgcatgccaaggagctctacaacgtgctgcctggtggcgagaaggagttcgtgaacctgcagggttttgccgccagaggcttcgagggcttctgcctggttggcgtctccgacctggacatctgtgagttcattgacaactatgcgctctccaagaagggtgtcaaagccatgagcctcaagcgctccaccatcacggacgcaggcctcgaggttatgcttgaacagatgcagggcgtggtgcgtctggagctgtcgggctgcaacgacttcaccgaggccgggctgtggtccagcctgagcgcgcgcatcacctcgctgagcgtgagtgactgcatcaacgtggccgacgacgccatcgcggccatctcgcagctgctgcccaacctggcggagctgagcctgcaggcctaccacgtgacggacacggcgctggcctacttcacggcgcgccagggccacagcacgcacacgctgcgcctgctctcctgctgggagatcaccaaccacggcgtggtcaacgtggtgcacagcctgcccaacctcaccgcgctcagcctctcgggctgctccaaggtcaccgacgacggcgtggagctcgtggccgagaacctgcgcaagctgcgcagccttgacctctcgtggtgcccacgcatcaccgacatggcgctggagtacgtggcctgcgacctgcaccgcctagaggagctcgtgctcgacaggtgtgtacgcatcacggacactggcctcagctatctgtccaccatgtcgtccctccgcagcctctacctgcgatggtgctgccaggtgcaagacttcgggctgaagcacctcctggccctggggagtttgcgcctcctgtctctggcaggctgcccgctgctcaccaccaccgggctgtcgggcctggtgcagctgcaggagctggaggagctggagctgaccaactgccccggggccacccccgagctcttcaagtatttctcgcagcacctgccccgctgcctcgtcattgagtagcgcgaggcccccgccccggtcgcgggaacccggccatgacctgggcgggggcgcggggcgccgccgagccccctcttcccgccttgcgctcgggggagcccccgcgcccccggcccagcgcgggaggcggggcgagccgagggaaagcccctccccgaccttcggtccctccgccctcccagccccgccccgggcaggggggcggcgggtgggcccgccccacgcacgcacgcacactcggggactttgtgcatgcccctcgtgcccgcactgcacgccgccctccgccacgccacagccacagccgccgccatcactcgctcgccctcccgcttggggggcggggctcggtccttgggggggctttgagctctccagactgtgcccttaccgccttccccgccacacccgctctgtcttcccactgtcccccccatcccgggcagggcccagtgggattgagggggctgggtcccccaggacacgggcccagaagagccccacgggcttcctgcatcttccaccgcaccatacctggagccctccgaggggtgtcaggggaaacaggccaccgccaaagccatggcccgccgccgagagcccaggccccacccgcacctcctcacccatccagcctgacccacgcggcctctcctcctccttgccgctgtgtggggcagtcccctgtccgccccaaaacccggccttggtccctggccaggctgagagaattgggcagggagagggcggaagggctggcgatcgcttggagtcattaacgtgatcccagctgactccggtcggcctcaacccaggggtggcgcaggcaccttgcaagcctcgagctgtagccaccctcaggcctgggaagaggcctgggccgacctcacacctcagcccttgcacccggccgggctcagttcaggcctgggcaccgagcttcaccctgggtgggtctcctcaggtggagtctgcagagtggacccagccaagggtcagggtcagcactgggtcagcgactccaatcttccagtggccagcacaccctagacaccccgaggagggagggctcctttctagcctgcccccccacccccacttcacccctccccagcttcccaaacttctgtctgcccaaatgggctctgaccgtgctctgtcggcccgagacatttggaagtcctgggggatgctggcaaatctcagctgttgctgaggagggggctgggaccccttcccatcccaaccttgagccccaggagataccgcgcccacacccaatcttgggacactccctatctggttggaagagagtaaccagtttccagagagccagagagtgagagagagaaagagagtgagagagagagagaaagagagagagagatgctgttgaatcagaaacagatcaacagcccaaagattttcctgtccctggagtgccagccccaggaagctccagggctgagtggtcaggagccagtttctccagcccctcctccccacaacccctagtggggaggggcagctgtccatttgcccaaagtattaatgcaactgaagctgtgatatttccaacgactgtaggaggaaaaattaaggggagagaggaaaacaaaaccaaccaacccctaaaatcattttcttattgtacataacgacctcattctcctgtatatgcggaagatataaccttatatttggtaagtgtttcttgtgctattttatcacgtgacctgtttataaaaatatatattaaaaaagttgtaaaaaca

SEQ ID NO: 133436 - DNA, 2257 bp, Homo sapiens
  Payload ID: 6077
  Gene Symbol: FBXL16
  Gene Name: F-box and leucine-rich repeat protein 16
  Uniprot ID: Q8N461
  ENST ID: ENST00000562563
  CDS Start-End: 106-909
ttttcagggttcagctccctgcatgtttacaccctactgcttcctccctgcgggctccaccccttctcctgcaatcctgacccggcgcccgcccgcctgcaggttatgcttgaacagatgcagggcgtggtgcgtctggagctgtcgggctgcaacgacttcaccgaggccgggctgtggtccagcctgagcgcgcgcatcacctcgctgagcgtgagtgactgcatcaacgtggccgacgacgccatcgcggccatctcgcagctgctgcccaacctggcggagctgagcctgcaggcctaccacgtgacggacacggcgctggcctacttcacggcgcgccagggccacagcacgcacacgctgcgcctgctctcctgctgggagatcaccaaccacggcgtggtcaacgtggtgcacagcctgcccaacctcaccgcgctcagcctctcgggctgctccaaggtcaccgacgacggcgtggagctcgtggccgagaacctgcgcaagctgcgcagccttgacctctcgtggtgcccacgcatcaccgacatggcgctggagtacgtggcctgcgacctgcaccgcctagaggagctcgtgctcgacaggtgtgtacgcatcacggacactggcctcagctatctgtccaccatgtcgtccctccgcagcctctacctgcgatggtgctgccaggtgcaagacttcgggctgaagcacctcctggccctggggagtttgcgcctcctgtctctggcaggctgcccgctgctcaccaccaccgggctgtcgggcctggtgcagctgcaggagctggaggagctggagctgaccaactgccccggggccacccccgagctcttcaagtatttctcgcagcacctgccccgctgcctcgtcattgagtagcgcgaggcccccgccccggtcgcgggaacccggccatgacctgggcgggggcgcggggcgccgccgagccccctcttcccgccttgcgctcgggggagcccccgcgcccccggcccagcgcgggaggcggggcgagccgagggaaagcccctccccgaccttcggtccctccgccctcccagccccgccccgggcaggggggcggcgggtgggcccgccccacgcacgcacgcacactcggggactttgtgcatgcccctcgtgcccgcactgcacgccgccctccgccacgccacagccacagccgccgccatcactcgctcgccctcccgcttggggggcggggctcggtccttgggggggctttgagctctccagactgtgcccttaccgccttccccgccacacccgctctgtcttcccactgtcccccccatcccgggcagggcccagtgggattgagggggctgggtcccccaggacacgggcccagaagagccccacgggcttcctgcatcttccaccgcaccatacctggagccctccgaggggtgtcaggggaaacaggccaccgccaaagccatggcccgccgccgagagcccaggccccacccgcacctcctcacccatccagcctgacccacgcggcctctcctcctccttgccgctgtgtggggcagtcccctgtccgccccaaaacccggccttggtccctggccaggctgagagaattgggcagggagagggcggaagggctggcgatcgcttggagtcattaacgtgatcccagctgactccggtcggcctcaacccaggggtggcgcaggcaccttgcaagcctcgagctgtagccaccctcaggcctgggaagaggcctgggccgacctcacacctcagcccttgcacccggccgggctcagttcaggcctgggcaccgagcttcaccctgggtgggtctcctcaggtggagtctgcagagtggacccagccaagggtcagggtcagcactgggtcagcgactccaatcttccagtggccagcacaccctagacaccccgaggagggagggctcctttctagcctgcccccccacccccacttcacccctccccagcttcccaaacttctgtctgcccaaatgggctctgaccgtgctctgtcggcccgagacatttggaagtcctgggggatgctggcaaatctcagctgttgctgaggagggggctgggaccccttcccatcccaaccttgagccccaggagataccgcgcccacacccaatcttgggacactccctatctggttggaagagagtaaccagtttccagagagccagagagtgagagag

SEQ ID NO: 133437 - DNA, 4510 bp, Homo sapiens
  Payload ID: 6078
  Gene Symbol: FBXL17
  Gene Name: F-box and leucine-rich repeat protein 17
  Uniprot ID: Q9UF56
  ENST ID: ENST00000359660
  CDS Start-End: 914-1825
ctcctcctctcagcacctggcgcggcgctacgcggccctggccgccgaggactgcgccgctgctgcccgccgcttcctgctatcctcggccgccgccgccgccgccgctgccgcctcggcttcgtcgcccgcctcctgctgcaaagagttggggctggctgcggccgccgcctgggagcagcagggccgaagtctcttcctggccagcttggggccggtgcgcttcctggggccgcccgccgccgtgcagctcttccgggggccgacaccgtcaccggccgagctccctacgccccccgaaatggtgtgcaagcggaagggggccggggtccccgcctgcaccccctgcaagcagccccgctgcggcggcgggggctgcggcggcggcggcggcggcggtggcgggggagggcctgcggggggaggcgcttcgccgccccggccccccgacgccggctgctgccaggccccggagcagcccccgcagccgctctgccctccgccctcttctcccacctccgaaggtgcccccaccgaagctggcggggacgctgtccgagccgggggcaccgcccccttgtccgcccagcagcagcatgaatgtggcgacgcggactgtcgggagtcccccgaaaacccctgcgactgtcacagggagccgccccccgaaaccccagacatcaaccagctgccgccgtccatcctgctcaagatattttccaatttgtcactggatgagcgttgcctttccgcatcattggtttgcaagtactggcgtgacctttgtttagacttccagttttggaagcagctggatcttagtagtcgtcagcaggtcactgatgaattgttggaaaaaattgcatcaagaagtcagaatataattgaaatcaacatttctgattgtcgcagtatgtctgataatggcgtatgtgttttagcatttaaatgtcctggacttcttaggtatacagcctacaggtgtaaacagctttctgacacctctattattgcggttgcctctcactgtcctttacttcagaaagtgcatgtaggcaaccaggacaaactcactgatgaaggactcaagcagctgggctcaaaatgcagagaactcaaagatattcatttcggccagtgttacaagatctcagatgaaggcatgatcgtcatagctaagggctgtctgaaattacaaaggatatacatgcaggaaaacaaattagtgacagatcagtcagtgaaagcatttgctgaacactgtcctgagcttcaatatgtaggcttcatgggttgttcagtcacttctaaaggagtcattcacctaaccaagctaagaaacctttccagcttggacctacgtcatatcactgaactggataatgaaaccgtgatggaaattgtcaagaggtgcaaaaatcttagctctctcaatctctgtctgaactggatcataaatgacaggtgtgtggaggtcattgcaaaggaaggacaaaacctgaaagagctatatttggtgtcctgtaaaatcacagattatgcactgatagccattgggcgatacagcatgacaatagagactgtggatgtcggatggtgtaaagaaatcacagaccaaggagccaccctgattgcacagagcagcaagtctctgagatatttggggctgatgagatgtgataaagtcaacgaagtgacggtggaacagctggtgcagcagtacccccacatcaccttcagcaccgtcctgcaggactgcaagaggaccttggagagagcctatcagatgggctggacccccaacatgtctgccgcctcctcctagcgctcctgcctcgcctagtccactgggatcattcagcagagcagaggagaattgtacatttggggagctgatctctcggaagggttttaactgtcacctgtctgtgtgtgttcaagtatgtgtatttgtgtcttgtttgcatactgcataccaaaagtgcagttgtcatttgttcccaagtgagctggctttttttcttagaaattaaagattatgaaagccacaaactttttagtttttaacttcaaaggcttctttctctttaaaaaaaaattatttttaatatagagtcaaaaaattggatgtattattttgagcttctaattgctgccacttggagatgtccaagtaagaaggccttctttttacatgggatgaattgtgcacttctactgatgatgactacagcagaagtgatgttatacgtacaggcacttacactctctcacatattcacacgtgtgcacatctacaccagggctctgatctactctagatcgtttcctgacagagaagccttcttccaggccactaaggtagcatgttatccactgtggcactgcctaactccgtgtatcctcgggtggccaacttgctatctggtgggtgacttggggactagaaagaataaagccttttctaaatttgttatatagaggcaacagtctgaactctcctggccagctcacgaaagttaattatacattattctacaaatgcattctgttgagcactaaatattttagttggttttatgttaacattgtgttagcttttatttcctggatagtaactggtcaggatatattttaatgatatttgaaactaatcttagcattgaagccaccaatgtaattaatggtgtgcagttattttaaaaactacagatcatttcattattttcttaattttggtaattattaaagtctatttctgagatacgagagggtagtcacattaatagaagattcatgagtgagatataagtagacaatctttctactgttgttgctctttttgctttgctttgggttcttgaacaggttttttggatatatgcatgttgtcattttggactagttctcatgctactgcaaagatctattgctagctaatatatgagttaagaaagaaaattagaaaatctgttcattgaaattctgtttacacttgtcagaaataagcatttctttgtttaattaaggattgccagcttcagttaagacaagacctatcagtaaatgaatatatgttttgatttaacacatctttacaattaattcataatagggactcaggctcaaataactgttcctgtgtctagatttataatgaggacatcagggagcctttttaagctaaagagtgattatctttcacagtagaactagaaacaaaaccctaacttgtgaagttgctatttatttttccctgagtgaatataactgttatttggtctttaacagatatactgaggtttgagtttcactttctttaagtctcacattgctaacatgacattagctgtaagaaacaagatagctttacatttgaatgccatttactgatttctaatgattctctttttttgtaaacaactgtttcctttgattatgtcaacatgtttctgatgtggcatttttgttttaatcccaatcggttaggaaaatctagtcagtaagcgccatgagtattcttcccataactaaatgggtttctaatttaatttgaagggaataaaatttgtgtaagaaaaaagctgtttaacattaataaactatatttcttcttacacattgaactgtatcattttcatatccacttccccaccactgaaatatcttatttcacaatattttaactgatttttaatccaaaactaatttataagacagtatgtatagtaatagtagcttgagtgaatatgcaaaagtttaatttttatatatgtcatactatattttaaatagttaaaaaagacaaaagaagggagagccatctatgatatagatggtaccatttcagttcaaagttgtaataacctttggagtgttacagtttggttgtcaaatggtttcagaatgtataattgatttttttaaatgttgcattgtttgaatctaaagtacagcactataacatgctttagcttgggggggtgggggtggggtggggacttgcacttattctctaaaatgttgactaatccagaaagcctgatgcaacataatctggaaaactgctttggtacatttgtagaaatccgtagaaataccatatccagcctcaaagcattaatctcaaaaaaaaaaaaaaaaaaaaaaaaaaacagccagaaaaaagcatcaccttgagtggtcctgtgatggttgttgaatgtgttctcattagatgctttgaaatgaggcttaaaataatttttctgggcaatatagagtttcttttttttgcttagaatgtcataaatacatgtgaacacgtttaatgcagggctttttattctctccaaaatgtcaacagtattttcagaataaagactatgaaatatattgctgtagtggaaaattctggtcctttgtctttaatgtctttttgagtggataaagaaaattcacccggtttgtagtttctatatttccgtgaatctttgaccttgcagtgggttgcaataaaagagaaacaaaa

SEQ ID NO: 133438 - DNA, 3773 bp, Homo sapiens
  Payload ID: 6078
  Gene Symbol: FBXL17
  Gene Name: F-box and leucine-rich repeat protein 17
  Uniprot ID: Q9UF56
  ENST ID: ENST00000496714
  CDS Start-End: 203-1147
gatattttccaatttgtcactggatgagcgttgcctttccgcatcattggtttgcaagtactggcgtgacctttgtttagacttccagttttggaagcagctggatcttagtagtcgtcagcaggtcactgatgaattgttggaaaaaattgcatcaagaagtcagaatataattgaaatcaacatttctgattgtcgcagtatgtctgataatggcgtatgtgttttagcatttaaatgtcctggacttcttaggtatacagcctacaggtgtaaacagctttctgacacctctattattgcggttgcctctcactgtcctttacttcagaaagtgcatgtaggcaaccaggacaaactcactgatgaaggactcaagcagctgggctcaaaatgcagagaactcaaagatattcatttcggccagtgttacaagatctcagatgaaggcatgatcgtcatagctaagggctgtctgaaattacaaaggatatacatgcaggaaaacaaattagtgacagatcagtcagtgaaagcatttgctgaacactgtcctgagcttcaatatgtaggcttcatgggttgttcagtcacttctaaaggagtcattcacctaaccaagctaagaaacctttccagcttggacctacgtcatatcactgaactggataatgaaaccgtgatggaaattgtcaagaggtgcaaaaatcttagctctctcaatctctgtctgaactggatcataaatgacaggtgtgtggaggtcattgcaaaggaaggacaaaacctgaaagagctatatttggtgtcctgtaaaatcacagattatgcactgatagccattgggcgatacagcatgacaatagagactgtggatgtcggatggtgtaaagaaatcacagaccaaggagccaccctgattgcacagagcagcaagtctctgagatatttggggctgatgagatgtgataaagtaagagttgactatcaagttgtttgctttctacatatcagtatagttaatagcttgatgtcatatcctctctccttctctatctccacccccgtgtattatatattatatatacattttatatgtatatatgcaattatagctatgcattgtttgcctgcttttgtaaactaatctgagattatctttgtatttccccacttaataatgaattttgtgcttaagtagaaagaaaaagtaatcatatacatagtcaactagagtttggcatcctattcataagtccatggaccaaaatgtaaaagattacatgacaaactgcaatttgcagggtctaaccgtaaaattgtattctgggtttcaagtttccagcaacagtaaaggtggaaagaacagtgccaaattggtttttcacaagtgtgtaattttggtactgaacatctatgtattctggccattcgggaccaacaaagggccagtaagggggtatgtgggaatttgcatctccccatacatcagatgccactcccagcacatgataagaagtggttccagaggtcctggtggaaggcctgtagaaccagccagggatgtgagcatgagtttaggaaatggtgtagcatttaacgtgggaccctttgaagactgagaaaacagataataaaaatctatactgacacctgtaatcccagcacattgggaggccaaggcagaaggatcacttgagcccaggaatttgagaccagcctggacaacatgggaaaaccctgtctctatccccctctcccccaacaaaaaaaaattagccaggcataatggcacacacctgtagtcccagctactcgggaagctaaggtgggaggatcacctgagctcaagaggccgaggttgcagtgagccgtgattgtgccgcaaccacctcagcctggatgacggagcacgactgtgtcccaaacaaacaaaaaaaacctatactggacaccaggcactccacaggtgttttcttctttgtttattccatgttttacctataacaagtctaagaaatagttatttgcattgtgaaggggagaaaatggaggctcagaaagaccagtcagtggccccaggatactctggcaagacttcatgccgggtctttggagtctgtatccagtgctgctggcacaacccagggggcagtctgtggccacggggactgcttcccttggaaaaggtccagttcagatacttgctcagaaagtgccgccatcttgtactaatttacacatgtgtgctacttttgtaaatggtgattaggaacaaatctagcaaaataatgtgaaactaaatagacacgccattcaaagggcatgcatcttctaaatgtagcaaatgtgggggcaaatgaagtatggcccaaagctcttgtgtcctttgtgattttttgttaattggctaattcttttctccaaacactttagaatcccaacttatacgagacctttgccagctagttatgtttagagaaatgttattatatattctcagcccagcccagaagcgacttactttgtaactaagcaacagcactgagatccggggcttgcgagtctcccacaaatctttccactaaccaacctaatgccgctgctaaccctgccactttaaaatgacttcttttaagacaagttaaagggtccaccataggcatagtcctctagaaacaggaatcaatgacagcagaactcctcagcttccagcagaaggaactgccacatgaatgctaactaaagctaccaaaatgtacacattcatacatatgtgtccgcagccattctcagaaattgtcatatttctaacctgtaatctttagatggttaagatcagctccatcttcggagatacactgtagaagttgtatgttacagttactacaggagaatgttattccagacatatttgctgaccagcattttgctgatttttagttaagaaatgggttattttctacccaaatgcaaattagtccaaaattaaatagagacagtattcagattagctgtatccctgagggttttagcccttttcctgggctgcctctgaatcctttctctaaccagagagccactctgagaacccattggctccagcacgacgccgtctggtcagagcctgctgcagtgcagcccagggagatgctggacccagccttgctgtctggcttcctcagacttaaagcagctcagagccaaacacgagaggctctgtgaggatggaagacagttccaaaccacacacaaagcacaagtaaagccttgcacagaaaagcctgcttgttggtttagttggatggaaatctaaagtagctattcagttttcagattttgtatcatgccatccatctccagattttaagttaccatcaagattcaaaggaagatatgagtaacaaagaaaagaaattagtagcaacggtatggtctgcggagagccagagttcaggttcagatctgggctttgcacttactagttgtgtcaccgcgggcagttactaacctctcagtgcctgttccctcgtttgcaaaatgaggatgatactagtacctatcttgtagaattgtgagcatgtgaatgagttaacatacataaagcacttagaataatgtctattatatataaaatgctctgttactgattagtcttatcatccatatcattatattaacctgtgttgtgatactggaattttccaatgagaaaaaaaaattatattgcctactatcccattttgaaagacaattaaaaagaaaggaaaaaa

SEQ ID NO: 133439 - DNA, 5188 bp, Homo sapiens
  Payload ID: 6078
  Gene Symbol: FBXL17
  Gene Name: F-box and leucine-rich repeat protein 17
  Uniprot ID: Q9UF56
  ENST ID: ENST00000542267
  CDS Start-End: 408-2513
agagtcgcgggtgcgcgcgccggcggcggatccgcagttaaaatggtccgagcgggacccggcctttccccggccgctccgctgactgactgagccggctggccgggcccggactggtcgcctagccggcaggctcgctcgctccctccctcgcgtccccaaagctcgcgcccatcgttctcccggcttccctgggcaaagcatgtagcccccgtcgggcactccggcggcccgcagctgacgcccaccccccaccgtcgcgtgtgtgcccgtgtgtgcgtgtgtgtgcgcaggaagggcgacccctccgggggccgagccagcgagcggcctgccccgctgccgggagcccgcctctctgggtctccctccctcccgtcccggtccccctcctcggggccttctatatgggccaccttctctcgaaggagccgcgtaaccgcccgagccagaagaggcctcgctgttgcagttggtgccgccgccggcgccctctcctcaggctgccccgccggaccccagccaaggtgccccctcagccggcggcgccccggagccgggactgcttcttccgcgggccctgcatgctctgcttcatcgtgcacagtcccggcgcgcccgcccccgccggcccagaggaggagccgccgctctcgccgccgccgcgggacggggcctacgctgccgcctcctcctctcagcacctggcgcggcgctacgcggccctggccgccgaggactgcgccgctgctgcccgccgcttcctgctatcctcggccgccgccgccgccgccgctgccgcctcggcttcgtcgcccgcctcctgctgcaaagagttggggctggctgcggccgccgcctgggagcagcagggccgaagtctcttcctggccagcttggggccggtgcgcttcctggggccgcccgccgccgtgcagctcttccgggggccgacaccgtcaccggccgagctccctacgccccccgaaatggtgtgcaagcggaagggggccggggtccccgcctgcaccccctgcaagcagccccgctgcggcggcgggggctgcggcggcggcggcggcggcggtggcgggggagggcctgcggggggaggcgcttcgccgccccggccccccgacgccggctgctgccaggccccggagcagcccccgcagccgctctgccctccgccctcttctcccacctccgaaggtgcccccaccgaagctggcggggacgctgtccgagccgggggcaccgcccccttgtccgcccagcagcagcatgaatgtggcgacgcggactgtcgggagtcccccgaaaacccctgcgactgtcacagggagccgccccccgaaaccccagacatcaaccagctgccgccgtccatcctgctcaagatattttccaatttgtcactggatgagcgttgcctttccgcatcattggtttgcaagtactggcgtgacctttgtttagacttccagttttggaagcagctggatcttagtagtcgtcagcaggtcactgatgaattgttggaaaaaattgcatcaagaagtcagaatataattgaaatcaacatttctgattgtcgcagtatgtctgataatggcgtatgtgttttagcatttaaatgtcctggacttcttaggtatacagcctacaggtgtaaacagctttctgacacctctattattgcggttgcctctcactgtcctttacttcagaaagtgcatgtaggcaaccaggacaaactcactgatgaaggactcaagcagctgggctcaaaatgcagagaactcaaagatattcatttcggccagtgttacaagatctcagatgaaggcatgatcgtcatagctaagggctgtctgaaattacaaaggatatacatgcaggaaaacaaattagtgacagatcagtcagtgaaagcatttgctgaacactgtcctgagcttcaatatgtaggcttcatgggttgttcagtcacttctaaaggagtcattcacctaaccaagctaagaaacctttccagcttggacctacgtcatatcactgaactggataatgaaaccgtgatggaaattgtcaagaggtgcaaaaatcttagctctctcaatctctgtctgaactggatcataaatgacaggtgtgtggaggtcattgcaaaggaaggacaaaacctgaaagagctatatttggtgtcctgtaaaatcacagattatgcactgatagccattgggcgatacagcatgacaatagagactgtggatgtcggatggtgtaaagaaatcacagaccaaggagccaccctgattgcacagagcagcaagtctctgagatatttggggctgatgagatgtgataaagtcaacgaagtgacggtggaacagctggtgcagcagtacccccacatcaccttcagcaccgtcctgcaggactgcaagaggaccttggagagagcctatcagatgggctggacccccaacatgtctgccgcctcctcctagcgctcctgcctcgcctagtccactgggatcattcagcagagcagaggagaattgtacatttggggagctgatctctcggaagggttttaactgtcacctgtctgtgtgtgttcaagtatgtgtatttgtgtcttgtttgcatactgcataccaaaagtgcagttgtcatttgttcccaagtgagctggctttttttcttagaaattaaagattatgaaagccacaaactttttagtttttaacttcaaaggcttctttctctttaaaaaaaaattatttttaatatagagtcaaaaaattggatgtattattttgagcttctaattgctgccacttggagatgtccaagtaagaaggccttctttttacatgggatgaattgtgcacttctactgatgatgactacagcagaagtgatgttatacgtacaggcacttacactctctcacatattcacacgtgtgcacatctacaccagggctctgatctactctagatcgtttcctgacagagaagccttcttccaggccactaaggtagcatgttatccactgtggcactgcctaactccgtgtatcctcgggtggccaacttgctatctggtgggtgacttggggactagaaagaataaagccttttctaaatttgttatatagaggcaacagtctgaactctcctggccagctcacgaaagttaattatacattattctacaaatgcattctgttgagcactaaatattttagttggttttatgttaacattgtgttagcttttatttcctggatagtaactggtcaggatatattttaatgatatttgaaactaatcttagcattgaagccaccaatgtaattaatggtgtgcagttattttaaaaactacagatcatttcattattttcttaattttggtaattattaaagtctatttctgagatacgagagggtagtcacattaatagaagattcatgagtgagatataagtagacaatctttctactgttgttgctctttttgctttgctttgggttcttgaacaggttttttggatatatgcatgttgtcattttggactagttctcatgctactgcaaagatctattgctagctaatatatgagttaagaaagaaaattagaaaatctgttcattgaaattctgtttacacttgtcagaaataagcatttctttgtttaattaaggattgccagcttcagttaagacaagacctatcagtaaatgaatatatgttttgatttaacacatctttacaattaattcataatagggactcaggctcaaataactgttcctgtgtctagatttataatgaggacatcagggagcctttttaagctaaagagtgattatctttcacagtagaactagaaacaaaaccctaacttgtgaagttgctatttatttttccctgagtgaatataactgttatttggtctttaacagatatactgaggtttgagtttcactttctttaagtctcacattgctaacatgacattagctgtaagaaacaagatagctttacatttgaatgccatttactgatttctaatgattctctttttttgtaaacaactgtttcctttgattatgtcaacatgtttctgatgtggcatttttgttttaatcccaatcggttaggaaaatctagtcagtaagcgccatgagtattcttcccataactaaatgggtttctaatttaatttgaagggaataaaatttgtgtaagaaaaaagctgtttaacattaataaactatatttcttcttacacattgaactgtatcattttcatatccacttccccaccactgaaatatcttatttcacaatattttaactgatttttaatccaaaactaatttataagacagtatgtatagtaatagtagcttgagtgaatatgcaaaagtttaatttttatatatgtcatactatattttaaatagttaaaaaagacaaaagaagggagagccatctatgatatagatggtaccatttcagttcaaagttgtaataacctttggagtgttacagtttggttgtcaaatggtttcagaatgtataattgatttttttaaatgttgcattgtttgaatctaaagtacagcactataacatgctttagcttgggggggtgggggtggggtggggacttgcacttattctctaaaatgttgactaatccagaaagcctgatgcaacataatctggaaaactgctttggtacatttgtagaaatccgtagaaataccatatccagcctcaaagcattaatctcaaaaaaaaaaaaaaaaaaaaaaaaaaacagccagaaaaaagcatcaccttgagtggtcctgtgatggttgttgaatgtgttctcattagatgctttgaaatgaggcttaaaataatttttctgggcaatatagagtttcttttttttgcttagaatgtcataaatacatgtgaacacgtttaatgcagggctttttattctctccaaaatgtcaacagtattttcagaataaagactatgaaatatattgctgtagtggaaaattctggtcctttgtctttaatgtctttttgagtggataaagaaaattcacccggtttgtagtttctatatttccgtgaatctttgaccttgcagtgggttgcaataaaag

SEQ ID NO: 133440 - DNA, 4059 bp, Homo sapiens
  Payload ID: 6078
  Gene Symbol: FBXL17
  Gene Name: F-box and leucine-rich repeat protein 17
  ENST ID: ENST00000619412
  CDS Start-End: 1-1392
atggtgtgcaagcggaagggggccggggtccccgcctgcaccccctgcaagcagccgctctgccctccgccctcttctcccacctccgaaggtgcccccaccgaagctggcggggacgctgtccgagccgggggcaccgcccccttgtccgcccagcagcagcatgaatgtggcgacgcggactgtcgggagtcccccgaaaacccctgcgactgtcacagggagccgccccccgaaaccccagacatcaaccagctgccgccgtccatcctgctcaagatattttccaatttgtcactggatgagcgttgcctttccgcatcattggtttgcaagtactggcgtgacctttgtttagacttccagttttggaagcagctggatcttagtagtcgtcagcaggtcactgatgaattgttggaaaaaattgcatcaagaagtcagaatataattgaaatcaacatttctgattgtcgcagtatgtctgataatggcgtatgtgttttagcatttaaatgtcctggacttcttaggtatacagcctacaggtgtaaacagctttctgacacctctattattgcggttgcctctcactgtcctttacttcagaaagtgcatgtaggcaaccaggacaaactcactgatgaaggactcaagcagctgggctcaaaatgcagagaactcaaagatattcatttcggccagtgttacaagatctcagatgaaggcatgatcgtcatagctaagggctgtctgaaattacaaaggatatacatgcaggaaaacaaattagtgacagatcagtcagtgaaagcatttgctgaacactgtcctgagcttcaatatgtaggcttcatgggttgttcagtcacttctaaaggagtcattcacctaaccaagctaagaaacctttccagcttggacctacgtcatatcactgaactggataatgaaaccgtgatggaaattgtcaagaggtgcaaaaatcttagctctctcaatctctgtctgaactggatcataaatgacaggtgtgtggaggtcattgcaaaggaaggacaaaacctgaaagagctatatttggtgtcctgtaaaatcacagattatgcactgatagccattgggcgatacagcatgacaatagagactgtggatgtcggatggtgtaaagaaatcacagaccaaggagccaccctgattgcacagagcagcaagtctctgagatatttggggctgatgagatgtgataaagtcaacgaagtgacggtggaacagctggtgcagcagtacccccacatcaccttcagcaccgtcctgcaggactgcaagaggaccttggagagagcctatcagatgggctggacccccaacatgtctgccgcctcctcctagcgctcctgcctcgcctagtccactgggatcattcagcagagcagaggagaattgtacatttggggagctgatctctcggaagggttttaactgtcacctgtctgtgtgtgttcaagtatgtgtatttgtgtcttgtttgcatactgcataccaaaagtgcagttgtcatttgttcccaagtgagctggctttttttcttagaaattaaagattatgaaagccacaaactttttagtttttaacttcaaaggcttctttctctttaaaaaaaaattatttttaatatagagtcaaaaaattggatgtattattttgagcttctaattgctgccacttggagatgtccaagtaagaaggccttctttttacatgggatgaattgtgcacttctactgatgatgactacagcagaagtgatgttatacgtacaggcacttacactctctcacatattcacacgtgtgcacatctacaccagggctctgatctactctagatcgtttcctgacagagaagccttcttccaggccactaaggtagcatgttatccactgtggcactgcctaactccgtgtatcctcgggtggccaacttgctatctggtgggtgacttggggactagaaagaataaagccttttctaaatttgttatatagaggcaacagtctgaactctcctggccagctcacgaaagttaattatacattattctacaaatgcattctgttgagcactaaatattttagttggttttatgttaacattgtgttagcttttatttcctggatagtaactggtcaggatatattttaatgatatttgaaactaatcttagcattgaagccaccaatgtaattaatggtgtgcagttattttaaaaactacagatcatttcattattttcttaattttggtaattattaaagtctatttctgagatacgagagggtagtcacattaatagaagattcatgagtgagatataagtagacaatctttctactgttgttgctctttttgctttgctttgggttcttgaacaggttttttggatatatgcatgttgtcattttggactagttctcatgctactgcaaagatctattgctagctaatatatgagttaagaaagaaaattagaaaatctgttcattgaaattctgtttacacttgtcagaaataagcatttctttgtttaattaaggattgccagcttcagttaagacaagacctatcagtaaatgaatatatgttttgatttaacacatctttacaattaattcataatagggactcaggctcaaataactgttcctgtgtctagatttataatgaggacatcagggagcctttttaagctaaagagtgattatctttcacagtagaactagaaacaaaaccctaacttgtgaagttgctatttatttttccctgagtgaatataactgttatttggtctttaacagatatactgaggtttgagtttcactttctttaagtctcacattgctaacatgacattagctgtaagaaacaagatagctttacatttgaatgccatttactgatttctaatgattctctttttttgtaaacaactgtttcctttgattatgtcaacatgtttctgatgtggcatttttgttttaatcccaatcggttaggaaaatctagtcagtaagcgccatgagtattcttcccataactaaatgggtttctaatttaatttgaagggaataaaatttgtgtaagaaaaaagctgtttaacattaataaactatatttcttcttacacattgaactgtatcattttcatatccacttccccaccactgaaatatcttatttcacaatattttaactgatttttaatccaaaactaatttataagacagtatgtatagtaatagtagcttgagtgaatatgcaaaagtttaatttttatatatgtcatactatattttaaatagttaaaaaagacaaaagaagggagagccatctatgatatagatggtaccatttcagttcaaagttgtaataacctttggagtgttacagtttggttgtcaaatggtttcagaatgtataattgatttttttaaatgttgcattgtttgaatctaaagtacagcactataacatgctttagcttgggggggtgggggtggggtggggacttgcacttattctctaaaatgttgactaatccagaaagcctgatgcaacataatctggaaaactgctttggtacatttgtagaaatccgtagaaataccatatccagcctcaaagcattaatctcaaaaaaaaaaaaaaaaaaaaaaaaaaacagccagaaaaaagcatcaccttgagtggtcctgtgatggttgttgaatgtgttctcattagatgctttgaaatgaggcttaaaataatttttctgggcaatatagagtttcttttttttgcttagaatgtcataaatacatgtgaacacgtttaatgcagggctttttattctctccaaaatgtcaacagtattttcagaataaagactatgaaatatattgctgtagtggaaaattctggtcctttgtctttaatgtctttttgagtggataaagaaaattcacccggtttgtagtttctatatttccgtgaatctttgaccttgcagtgggttgc

SEQ ID NO: 133441 - DNA, 3498 bp, Homo sapiens
  Payload ID: 6079
  Gene Symbol: FBXL18
  Gene Name: F-box and leucine-rich repeat protein 18
  Uniprot ID: Q96ME1
  ENST ID: ENST00000382368
  CDS Start-End: 125-2281
gagcccgctccttgccggggtctcggttgagcggtggacgcgccggcttcgagcatccctagccgggcaggtgggaggcacggggttgcggatcccgcggccgcggttcggacccgccggcgacatggccagctccggagaggacatatccaatgatgatgatgacatgcaccctgcagcagccgggatggcagacggggtccacctcctagggttctctgatgagatcctccttcacatcctgagtcacgtccccagcacagatctgattctgaacgtccggcgtacctgtcggaagcttgcagccctgtgccttgacaagagcctcatccacaccgtgttgctgcaaaaggactatcaggcgagcgaggacaaagtgaggcagctggtgaaggagatcggccgggagatccagcagctgagcatggctggctgctactggctgcctggctccaccgtggaacacgtggcccgctgccgcagcctggtgaaggtgaacctctcgggctgccacctcacttccctgcgcctctccaagatgctctcggccctgcagcacctgcgctcgctggccatcgacgtgagccccggcttcgacgccagccagctgagcagcgagtgcaaggccaccctgagccgcgtgcgggagctcaagcagacgctgttcactccctcctacggcgtggtgccctgctgcaccagcctagagaagctgctgctctacttcgagattctggaccgcacgcgcgagggcgccatcctctcgggccagcttatggtgggccagagcaacgtgccgcactaccagaacctgcgggtcttctatgcgcgcctggcccccggctacatcaaccaggaggtggtgcggctctacctggctgtgcttagcgaccgcactcctcagaacctccacgccttcctcatctccgtccctggcagcttcgcggagagcggcgccaccaagaacctcctggactccatggcgcgcaatgtcgtgctggatgccctgcagctgcccaagtcctggctgaacggctcttccctcctgcagcacatgaaattcaacaacccgttctacttcagtttcagccgctgtaccctgtcaggcggccatctgatccagcaggtcatcaacggcgggaaggacctgcggagcctggccagcttgaacctcagcggctgcgtccactgcctgtccccagactcgctgctccgcaaggcggaggacgacatcgacagcagcatcctggagactctggtggcgtcctgctgcaacctgcgccacctgaacctctcggccgcccaccaccacagctcggagggcctgggccgccacctctgccagctcctggcccggctgcgtcacctgcgctccctctccctgcctgtctgctctgtcgctgactccgcgccgcgcgccgaccgcgcgcccgcccagccggccatgcacgcagtgccgcgcggctttggcaagaaagtgcgtgtgggcgtgcagtcctgtcccagccccttctcgggccaggcgtgcccccagccctcctccgtgttctggtctctgctgaagaacctgcccttcctggaacacctcgagctgattgggtccaacttctcctccgccatgccccgcaacgagcccgccatccgcaactcgctcccaccctgcagccgcgcacagagtgtcggggactcggaggtggccgccatcggccagctggccttcctgcggcacctgacgctcgcacagctgcccagcgtccttacgggctccgggctggtcaatatcggcctgcagtgccagcagttgcggtccctgtcgctggccaacctgggcatgatggggaaggtggtgtacatgcccgcgctctcagacatgttgaagcactgcaagcggctgagggacctcaggctggagcagccctacttcagcgccaacgcccagttcttccaggcgctgagccagtgcccctcgctgcagcgcctgtgcctggtctctcgcagcggcaccctccagcccgatgccgtgctggccttcatggctcgctgcctgcaggttgtcatgtgccacctgttcaccggggagtccctcgccacctgcaagagcctgcagcagtcgcttctccgcagcttccaggccgagcggcccgcgttaaacgtcgtcatcttccctctgctccacgagggcctgaccgacgtcatccgggacgtccccctggtgcacctggatgagatcaccttatttaagagcagagtggccgaggaaccgccgaacctgtggtggtgagaggcggagccgccgcccatcggtctcagtcacctcgagaagctgcaggagcctgggacgccagggacccttggtttgtcacaagaggaagggggcctctctcccggccagccacgccccacctggctcctggggctcccggcgtctccacggctctctcatggggactgttgctctgtgaagtttaggtcgaggggatgcgttctgggtgacatgagggggctcgggggacggtcgatgtggggggctggctgaaccaggctgacccttggggcctggctggggggtttgtatactgagccgcaatccctgggggccctgtccacgggcctggagggcccgaaccccctgccacttccgaccgggaagcgtgtcccttggctgttgtgtttgtggtcacctgccaccggggccccgtggatgggcggccacatgctgtccccctgaagtccagtcggccgggctggtcaccgtgtatctgagtgtccccttgcatggtcaagtgtgacatggggaagggcctgccagtttagtggctgcagacttgggactctccatcccattaggacacacttgagcccactcatgtctctggggcttttctagccagatgatgcctgtggccccagagaggtcccctgaggttgggactgctggttggagcctctcctgtgacttttcagcccaaccagcagggcccgtttctaacgagagaggcctcctccccctcccacccaccccacggccttcagcttccctgggaaggtccatgcgcgttcctggggaaatcgatacacattcggctttgttagaataacgcgaaacattaaaacccagaaaggattcttaaggctggagtagcaatcacatgaccccatttcaaatgacttcatttaagactttaaaaatactcagctgggcgcgatggctcacgcctgtaatcccggcactttgggaggctgaggtgggtggatcacgaggtcaggagttcaagaccagcctggccaacatggtgaaaccccatctctactaaaaatacaaaaattagctgggcgtggtggcgggcgcctgtaatcctagctactcaggaggctgaggcaggagaatcgtttgaacctgggaggcggaggttgcagtgagccgagatcacaccattgcactccagcctggacaacagggtgagactccgcctcaaaaaaaaaaaaaaaaaaaaaaaa

SEQ ID NO: 133442 - DNA, 2686 bp, Homo sapiens
  Payload ID: 6079
  Gene Symbol: FBXL18
  Gene Name: F-box and leucine-rich repeat protein 18
  ENST ID: ENST00000458142
  CDS Start-End: 1-2057
gctgccgcagcctggtgaaggtgaacctctcgggctgccacctcacttccctgcgcctctccaagatgctctcggccctgcagcacctgcgctcgctggccatcgacgtgagccccggcttcgacgccagccagctgagcagcgagtgcaaggccaccctgagccgcgtgcgggagctcaagcagacgctgttcactccctcctacggcgtggtgccctgctgcaccagcctagagaagctgctgctctacttcgagattctggaccgcacgcgcgagggcgccatcctctcgggccagcttatggtgggccagagcaacgtgccgcactaccagaacctgcgggtcttctatgcgcgcctggcccccggctacatcaaccaggaggtggtgcggctctacctggctgtgcttagcgaccgcactcctcagaacctccacgccttcctcatctccgtccctggcagcttcgcggagagcggcgccaccaagaacctcctggactccatggcgcgcaatgtcgtgctggatgccctgcagctgcccaagtcctggctgaacggctcttccctcctgcagcacatgaaattcaacaacccgttctacttcagtttcagccgctgtaccctgtcaggcggccatctgatccagcaggtcatcaacggcgggaaggacctgcggagcctggccagcttgaacctcagcggctgcgtccactgcctgtccccagactcgctgctccgcaaggcggaggacgacatcgacagcagcatcctggagactctggtggcgtcctgctgcaacctgcgccacctgaacctctcggccgcccaccaccacagctcggagggcctgggccgccacctctgccagctcctggcccggctgcgtcacctgcgctccctctccctgcctgtctgctctgtcgctgactccgcgccgcgcgccgaccgcgcgcccgcccagccggccatgcacgcagtgccgcgcggctttggcaagaaagtgcgtgtgggcgtgcagtcctgtcccagccccttctcgggccaggcgtgcccccagccctcctccgtgttctggtctctgctgaagaacctgcccttcctggaacacctcgagctgattgggtccaacttctcctccgccatgccccgcaacgagcccgccatccgcaactcgctcccaccctgcagccgcgcacagagtgtcggggactcggaggtggccgccatcggccagctggccttcctgcggcacctgacgctcgcacagctgcccagcgtccttacgggctccgggctggtcaatatcggcctgcagtgccagcagttgcggtccctgtcgctggccaacctgggcatgatggggaaggtggtgtacatgcccgcgctctcagacatgttgaagcactgcaagcggctgagggacctcaggctggagcagccctacttcagcgccaacgcccagttcttccaggcgctgagccagtgcccctcgctgcagcgcctgtgcctggtctctcgcagcggcaccctccagcccgatgccgtgctggccttcatggctcgctgcctgcaggttgtcatgtgccacctgttcaccggggagtccctcgccacctgcaagagcctgcagcagtcgcttctccgcaggtggggagaggtgacaggaaggaggccccagctgttcacagagttgcgagaagagccatcagccaggacgtctcgagccactgggcgccgacaaccctgcttgccagactctggggtagtctgttgtccttgcggtcggccgctggctgtctcaggaataatcctggttggggtttccccctctctggttgtaaaaacaacttgtgtttatagagtactttttaaaaatttagactatgcatcaatcttttttcttgtttgtttgtttgagacagagtctcactctgtcgtccaggctggagtgcagtggcgggatctcagctcactgcaacctctgctttctgggttgcaacctcagcctcctgagcagctgggattacaagtgtgcaccactatacctggctaatttttgtatttttctttttttcttttttgagacagagtctcgctctgtcgcccaggctggagtgcagtggcgtgatctcggctcgctgcaagctctgcctcccgggttcacgacattctcctgcctcaacctcccaagtagctgggactacaggcgcccgccaccacacctggctaattttttgtattttttttttttttagtagagacggggtttcactgtgttggccaggatggtctcgatctcctgacctcatgatctgcccacctcggcctcccaaagtgctgggattacaggcgtgagccaccgcgcccggcctaatttttgtatttttagtagagacggggtttcatcatgttgcccaggctggtctctaactcctgacctcaggtgatccgcttacctcagcctcccaaagtgctgggattacaggcgtgagccacaacgcctggccaacatcaacctatttttaagtgaaggtttcccaacagtgaatgctgccaactttccctggagaatgaactggagatagggttctcatattgttttgtaatctgatttttaaaaatgtaacactacaccgtggagtcctcttgtgtcagtaaataaagccctaagtgattattctc

SEQ ID NO: 133443 - DNA, 2526 bp, Homo sapiens
  Payload ID: 6079
  Gene Symbol: FBXL18
  Gene Name: F-box and leucine-rich repeat protein 18
  Uniprot ID: Q96ME1
  ENST ID: ENST00000415009
  CDS Start-End: 79-2085
cttcgagcatccctagccgggcaggtgggaggcacggggttgcggatcccgcggccgcggttcggacccgccggcgacatggccagctccggagaggacatatccaatgatgatgatgacatgcaccctgcagcagccgggatggcagacggggtccacctcctagggttctctgatgagatcctccttcacatcctgagtcacgtccccagcacagatctgattctgaacgtccggcgtacctgtcggaagcttgcagccctgtgccttgacaagagcctcatccacaccgtgttgctgcaaaaggactatcaggcgagcgaggacaaagtgaggcagctggtgaaggagatcggccgggagatccagcagctgagcatggctggctgctactggctgcctggctccaccgtggaacacgtggcccgctgccgcagcctggtgaaggtgaacctctcgggctgccacctcacttccctgcgcctctccaagatgctctcggccctgcagcacctgcgctcgctggccatcgacgtgagccccggcttcgacgccagccagctgagcagcgagtgcaaggccaccctgagccgcgtgcgggagctcaagcagacgctgttcactccctcctacggcgtggtgccctgctgcaccagcctagagaagctgctgctctacttcgagattctggaccgcacgcgcgagggcgccatcctctcgggccagcttatggtgggccagagcaacgtgccgcactaccagaacctgcgggtcttctatgcgcgcctggcccccggctacatcaaccaggaggtggtgcggctctacctggctgtgcttagcgaccgcactcctcagaacctccacgccttcctcatctccgtccctggcagcttcgcggagagcggcgccaccaagaacctcctggactccatggcgcgcaatgtcgtgctggatgccctgcagctgcccaagtcctggctgaacggctcttccctcctgcagcacatgaaattcaacaacccgttctacttcagtttcagccgctgtaccctgtcaggcggccatctgatccagcaggtcatcaacggcgggaaggacctgcggagcctggccagcttgaacctcagcggctgcgtccactgcctgtccccagactcgctgctccgcaaggcggaggacgacatcgacagcagcatcctggagactctggtggcgtcctgctgcaacctgcgccacctgaacctctcggccgcccaccaccacagctcggagggcctgggccgccacctctgccagctcctggcccggctgcgtcacctgcgctccctctccctgcctgtctgctctgtcgctgactccgcgccgcgcgccgaccgcgcgcccgcccagccggccatgcacgcagtgccgcgcggctttggcaagaaagtgcgtgtgggcgtgcagtcctgtcccagccccttctcgggccaggcgtgcccccagccctcctccgtgttctggtctctgctgaagaacctgcccttcctggaacacctcgagctgattgggtccaacttctcctccgccatgccccgcaacgagcccgccatccgcaactcgctcccaccctgcagccgcgcacagagtgtcggggactcggaggtggccgccatcggccagctggccttcctgcggcacctgacgctcgcacagctgcccagcgtccttacgggctccgggctggtcaatatcggcctgcagtgccagcagttgcggtccctgtcgctggccaacctgggcatgatggggaaggtggtgtacatgcccgcgctctcagacatgttgaagcactgcaagcggctgagggacctcaggctggagcagccctacttcagcgccaacgcccagttcttccaggcgctgagccagtgcccctcgctgcagcgcctgtgcctggtctctcgcagcggcaccctccagcccgatgccgtgctggccttcatggctcgctgcctgcaggttgtcatgtgccacctgttcaccggggagtccctcgccacctgcaagagcctgcagcagtcgcttctccgcagccgctgaggagcccccagcagagctggggttgaagaggcagcttgtcccccgaccttcaggaatggcagcctgcagcaactggaacaaggccccaccgtaaagctctgtgtgtcccagggtcttcctgtcacccaggctggagtacagtagcgtgatcacagctcactgcagccttgacctcccgggctcaagacatcctcctgcctcagcctcctgagtagctgggactgcagttgtaagccaccgtgtccagccagtttctgttgtttgaagcccccaacttctagattgggaaacgaagctctgctgggcgtggtggctcacacctgtgagtggctcccagcactttgagaggccgaggagggaggactgcttgaagccagaagttcaagaccagcctgcacatcacgagacccgccctccccccaccaatctctataaaacatt

SEQ ID NO: 133444 - DNA, 1932 bp, Homo sapiens
  Payload ID: 6079
  Gene Symbol: FBXL18
  Gene Name: F-box and leucine-rich repeat protein 18
  Uniprot ID: Q96ME1
  ENST ID: ENST00000453700
  CDS Start-End: 95-1192
gcggtggacgcgccggcttcgagcatccctagccgggcaggtgggaggcacggggttgcggatcccgcggccgcggttcggacccgccggcgacatggccagctccggagaggacatatccaatgatgatgatgacatgcaccctgcagcagccgggatggcagacggggtccacctcctagggttctctgatgagatcctccttcacatcctgagtcacgtccccagcacagatctgattctgaacgtccggcgtacctgtcggaagcttgcagccctgtgccttgacaagagcctcatccacaccgtgttgctgcaaaaggactatcaggcgagcgaggacaaagtgaggcagctggtgaaggagatcggccgggagatccagcagctgagcatggctggctgctactggctgcctggctccaccgtggaacacgtggcccgctgccgcagcctggtgaaggtgaacctctcgggctgccacctcacttccctgcgcctctccaagatgctctcggccctgcagcacctgcgctcgctggccatcgacgtgagccccggcttcgacgccagccagctgagcagcgagtgcaaggccaccctgagccgcgtgcgggagctcaagcagacgctgttcactccctcctacggcgtggtgccctgctgcaccagcctagagaagctgctgctctacttcgagattctggaccgcacgcgcgagggcgccatcctctcgggccagcttatggtgggccagagcaacgtgccgcactaccagaacctgcgggtcttctatgcgcgcctggcccccggctacatcaaccaggaggtggtgcggctctacctggctgtgcttagcgaccgcactcctcagaacctccacgccttcctcatctccgtccctggcagcttcgcggagagcggcgccaccaagaacctcctggactccatggcgcgcaatgtcgtgctggatgccctgcagctgcccaagtcctggctgaacggctcttccctcctgcagcacatgaaattcaacaacccgttctacttcagtttcagccgctgtaccctgtcaggcggccatctgatccagcaggtcatcaacggcgggaaggacctgcggagcctggccagcttgaacctcagcggctgcgtccactgcctgtccccagactcgctgctctgtcgctgactccgcgccgcgcgccgaccgcgcgcccgcccagccggccatgcacgcagtgccgcgcggctttggcaagaaagtgcgtgtgggcgtgcagtcctgtcccagccccttctcgggccaggcgtgcccccagccctcctccgtgttctggtctctgctgaagaacctgcccttccctgggaaggtccatgcgcgttcctggggaaatcgatacacattcggctttgttagaataacgcgaaacattaaaacccagaaaggattcttaaggctggagtagcaatcacatgaccccatttcaaatgacttcatttaagactttaaaaatactcagctgggcgcgatggctcacgcctgtaatcccggcactttgggaggctgaggtgggtggatcacgaggtcaggagttcaagaccagcctggccaacatggtgaaaccccatctctactaaaaatacaaaaattagctgggcgtggtggcgggcgcctgtaatcctagctactcaggaggctgaggcaggagaatcgtttgaacctgggaggcggaggttgcagtgagccgagatcacaccattgcactccagcctggacaacagggtgagactccgcctcaaaaaaaaaaaaaaaaaaaaaaaaaaaaaaaaatatatatatatatatatatattcaacacactttgggaggatcacttgagcccaggagtttgagatcagcctgggcaacacagggataccccatctctg

SEQ ID NO: 133445 - DNA, 2076 bp, Homo sapiens
  Payload ID: 6079
  Gene Symbol: FBXL18
  Gene Name: F-box and leucine-rich repeat protein 18
  ENST ID: ENST00000620087
  CDS Start-End: 49-828
gtcgctgactccgcgccgcgcgccgaccgcgcgcccgcccagccggccatgcacgcagtgccgcgcggctttggcaagaaagtgcgtgtgggcgtgcagtcctgtcccccccttctcgggccaggcgtgcccccagccctcctccgtgttctggtctctgctgaagaacctgcccttcctggaacacctcgagctgattgggtccaacttctcctccgccatgccccgcaacgagcccgccatccgcaactcgctcccaccctgcagccgcgcacagagtgtcggggactcggaggtggccgccatcggccagctggccttcctgcggcacctgacgctcgcacagctgcccagcgtccttacgggctccgggctggtcaatatcggcctgcagtgccagcagttgcggtccctgtcgctggccaacctgggcatgatggggaaggtggtgtacatgcccgcgctctcagacatgttgaagcactgcaagcggctgagggacctcaggctggagcagccctacttcagcgccaacgcccagttcttccaggcgctgagccagtgcccctcgctgcagcgcctgtgcctggtctctcgcagcggcaccctccagcccgatgccgtgctggccttcatggctcgctgcctgcaggttgtcatgtgccacctgttcaccggggagtccctcgccacctgcaagagcctgcagcagtcgcttctccgcagcttccaggccgagcggcccgcgttaaacgtcgtcatcttccctctgctccacgagggcctgaccgacgtcatccgggacgtccccctggtgcacctggatgagatcaccttatttaagagcagagtggccgaggaaccgccgaacctgtggtggtgagaggcggagccgccgcccatcggtctcagtcacctcgagaagctgcaggagcctgggacgccagggacccttggtttgtcacaagaggaagggggcctctctcccggccagccacgccccacctggctcctggggctcccggcgtctccacggctctctcatggggactgttgctctgtgaagtttaggtcgaggggatgcgttctgggtgacatgagggggctcgggggacggtcgatgtggggggctggctgaaccaggctgacccttggggcctggctggggggtttgtatactgagccgcaatccctgggggccctgtccacgggcctggagggcccgaaccccctgccacttccgaccgggaagcgtgtcccttggctgttgtgtttgtggtcacctgccaccggggccccgtggatgggcggccacatgctgtccccctgaagtccagtcggccgggctggtcaccgtgtatctgagtgtccccttgcatggtcaagtgtgacatggggaagggcctgccagtttagtggctgcagacttgggactctccatcccattaggacacacttgagcccactcatgtctctggggcttttctagccagatgatgcctgtggccccagagaggtcccctgaggttgggactgctggttggagcctctcctgtgacttttcagcccaaccagcagggcccgtttctaacgagagaggcctcctccccctcccacccaccccacggccttcagcttccctgggaaggtccatgcgcgttcctggggaaatcgatacacattcggctttgttagaataacgcgaaacattaaaacccagaaaggattcttaaggctggagtagcaatcacatgaccccatttcaaatgacttcatttaagactttaaaaatactcagctgggcgcgatggctcacgcctgtaatcccggcactttgggaggctgaggtgggtggatcacgaggtcaggagttcaagaccagcctggccaacatggtgaaaccccatctctactaaaaatacaaaaattagctgggcgtggtggcgggcgcctgtaatcctagctactcaggaggctgaggcaggagaatcgtttgaacctgggaggcggaggttgcagtgagccgagatcacaccattgcactccagcctggacaacagggtgagactccgcctc

SEQ ID NO: 133446 - DNA, 3965 bp, Homo sapiens
  Payload ID: 6080
  Gene Symbol: FBXL19
  Gene Name: F-box and leucine-rich repeat protein 19
  ENST ID: ENST00000338343
  CDS Start-End: 388-2412
gggaggggagctgggactcggacccgggactgagtgggccccgggcagaagctgagcaccctgcgcccaaggagcccccgttggcctgggggggctgagggactgagcctcccagagcaggacctccccctggaagggccgcgccgcagcccgtgggagggcctcgcccccggcgccccccatctccactcgccgccgtcccggcctccgccggagggaggggccgagcgccctcggggggccgtggaccccggcgttctgagcgttccgcgccccgcgccgcccggcccccccgccgccgatggccgccgacccgccgggagctgccgagaagggagagatggctcccgggacacgtgtgagccctcggcgttgctgacgcccccaatgtcgtcgagcagccgggggccgggggccggagcgcgccgacgccgaacccgctgccgccgctgccgggcctgtgtgcgaactgagtgcggggattgccacttctgccgagacatgaagaagttcggggggcccgggcgcatgaagcagtcgtgcctgctccggcagtgcactgcccccgtgctcccacacacagctgtgtgcctcttgtgtggggaggctgggaaggaggacacggtggagggagaggaagagaaatttggtttgagcctcatggagtgtacaatctgcaacgagatcgtccaccccggctgcctgaagatggggaaggctgagggtgtcatcaatgcagagatccccaactgctgggagtgccctcgctgcacccaggaaggccgcaccagcaaggattcaggtgaggggcctggccgccgtagggccgacaacggcgaggagggcgccagcttggggagcggatggaagctgacagaggagccaccgcttccaccgcccccgcccaggcgcaagggccccctgcctgccgggccccccccggaggacgtgcctgggccccccaaacgaaaggaaagggaggcagggaatgagcctcccaccccaaggaaaaaggtgaaaggaggccgagagaggcacctgaagaaggtgggtggagacgcctgcctcctccgaggatcggacccaggcggcccgggcctgctgccccccagggttctgaatccgagccaggctttctcatcctgccaccctgggctccctcccgagaactgggagaaaccaaagccgcctttggcctctgcagagggcccagcggtgccgtccccgtccccgcagagggagaagctagagcgtttcaagcggatgtgccagctgctggaacgggtgcctgacacctcctcttcctcctcggactcagactccgactccgactcttcgggcacatcgctgagtgaggacgaagcccccggcgaggcccggaatgggcgacggccagcccggggcagctctggcgagaaggagaaccgtggggggcggcgggctgtgcgccctggcagtggggggcccctactcagctggcccctgggcccagccccaccaccccggcctccacagctggagcggcacgtggtgcggcccccgcctcgaagccctgagcccgacacactccccttggctgctggatccgaccaccccctgccccgggccgcctggcttcgcgtcttccagcacctcgggccgcgggagctgtgtatctgcatgcgagtctgccgaacttggagccgctggtgctatgacaagcgtctgtggcctcgaatggacctgagccggcggaagtcactgaccccgcccatgctcagtggtgtggttcgccgccagccccgtgccctggacctcagctggacaggtgtctccaagaagcagctcatgtggcttctgaaccgactacaaggcctgcaggagctggtgctctctggctgctcctggctctctgtctctgccctgggctcagccccactgccagccctgcggctcctggacctccgctggatcgaggatgttaaagactcccagctccgggagttgctgctgcctccaccagacaccaaaccagggcaaacagagagccgtggtcggctgcagggggtggcagaactgcgtctggcaggtttggagctgacagatgcctccctgcgtctcctgctgcgtcacgcaccccagctgagcgccctggacctgagccactgcgcccacgtcggggaccccagtgttcacctcctcacggcccccacgtccccactccgcgagaccctggtgcacctcaatcttgctggttgccaccgcctaacggaccactgcctcccgctgttccgccgctgccctcgtctacgccgcctagacctgcgctcctgccgccagctctcacccgaagcttgtgcccggctggcagctgccgggccccctggccccttccgctgccctgaggagaagctgcttctcaaggacagctagttgggcgccccccaccctcccccggactcgacaggagcctggacctccggcttcatttcacccctgctgggaggccaggttcccacctcaccaccctgggattcctgagtgtcagtgacttgggattcccacccagggactcaagccagccacccccttctttcccccctgcactgatatctctgggggtttctccttcctatgtcctgcccctgctacctgcttcattgtccatcccctgggggagtgggtcagaggtactggagggtgctgagccgaagggacggtgggaggggggttatggtgcaagtgttgggggggagaatggggaaaggacacacacaggatatgggagccaggggctgggggaggtggaaggggcggggggcggggcagacagcagaccaccaagggttcagggaacaaagaccagttacttggagtggggggtgggggtggggccacaaaaggaaaaccggaggagcaattggggatccaggtgtcagaggtaggggaaccaggggcaagctggggctgagctggaggtggggatgagagcaggtgtggggacagcaatacccccttgggggtcacctctctgcttcccccctccccaggcttcagttccttccccctgaccctgactccttgaacgtcactgaaaacggcagctattgcaaggagtgggggccgcgggcagccgctcttcagctcgcggcccaggggagtggcgaggggcgccccaaccccctgcccgcctctccgcacaatacttgaacattcatctgtactgaagtgttacttgaaccgggggaatctcggacctgggggagccggggtgtgaggggactggaccagcttggactgagacctgagaccgggccggtgggcgcccatttgggactgcgccacccccaggcttgttcttgttttactgtattgagcggcggcacccgccggacccgcattatggctgggggcgccagcccaagaatggggaccatgggactcctccagcctggctcttcccactctttcatcgtcatggaaacttgtatcccatttgcccagggaactgccactcctggttgccatggaaatagcagccaacggacacctcccgatgccagtgctaaggctggaaatggccccctcttagttgccatgggaacctagtaacagactctgctggccctccttccctgccccttcctcgagcgcggggtggggcttcgggaccccggggatgagccgggccaggtcccgcccctccgcgcaggcctccggggggccggggcttaccatgtaggggaggggagatctatccacatacctcaggtaacagggaggtgcgcgggtggggggagggctgggcggaccaaaggccggaggggtggggcctggggatagcgagaggcttgagaatggggccgcttgggggagggaagaggcagcccggcgaggggcaagcgggggacccagccgggctgggcccctgggccccgggtctgtacaatacggtttgctataaaactcaaaatcttccagccggg

SEQ ID NO: 133447 - DNA, 3796 bp, Homo sapiens
  Payload ID: 6080
  Gene Symbol: FBXL19
  Gene Name: F-box and leucine-rich repeat protein 19
  Uniprot ID: Q6PCT2
  ENST ID: ENST00000380310
  CDS Start-End: 159-2243
aaactcatctccagccctccttcctatgacctctccaccctggggaactggccctccttcctagaccctgcttccccttgaaagcccccacccccgcctgcagtcgccgccctccaggcccctcccctggagcgctggagggccccttagccccatggatgggtatgaaagtccccggaaagggggaatctgggccctcggcgttgctgacgcccccaatgtcgtcgagcagccgggggccgggggccggagcgcgccgacgccgaacccgctgccgccgctgccgggcctgtgtgcgaactgagtgcggggattgccacttctgccgagacatgaagaagttcggggggcccgggcgcatgaagcagtcgtgcctgctccggcagtgcactgcccccgtgctcccacacacagctgtgtgcctcttgtgtggggaggctgggaaggaggacacggtggagggagaggaagagaaatttggtttgagcctcatggagtgtacaatctgcaacgagatcgtccaccccggctgcctgaagatggggaaggctgagggtgtcatcaatgcagagatccccaactgctgggagtgccctcgctgcacccaggaaggccgcaccagcaaggattcaggtgaggggcctggccgccgtagggccgacaacggcgaggagggcgccagcttggggagcggatggaagctgacagaggagccaccgcttccaccgcccccgcccaggcgcaagggccccctgcctgccgggccccccccggaggacgtgcctgggccccccaaacgaaaggaaagggaggcagggaatgagcctcccaccccaaggaaaaaggtgaaaggaggccgagagaggcacctgaagaaggtgggtggagacgcctgcctcctccgaggatcggacccaggcggcccgggcctgctgccccccagggttctgaatccgagccaggctttctcatcctgccaccctgggctccctcccgagaactgggagaaaccaaagccgcctttggcctctgcagagggcccagcggtgccgtccccgtccccgcagagggagaagctagagcgtttcaagcggatgtgccagctgctggaacgggtgcctgacacctcctcttcctcctcggactcagactccgactccgactcttcgggcacatcgctgagtgaggacgaagcccccggcgaggcccggaatgggcgacggccagcccggggcagctctggcgagaaggagaaccgtggggggcggcgggctgtgcgccctggcagtggggggcccctactcagctggcccctgggcccagccccaccaccccggcctccacagctggagcggcacgtggtgcggcccccgcctcgaagccctgagcccgacacactccccttggctgctggatccgaccaccccctgccccgggccgcctggcttcgcgtcttccagcacctcgggccgcgggagctgtgtatctgcatgcgagtctgccgaacttggagccgctggtgctatgacaagcgtctgtggcctcgaatggacctgagccggcggaagtcactgaccccgcccatgctcagtggtgtggttcgccgccagccccgtgccctggacctcagctggacaggtgtctccaagaagcagctcatgtggcttctgaaccgactacaaggcctgcaggagctggtgctctctggctgctcctggctctctgtctctgccctgggctcagccccactgccagccctgcggctcctggacctccgctggatcgaggatgttaaagactcccagctccgggagttgctgctgcctccaccagacaccaaaccagggcaaacagagagccgtggtcggctgcagggggtggcagaactgcgtctggcaggtttggagctgacagatgcctccctgcgtctcctgctgcgtcacgcaccccagctgagcgccctggacctgagccactgcgcccacgtcggggaccccagtgttcacctcctcacggcccccacgtccccactccgcgagaccctggtgcacctcaatcttgctggttgccaccgcctaacggaccactgcctcccgctgttccgccgctgccctcgtctacgccgcctagacctgcgctcctgccgccagctctcacccgaagcttgtgcccggctggcagctgccgggccccctggccccttccgctgccctgaggagaagctgcttctcaaggacagctagttgggcgccccccaccctcccccggactcgacaggagcctggacctccggcttcatttcacccctgctgggaggccaggttcccacctcaccaccctgggattcctgagtgtcagtgacttgggattcccacccagggactcaagccagccacccccttctttcccccctgcactgatatctctgggggtttctccttcctatgtcctgcccctgctacctgcttcattgtccatcccctgggggagtgggtcagaggtactggagggtgctgagccgaagggacggtgggaggggggttatggtgcaagtgttgggggggagaatggggaaaggacacacacaggatatgggagccaggggctgggggaggtggaaggggcggggggcggggcagacagcagaccaccaagggttcagggaacaaagaccagttacttggagtggggggtgggggtggggccacaaaaggaaaaccggaggagcaattggggatccaggtgtcagaggtaggggaaccaggggcaagctggggctgagctggaggtggggatgagagcaggtgtggggacagcaatacccccttgggggtcacctctctgcttcccccctccccaggcttcagttccttccccctgaccctgactccttgaacgtcactgaaaacggcagctattgcaaggagtgggggccgcgggcagccgctcttcagctcgcggcccaggggagtggcgaggggcgccccaaccccctgcccgcctctccgcacaatacttgaacattcatctgtactgaagtgttacttgaaccgggggaatctcggacctgggggagccggggtgtgaggggactggaccagcttggactgagacctgagaccgggccggtgggcgcccatttgggactgcgccacccccaggcttgttcttgttttactgtattgagcggcggcacccgccggacccgcattatggctgggggcgccagcccaagaatggggaccatgggactcctccagcctggctcttcccactctttcatcgtcatggaaacttgtatcccatttgcccagggaactgccactcctggttgccatggaaatagcagccaacggacacctcccgatgccagtgctaaggctggaaatggccccctcttagttgccatgggaacctagtaacagactctgctggccctccttccctgccccttcctcgagcgcggggtggggcttcgggaccccggggatgagccgggccaggtcccgcccctccgcgcaggcctccggggggccggggcttaccatgtaggggaggggagatctatccacatacctcaggtaacagggaggtgcgcgggtggggggagggctgggcggaccaaaggccggaggggtggggcctggggatagcgagaggcttgagaatggggccgcttgggggagggaagaggcagcccggcgaggggcaagcgggggacccagccgggctgggcccctgggccccgggtctgtacaatacggtttgctataaaactcaaaatcttccagccggg

SEQ ID NO: 133448 - DNA, 3312 bp, Homo sapiens
  Payload ID: 6080
  Gene Symbol: FBXL19
  Gene Name: F-box and leucine-rich repeat protein 19
  ENST ID: ENST00000427128
  CDS Start-End: 1-1759
gcgcatgaagcagtcgtgcctgctccggcagtgcactgcccccgtgctcccacacacagctgtgtgcctcttgtgtggggaggctgggaaggaggacacggtggagggagaggaagagaaatttggtttgagcctcatggagtgtacaatctgcaacgagatcgtccaccccggctgcctgaagatggggaaggctgagggtgtcatcaatgcagagatccccaactgctgggagtgccctcgctgcacccaggaaggccgcaccagcaaggattcaggtgaggggcctggccgccgtagggccgacaacggcgaggagggcgccagcttggggagcggatggaagctgacagaggagccaccgcttccaccgcccccgcccaggcgcaagggccccctgcctgccgggccccccccggaggacgtgcctgggccccccaaacgaaaggaaagggaggcagggaatgagcctcccaccccaaggaaaaaggtgaaaggaggccgagagaggcacctgaagaagaaaccaaagccgcctttggcctctgcagagggcccagcggtgccgtccccgtccccgcagagggagaagctagagcgtttcaagcggatgtgccagctgctggaacgggtgcctgacacctcctcttcctcctcggactcagactccgactccgactcttcgggcacatcgctgagtgaggacgaagcccccggcgaggcccggaatgggcgacggccagcccggggcagctctggcgagaaggagaaccgtggggggcggcgggctgtgcgccctggcagtggggggcccctactcagctggcccctgggcccagccccaccaccccggcctccacagctggagcggcacgtggtgcggcccccgcctcgaagccctgagcccgacacactccccttggctgctggatccgaccaccccctgccccgggccgcctggcttcgcgtcttccagcacctcgggccgcgggagctgtgtatctgcatgcgagtctgccgaacttggagccgctggtgctatgacaagcgtctgtggcctcgaatggacctgagccggcggaagtcactgaccccgcccatgctcagtggtgtggttcgccgccagccccgtgccctggacctcagctggacaggtgtctccaagaagcagctcatgtggcttctgaaccgactacaaggcctgcaggagctggtgctctctggctgctcctggctctctgtctctgccctgggctcagccccactgccagccctgcggctcctggacctccgctggatcgaggatgttaaagactcccagctccgggagttgctgctgcctccaccagacaccaaaccagggcaaacagagagccgtggtcggctgcagggggtggcagaactgcgtctggcaggtttggagctgacagatgcctccctgcgtctcctgctgcgtcacgcaccccagctgagcgccctggacctgagccactgcgcccacgtcggggaccccagtgttcacctcctcacggcccccacgtccccactccgcgagaccctggtgcacctcaatcttgctggttgccaccgcctaacggaccactgcctcccgctgttccgccgctgccctcgtctacgccgcctagacctgcgctcctgccgccagctctcacccgaagcttgtgcccggctggcagctgccgggccccctggccccttccgctgccctgaggagaagctgcttctcaaggacagctagttgggcgccccccaccctcccccggactcgacaggagcctggacctccggcttcatttcacccctgctgggaggccaggttcccacctcaccaccctgggattcctgagtgtcagtgacttgggattcccacccagggactcaagccagccacccccttctttcccccctgcactgatatctctgggggtttctccttcctatgtcctgcccctgctacctgcttcattgtccatcccctgggggagtgggtcagaggtactggagggtgctgagccgaagggacggtgggaggggggttatggtgcaagtgttgggggggagaatggggaaaggacacacacaggatatgggagccaggggctgggggaggtggaaggggcggggggcggggcagacagcagaccaccaagggttcagggaacaaagaccagttacttggagtggggggtgggggtggggccacaaaaggaaaaccggaggagcaattggggatccaggtgtcagaggtaggggaaccaggggcaagctggggctgagctggaggtggggatgagagcaggtgtggggacagcaatacccccttgggggtcacctctctgcttcccccctccccaggcttcagttccttccccctgaccctgactccttgaacgtcactgaaaacggcagctattgcaaggagtgggggccgcgggcagccgctcttcagctcgcggcccaggggagtggcgaggggcgccccaaccccctgcccgcctctccgcacaatacttgaacattcatctgtactgaagtgttacttgaaccgggggaatctcggacctgggggagccggggtgtgaggggactggaccagcttggactgagacctgagaccgggccggtgggcgcccatttgggactgcgccacccccaggcttgttcttgttttactgtattgagcggcggcacccgccggacccgcattatggctgggggcgccagcccaagaatggggaccatgggactcctccagcctggctcttcccactctttcatcgtcatggaaacttgtatcccatttgcccagggaactgccactcctggttgccatggaaatagcagccaacggacacctcccgatgccagtgctaaggctggaaatggccccctcttagttgccatgggaacctagtaacagactctgctggccctccttccctgccccttcctcgagcgcggggtggggcttcgggaccccggggatgagccgggccaggtcccgcccctccgcgcaggcctccggggggccggggcttaccatgtaggggaggggagatctatccacatacctcaggtaacagggaggtgcgcgggtggggggagggctgggcggaccaaaggccggaggggtggggcctggggatagcgagaggcttgagaatggggccgcttgggggagggaagaggcagcccggcgaggggcaagcgggggacccagccgggctgggcccctgggccccgggtctgtacaatacggtttgctataaaactcaaaatcttccagccggg

SEQ ID NO: 133449 - DNA, 2570 bp, Homo sapiens
  Payload ID: 6080
  Gene Symbol: FBXL19
  Gene Name: F-box and leucine-rich repeat protein 19
  ENST ID: ENST00000565690
  CDS Start-End: 106-1782
tgtaggtggagggacctgtcaggggtctcccaggccagggccccagtgggcccatctgaccctgccaccatccacctacagccctcggcgttgctgacgcccccaatgtcgtcgagcagccgggggccgggggccggagcgcgccgacgccgaacccgctgccgccgctgccgggcctgtgtgcgaactgagtgcggggattgccacttctgccgagacatgaagaagttcggggggcccgggcgcatgaagcagtcgtgcctgctccggcagtgcactgcccccgtgctcccacacacagctgtgtgcctcttgtgtggggaggctgggaaggaggacacggtggagggagaggaagagaaatttggtttgagcctcatggagtgtacaatctgcaacgagatcgtccaccccggctgcctgaagatggggaaggctgagggtgtcatcaatgcagagatccccaactgctgggagtgccctcgctgcacccaggaaggccgcaccagcaaggtgaaaggaggccgagagaggcacctgaagaagaaaccaaagccgcctttggcctctgcagagggcccagcggtgccgtccccgtccccgcagagggagaagctagagcgtttcaagcggatgtgccagctgctggaacgggtgcctgacacctcctcttcctcctcggactcagactccgactccgactcttcgggcacatcgctgagtgaggacgaagcccccggcgaggcccggaatgggcgacggccagcccggggcagctctggcgagaaggagaaccgtggggggcggcgggctgtgcgccctggcagtggggggcccctactcagctggcccctgggcccagccccaccaccccggcctccacagctggagcggcacgtggtgcggcccccgcctcgaagccctgagcccgacacactccccttggctgctggatccgaccaccccctgccccgggccgcctggcttcgcgtcttccagcacctcgggccgcgggagctgtgtatctgcatgcgagtctgccgaacttggagccgctggtgctatgacaagcgtctgtggcctcgaatggacctgagccggcggaagtcactgaccccgcccatgctcagtggtgtggttcgccgccagccccgtgccctggacctcagctggacaggtgtctccaagaagcagctcatgtggcttctgaaccgactacaaggcctgcaggagctggtgctctctggctgctcctggctctctgtctctgccctgggctcagccccactgccagccctgcggctcctggacctccgctggatcgaggatgttaaagactcccagctccgggagttgctgctgcctccaccagacaccaaaccagggcaaacagagagccgtggtcggctgcagggggtggcagaactgcgtctggcaggtttggagctgacagatgcctccctgcgtctcctgctgcgtcacgcaccccagctgagcgccctggacctgagccactgcgcccacgtcggggaccccagtgttcacctcctcacggcccccacgtccccactccgcgagaccctggtgcacctcaatcttgctggttgccaccgcctaacggaccactgcctcccgctgttccgccgctgccctcgtctacgccgcctagacctgcgctcctgccgccagctctcacccgaagcttgtgcccggctggcagctgccgggccccctggccccttccgctgccctgaggagaagctgcttctcaaggacagctagttgggcgccccccaccctcccccggactcgacaggagcctggacctccggcttcatttcacccctgctgggaggccaggttcccacctcaccaccctgggattcctgagtgtcagtgacttgggattcccacccagggactcaagccagccacccccttctttcccccctgcactgatatctctgggggtttctccttcctatgtcctgcccctgctacctgcttcattgtccatcccctgggggagtgggtcagaggtactggagggtgctgagccgaagggacggtgggaggggggttatggtgcaagtgttgggggggagaatggggaaaggacacacacaggatatgggagccaggggctgggggaggtggaaggggcggggggcggggcagacagcagaccaccaagggttcagggaacaaagaccagttacttggagtggggggtgggggtggggccacaaaaggaaaaccggaggagcaattggggatccaggtgtcagaggtaggggaaccaggggcaagctggggctgagctggaggtggggatgagagcaggtgtggggacagcaatacccccttgggggtcacctctctgcttcccccctccccaggcttcagttccttccccctgaccctgactccttgaacgtcactgaaaacggcagctattgcaaggagtgggggccgcgggcagccgctcttcagctcgcggcccaggggagtggcgaggggcgccccaaccccctgcccgcctctccgcacaatacttgaacattcatctg

SEQ ID NO: 133450 - DNA, 546 bp, Homo sapiens
  Payload ID: 6080
  Gene Symbol: FBXL19
  Gene Name: F-box and leucine-rich repeat protein 19
  ENST ID: ENST00000566320
  CDS Start-End: 1-416
gcctgcaggagctggtgctctctggctgctcctggctctctgtctctgccctgggctcagccccactgccagccctgcggctcctggacctccgctggatcgaggatgttaaagactcccagctccgggagttgctgctgcctccaccagacaccaaaccagggcaaacagagagccgtggtcggctgcagggggtggcagaactgcgtctggcaggtttggagctgacagatgcctccctgcgtctcctgctgcgtcacgcaccccagctgagcgccctggacctgagccactgcgcccacgtcggggaccccagtgttcacctcctcacggcccccacgtccccactccgcgagaccctggtgcacctcaatcttgctggcttcagttccttccccctgaccctgactccttgaacgtcactgaaaacggcagctattgcaaggagtgggggccgcgggcagccgctcttcagctcgcggcccaggggagtggcgaggggcgccccaaccccctgcccgcctctccgcacaatacttgaacatt

SEQ ID NO: 133451 - DNA, 2462 bp, Homo sapiens
  Payload ID: 6080
  Gene Symbol: FBXL19
  Gene Name: F-box and leucine-rich repeat protein 19
  ENST ID: ENST00000562319
  CDS Start-End: 219-2243
aaactcatctccagccctccttcctatgacctctccaccctggggaactggccctccttcctagaccctgcttccccttgaaagcccccacccccgcctgcagtcgccgccctccaggcccctcccctggagcgctggagggccccttagccccatggatgggtatgaaagtccccggaaagggggaatctgggccctcggcgttgctgacgcccccaatgtcgtcgagcagccgggggccgggggccggagcgcgccgacgccgaacccgctgccgccgctgccgggcctgtgtgcgaactgagtgcggggattgccacttctgccgagacatgaagaagttcggggggcccgggcgcatgaagcagtcgtgcctgctccggcagtgcactgcccccgtgctcccacacacagctgtgtgcctcttgtgtggggaggctgggaaggaggacacggtggagggagaggaagagaaatttggtttgagcctcatggagtgtacaatctgcaacgagatcgtccaccccggctgcctgaagatggggaaggctgagggtgtcatcaatgcagagatccccaactgctgggagtgccctcgctgcacccaggaaggccgcaccagcaaggattcaggtgaggggcctggccgccgtagggccgacaacggcgaggagggcgccagcttggggagcggatggaagctgacagaggagccaccgcttccaccgcccccgcccaggcgcaagggccccctgcctgccgggccccccccggaggacgtgcctgggccccccaaacgaaaggaaagggaggcagggaatgagcctcccaccccaaggaaaaaggtgaaaggaggccgagagaggcacctgaagaaggtgggtggagacgcctgcctcctccgaggatcggacccaggcggcccgggcctgctgccccccagggttctgaatccgagccaggctttctcatcctgccaccctgggctccctcccgagaactgggagaaaccaaagccgcctttggcctctgcagagggcccagcggtgccgtccccgtccccgcagagggagaagctagagcgtttcaagcggatgtgccagctgctggaacgggtgcctgacacctcctcttcctcctcggactcagactccgactccgactcttcgggcacatcgctgagtgaggacgaagcccccggcgaggcccggaatgggcgacggccagcccggggcagctctggcgagaaggagaaccgtggggggcggcgggctgtgcgccctggcagtggggggcccctactcagctggcccctgggcccagccccaccaccccggcctccacagctggagcggcacgtggtgcggcccccgcctcgaagccctgagcccgacacactccccttggctgctggatccgaccaccccctgccccgggccgcctggcttcgcgtcttccagcacctcgggccgcgggagctgtgtatctgcatgcgagtctgccgaacttggagccgctggtgctatgacaagcgtctgtggcctcgaatggacctgagccggcggaagtcactgaccccgcccatgctcagtggtgtggttcgccgccagccccgtgccctggacctcagctggacaggtgtctccaagaagcagctcatgtggcttctgaaccgactacaaggcctgcaggagctggtgctctctggctgctcctggctctctgtctctgccctgggctcagccccactgccagccctgcggctcctggacctccgctggatcgaggatgttaaagactcccagctccgggagttgctgctgcctccaccagacaccaaaccagggcaaacagagagccgtggtcggctgcagggggtggcagaactgcgtctggcaggtttggagctgacagatgcctccctgcgtctcctgctgcgtcacgcaccccagctgagcgccctggacctgagccactgcgcccacgtcggggaccccagtgttcacctcctcacggcccccacgtccccactccgcgagaccctggtgcacctcaatcttgctggttgccaccgcctaacggaccactgcctcccgctgttccgccgctgccctcgtctacgccgcctagacctgcgctcctgccgccagctctcacccgaagcttgtgcccggctggcagctgccgggccccctggccccttccgctgccctgaggagaagctgcttctcaaggacagctagttgggcgccccccaccctcccccggactcgacaggagcctggacctccggcttcatttcacccctgctgggaggccaggttcccacctcaccaccctgggattcctgagtgtcagtgacttgggattcccacccagggactcaagccagccacccccttctttcccccctgcactgatatctctgggggtttctccttcctatgtcctgcccctgctac

SEQ ID NO: 133452 - DNA, 299 bp, Homo sapiens
  Payload ID: 6080
  Gene Symbol: FBXL19
  Gene Name: F-box and leucine-rich repeat protein 19
  ENST ID: ENST00000562798
  CDS Start-End: 123-299
atcttgcttgtagtcctctttccttttcacctttccattgttcctgacgagtagaaatggcagcgggaaggcagcagatggactgcgactcccgtcagccctcggcgttgctgacgcccccaatgtcgtcgagcagccgggggccgggggccggagcgcgccgacgccgaacccgctgccgccgctgccgggcctgtgtgcgaactgagtgcggggattgccacttctgccgagacatgaagaagttcggggggcccgggcgcatgaagcagtcgtgcctgctccggcagtgcactgcc

SEQ ID NO: 133453 - DNA, 817 bp, Homo sapiens
  Payload ID: 6080
  Gene Symbol: FBXL19
  Gene Name: F-box and leucine-rich repeat protein 19
  ENST ID: ENST00000565939
  CDS Start-End: 1-368
cagccccactgccagccctgcggctcctggacctccgctggatcgaggatgttaaagactcccagctccgggagttgctgctgcctccaccagacaccaaaccagctgagcgccctggacctgagccactgcgcccacgtcggggaccccagtgttcacctcctcacggcccccacgtccccactccgcgagaccctggtgcacctcaatcttgctggttgccaccgcctaacggaccactgcctcccgctgttccgccgctgccctcgtctacgccgcctagacctgcgctcctgccgccagctctcacccgaagcttgtgcccggctggcagctgccgggccccctggccccttccgctgccctgaggagaagctgcttctcaaggacagctagttgggcgccccccaccctcccccggactcgacaggagcctggacctccggcttcatttcacccctgctgggaggccaggttcccacctcaccaccctgggattcctgagtgtcagtgacttgggattcccacccagggactcaagccagccacccccttctttcccccctgcactgatatctctgggggtttctccttcctatgtcctgcccctgctacctgcttcattgtccatcccctgggggagtgggtcagaggtactggagggtgctgagccgaagggacggtgggaggggggttatggtgcaagtgttgggggggagaatggggaaaggacacacacaggatatgggagccaggggctgggggaggtggaaggggcggggggcggggcagacagcagaccaccaagggttcaggg

SEQ ID NO: 133454 - DNA, 3641 bp, Homo sapiens
  Payload ID: 6080
  Gene Symbol: FBXL19
  Gene Name: F-box and leucine-rich repeat protein 19
  ENST ID: ENST00000471231
  CDS Start-End: 947-2095
tctttccttttcacctttccattgttcctgacgagtagaaatggcagcgggaaggcagcagatggactgcgactcccgtcagccgggggccgggggccggagcgcgccgacgccgaacccgctgccgccgctgccgggcctgtgtgcgaactgagtgcggggattgccacttctgccgagacatgaagaagttcggggggcccgggcgcatgaagcagtcgtgcctgctccggcagtgcactgcccccgtgctcccacacacagctgtgtgcctcttgtgtggggaggctgggaaggaggacacggtggagggagaggaagagaaatttggtttgagcctcatggagtgtacaatctgcaacgagatcgtccaccccggctgcctgaagatggggaaggctgagggtgtcatcaatgcagagatccccaactgctgggagtgccctcgctgcacccaggaaggccgcaccagcaaggattcaggtgaggggcctggccgccgtagggccgacaacggcgaggagggcgccagcttggggagcggatggaagctgacagaggagccaccgcttccaccgcccccgcccaggcgcaagggccccctgcctgccgggccccccccggaggacgtgcctgggccccccaaacgaaaggaaagggaggcagggaatgagcctcccaccccaaggaaaaaggtgaaaggaggccgagagaggcacctgaagaaggtgggtggagacgcctgcctcctccgaggatcggacccaggcggcccgggcctgctgccccccagggttctgaatccgagccaggctttctcatcctgccaccctgggctccctcccgagaactgggaggtaaaccaaagccgcctttggcctctgcagagggcccagcggtgccgtccccgtccccgcagagggagaagctagagcgtttcaagcggatgtgccagctgctggaacgggtgcctgacacctcctcttcctcctcggactcagactccgactccgactcttcgggcacatcgctgagtgaggacgaagcccccggcgaggcccggaatgggcgacggccagcccggggcagctctggcgagaaggagaaccgtggggggcggcgggctgtgcgccctggcagtggggggcccctactcagctggcccctgggcccagccccaccaccccggcctccacagctggagcggcacgtggtgcggcccccgcctcgaagccctgagcccgacacactccccttggctgctggatccgaccaccccctgccccgggccgcctggcttcgcgtcttccagcacctcgggccgcgggagctgtgtatctgcatgcgagtctgccgaacttggagccgctggtgctatgacaagcgtctgtggcctcgaatggacctgagccggcggaagtcactgaccccgcccatgctcagtggtgtggttcgccgccagccccgtgccctggacctcagctggacaggtgtctccaagaagcagctcatgtggcttctgaaccgactacaaggcctgcaggagctggtgctctctggctgctcctggctctctgtctctgccctgggctcagccccactgccagccctgcggctcctggacctccgctggatcgaggatgttaaagactcccagctccgggagttgctgctgcctccaccagacaccaaaccagggcaaacagagagccgtggtcggctgcagggggtggcagaactgcgtctggcaggtttggagctgacagatgcctccctgcgtctcctgctgcgtcacgcaccccagctgagcgccctggacctgagccactgcgcccacgtcggggaccccagtgttcacctcctcacggcccccacgtccccactccgcgagaccctggtgcacctcaatcttgctggttgccaccgcctaacggaccactgcctcccgctgttccgccgctgccctcgtctacgccgcctagacctgcgctcctgccgccagctctcacccgaagcttgtgcccggctggcagctgccgggccccctggccccttccgctgccctgaggagaagctgcttctcaaggacagctagttgggcgccccccaccctcccccggactcgacaggagcctggacctccggcttcatttcacccctgctgggaggccaggttcccacctcaccaccctgggattcctgagtgtcagtgacttgggattcccacccagggactcaagccagccacccccttctttcccccctgcactgatatctctgggggtttctccttcctatgtcctgcccctgctacctgcttcattgtccatcccctgggggagtgggtcagaggtactggagggtgctgagccgaagggacggtgggaggggggttatggtgcaagtgttgggggggagaatggggaaaggacacacacaggatatgggagccaggggctgggggaggtggaaggggcggggggcggggcagacagcagaccaccaagggttcagggaacaaagaccagttacttggagtggggggtgggggtggggccacaaaaggaaaaccggaggagcaattggggatccaggtgtcagaggtaggggaaccaggggcaagctggggctgagctggaggtggggatgagagcaggtgtggggacagcaatacccccttgggggtcacctctctgcttcccccctccccaggcttcagttccttccccctgaccctgactccttgaacgtcactgaaaacggcagctattgcaaggagtgggggccgcgggcagccgctcttcagctcgcggcccaggggagtggcgaggggcgccccaaccccctgcccgcctctccgcacaatacttgaacattcatctgtactgaagtgttacttgaaccgggggaatctcggacctgggggagccggggtgtgaggggactggaccagcttggactgagacctgagaccgggccggtgggcgcccatttgggactgcgccacccccaggcttgttcttgttttactgtattgagcggcggcacccgccggacccgcattatggctgggggcgccagcccaagaatggggaccatgggactcctccagcctggctcttcccactctttcatcgtcatggaaacttgtatcccatttgcccagggaactgccactcctggttgccatggaaatagcagccaacggacacctcccgatgccagtgctaaggctggaaatggccccctcttagttgccatgggaacctagtaacagactctgctggccctccttccctgccccttcctcgagcgcggggtggggcttcgggaccccggggatgagccgggccaggtcccgcccctccgcgcaggcctccggggggccggggcttaccatgtaggggaggggagatctatccacatacctcaggtaacagggaggtgcgcgggtggggggagggctgggcggaccaaaggccggaggggtggggcctggggatagcgagaggcttgagaatggggccgcttgggggagggaagaggcagcccggcgaggggcaagcgggggacccagccgggctgggcccctgggccccgggtctgtacaatacggtttgctataaaactcaaaatcttcc

SEQ ID NO: 133455 - DNA, 511 bp, Homo sapiens
  Payload ID: 6081
  Gene Symbol: FBXL2
  Gene Name: F-box and leucine-rich repeat protein 2
  ENST ID: ENST00000425973
  CDS Start-End: 42-284
gtgtgacttcgggctgtgggctcgctcgcggctcttcggccatggttttctcaaacaatgatgaaggccttattaacaaaaagttacccaaagaacttctgttaagaatgctgttcagcttgttgttaaattttacttggtctaatccagaatgtactaagtatgtacatagcattggtctggattctttttgtaatgtgcactccatgggctttttaaaggactgctgcctctatttcctgctgtctgtggtgcctgctgccttatataccagggcatcctaacagggtcgagtggtggaaaatatctcgaagcgatgcggtggattcctgaggaagctcagcttgcgaggctgcattggtgttggggattcctccttgaagacctttgcacagaactgccgaaacattgaacatttgaacctcaatggatgcacaaaaatcactgacagcacgtgttatagccttagcagattctgttccaagctgaaacatctggatctgacctcctg

SEQ ID NO: 133456 - DNA, 2223 bp, Homo sapiens
  Payload ID: 6081
  Gene Symbol: FBXL2
  Gene Name: F-box and leucine-rich repeat protein 2
  ENST ID: ENST00000422741
  CDS Start-End: 38-148
gacttcgggctgtgggctcgctcgcggctcttcggccatggttttctcaaacaatgatgaaggccttattaacaaaaagttacccaaagaacttctgttaagggtcgagtggtggaaaatatctcgaagcgatgcggtggattcctgaggaagctcagcttgcgaggctgcattggtgttggggattcctccttgaagacctttgcacagaactgccgaaacattgaacatttgaacctcaatggatgcacaaaaatcactgacagtgcgtctgctctttttcagcacgtgttatagccttagcagattctgttccaagctgaaacatctggatctgacctcctgtgtgtctattacaaacagctccttgaaggggatcagtgagggctgccgaaacctggagtacctgaacctctcttggtgtgatcagatcacgaaggatggcatcgaggcactggtgcgaggttgtcgaggcctgaaagccctgctcctgaggggctgcacacagttagaagatgaagctctgaaacacattcagaattactgccatgagcttgtgagcctcaacttgcagtcctgctcacgtatcacggatgaaggtgtggtgcagatatgcaggggctgtcaccggctacaggctctctgcctttcgggttgcagcaacctcacagatgcctctcttacagccctgggtttgaactgtccgcgactgcaaattttggaggctgcccgatgctcccatttgactgacgcaggttttacacttttagctcggaattgccacgaattggagaagatggatcttgaagaatgcatcctgataaccgacagcacactcatccagctctccattcactgtcctaaactgcaagccctgagcctgtcccactgtgaactcatcacagatgatgggatcctgcacctgagcaacagtacctgtggccatgagaggctgcgggtactggagttggacaactgcctcctcatcactgatgtggccctggaacacctagagaactgccgaggcctggagcgcctcgagctgtacgactgccagcaggttacccgtgcaggcatcaagcggatgcgggctcagctccctcatgtcaaagtccacgcctactttgctcccgtcaccccaccgacagcagtggcaggaagtggacagcgactgtgcaggtgctgtgtcattctctgacagcagctgcctgggcccaaggggtgatgaggcatcctttcctctagaagacctgagtcttcctgaccgactccaccatcacccaatctgttgattctccattgggaaaggcatttacaggtaaaagacttctgtatggattgcagttactctggtgatagttttcacctttattctgctgtgaaacaatcaaatcaaagccttgtgtcagttaacacatgacaagtggtctcaatgcagctaggaccatgccagaaacctggatctcttaagagattggtacctacctaggtacgaaagttctacccttggcatactcagcattcctcaaaaagaccatcagtgttagcacaaactgagcagaaaaaataagctgttgattttctacctgatacttaagccagtggcctactttaattcacaattccattttgattagcaggacttttccactttgaagataaatagcaactttatcaaagtgactgtactgcaaattaattcataatgcctgatagttttatatatagagacttatgtggaaggcatgttaataggtttccatgagacaccaaagaaaagaggactctatactgggtggagcagggtcttcacctttttgtttctgtcaacttgtcatatacacctccagggaccaaaaacaaaagcagctcggagtctgtgttgcctgattggaaagtagaagctctggtgtatgctacagcacataacacatttttactaaaggaaaaaagctaattatgtccatgcctctcgtaaaactggggggaaccttaaagagaaagaactaaggcttaagttatctgtagtataatcaattagaagtaatgaatggatgcatgtaaaatggatgtgattttttttcaagcttattttgaaatcttaaaaatcaggttacaccatagctactcaaaagttttacacacttaaaactcagatcagtaagtgttggtaccttttagactcataaaattgaataaaccattgcaatgctttaaaaaaaa

SEQ ID NO: 133457 - DNA, 1581 bp, Homo sapiens
  Payload ID: 6081
  Gene Symbol: FBXL2
  Gene Name: F-box and leucine-rich repeat protein 2
  ENST ID: ENST00000421391
  CDS Start-End: 37-426
acttcgggctgtgggctcgctcgcggctcttcggccatggttttctcaaacaatgatgaaggccttattaacaaaaagttacccaaagaacttctgttaagaatattttccttcttggatatagtaactttgtgccgatgtgcacagatttccaaggcttggaacatcttagccctggatggaagcaactggcaaagaatagatctttttaactttcaaacagatgtagagggtcgagtggtggaaaatatctcgaagcgatgcggtggattcctgaggaagctcagcttgcgaggctgcattggtgttggggattcctccttgaagacctttgcacagaactgccgaaacattgaacatttgaacctcaatggatgcacaaaaatcactgacagtgcgtctgctctttttcagcacgtgttatagccttagcagattctgttccaagctgaaacatctggatctgacctcctgtgtgtctattacaaacagctccttgaaggggatcagtgagggctgccgaaacctggagtacctgaacctctcttggtgtgatcagatcacgaaggatggcatcgaggcactggtgcgaggttgtcgaggcctgaaagccctgctcctgaggggctgcacacagttagaagatgaagctctgaaacacattcagaattactgccatgagcttgtgagcctcaacttgcagtcctgctcacgtatcacggatgaaggtgtggtgcagatatgcaggggctgtcaccggctacaggctctctgcctttcgggttgcagcaacctcacagatgcctctcttacagccctgggtttgaactgtccgcgactgcaaattttggaggctgcccgatgctcccatttgactgacgcaggttttacacttttagctcggaattgccacgaattggagaagatggatcttgaagaatgcatcctgataaccgacagcacactcatccagctctccattcactgtcctaaactgcaagccctgagcctgtcccactgtgaactcatcacagatgatgggatcctgcacctgagcaacagtacctgtggccatgagaggctgcgggtactggagttggacaactgcctcctcatcactgatgtggccctggaacacctagagaactgccgaggcctggagcgcctcgagctgtacgactgccagcaggttacccgtgcaggcatcaagcggatgcgggctcagctccctcatgtcaaagtccacgcctactttgctcccgtcaccccaccgacagcagtggcaggaagtggacagcgactgtgcaggtgctgtgtcattctctgacagcagctgcctgggcccaaggggtgatgaggcatcctttcctctagaagacctgagtcttcctgaccgactccaccatcacccaatctgttgattctccattgggaaaggcatttacaggtaaaagacttctgtatggattgcagttactctggtgatagttttcacctttattctgctgtgaaacaatcaaatcaaagccttgtgtcagttaacacatgacaagtggtctcaatgcagctaggaccatgcca

SEQ ID NO: 133458 - DNA, 1618 bp, Homo sapiens
  Payload ID: 6081
  Gene Symbol: FBXL2
  Gene Name: F-box and leucine-rich repeat protein 2
  ENST ID: ENST00000432809
  CDS Start-End: 63-251
acaacgggcgtcgccggcgccgtgtgacttcgggctgtgggctcgctcgcggctcttcggccatggttttctcaaacaatgatgaaggccttattaacaaaaagttacccaaagaacttctgttaagaatgctgttcagcttgttgttaaattttacttggtctaatccagaatgtactaagtatgtacatagcattggtctggattctttttgtaatgtggacctttgcacagaactgccgaaacattgaacatttgaacctcaatggatgcacaaaaatcactgacagcacgtgttatagccttagcagattctgttccaagctgaaacatctggatctgacctcctgtgtgtctattacaaacagctccttgaaggggatcagtgagggctgccgaaacctggagtacctgaacctctcttggtgtgatcagatcacgaaggatggcatcgaggcactggtgcgaggttgtcgaggcctgaaagccctgctcctgaggggctgcacacagttagaagatgaagctctgaaacacattcagaattactgccatgagcttgtgagcctcaacttgcagtcctgctcacgtatcacggatgaaggtgtggtgcagatatgcaggggctgtcaccggctacaggctctctgcctttcgggttgcagcaacctcacagatgcctctcttacagccctgggtttgaactgtccgcgactgcaaattttggaggctgcccgatgctcccatttgactgacgcaggttttacacttttagctcggaattgccacgaattggagaagatggatcttgaagaatgcatcctgataaccgacagcacactcatccagctctccattcactgtcctaaactgcaagccctgagcctgtcccactgtgaactcatcacagatgatgggatcctgcacctgagcaacagtacctgtggccatgagaggctgcgggtactggagttggacaactgcctcctcatcactgatgtggccctggaacacctagagaactgccgaggcctggagcgcctcgagctgtacgactgccagcaggttacccgtgcaggcatcaagcggatgcgggctcagctccctcatgtcaaagtccacgcctactttgctcccgtcaccccaccgacagcagtggcaggaagtggacagcgactgtgcaggtgctgtgtcattctctgacagcagctgcctgggcccaaggggtgatgaggcatcctttcctctagaagacctgagtcttcctgaccgactccaccatcacccaatctgttgattctccattgggaaaggcatttacaggtaaaagacttctgtatggattgcagttactctggtgatagttttcacctttattctgctgtgaaacaatcaaatcaaagccttgtgtcagttaacacatgacaagtggtctcaatgcagctaggaccatgccagaaacctggatctcttaagagattggtacctacctaggtacgaaagttctacccttggcatactcagcattcctcaaaaagaccatcagtgttagcacaaactgagcagaaaaaataagctgttgattttctacctgatacttaagccagtggcctacttt

SEQ ID NO: 133459 - DNA, 1584 bp, Homo sapiens
  Payload ID: 6081
  Gene Symbol: FBXL2
  Gene Name: F-box and leucine-rich repeat protein 2
  ENST ID: ENST00000435207
  CDS Start-End: 69-260
accaggacaacgggcgtcgccggcgccgtgtgacttcgggctgtgggctcgctcgcggctcttcggccatggttttctcaaacaatgatgaaggccttattaacaaaaagttacccaaagaacttctgttaagaatgctgttcagcttgttgttaaattttacttggtctaatccagaatgtactaagtatgtacatagcattggtctggattctttttgtaatgtggagcagggacaggataacaacaataaacaataaaacttgtaaaaaggaagaatggaagacacacatcattgttttgtagcaatgatgagattctgctaaacagatattatgaagcccgccttatcctagcagtagggaatattttccttcttggatatagtaactttgtgccgatgtgcacagatttccaaggcttggaacatcttagccctggatggaagcaactggcaaagaatagatctttttaactttcaaacagatgtagagggtcgagtggtggaaaatatctcgaagcgatgcggtggattcctgaggaagctcagcttgcgaggctgcattggtgttggggattcctccttgaagacctttgcacagaactgccgaaacattgaacatttgaacctcaatggatgcacaaaaatcactgacagcacgtgttatagccttagcagattctgttccaagctgaaacatctggatctgacctcctgtgtgtctattacaaacagctccttgaaggggatcagtgagggctgccgaaacctggagtacctgaacctctcttggtgtgatcagatcacgaaggatggcatcgaggcactggtgcgaggttgtcgaggcctgaaagccctgctcctgaggggctgcacacagttagaagatgaagctctgaaacacattcagaattactgccatgagcttgtgagcctcaacttgcagtcctgctcacgtatcacggatgaaggtgtggtgcagatatgcaggggctgtcaccggctacaggctctctgcctttcgggttgcagcaacctcacagatgcctctcttacagccctgggtttgaactgtccgcgactgcaaattttggaggctgcccgatgctcccatttgactgacgcaggttttacacttttagctcggaattgccacgaattggagaagatggatcttgaagaatgcatcctgataaccgacagcacactcatccagctctccattcactgtcctaaactgcaagccctgagcctgtcccactgtgaactcatcacagatgatgggatcctgcacctgagcaacagtacctgtggccatgagaggctgcgggtactggagttggacaactgcctcctcatcactgatgtggccctggaacacctagagaactgccgaggcctggagcgcctcgagctgtacgactgccagcaggttacccgtgcaggcatcaagcggatgcgggctcagctccctcatgtcaaagtccacgcctactttgctcccgtcaccccaccgacagcagtggcaggaagtggacagcgactgtgcaggtgctgtgtcattctctgacagcagctgcctg

SEQ ID NO: 133460 - DNA, 1859 bp, Homo sapiens
  Payload ID: 6081
  Gene Symbol: FBXL2
  Gene Name: F-box and leucine-rich repeat protein 2
  ENST ID: ENST00000451636
  CDS Start-End: 61-330
aacgggcgtcgccggcgccgtgtgacttcgggctgtgggctcgctcgcggctcttcggccatggttttctcaaacaatgatgaaggccttattaacaaaaagttacccaaagaacttctgttaagaatgctgttcagcttgttgttaaattttacttggtctaatccagaatgtactaagtatgtacatagcattggtctggattctttttgtaatgtgaatattttccttcttggatatagtaactttgtgccgatgtgcacagatttccaaggcttggaacatcttagccctggatggaagcaactggcaaagaatagatctttttaactttcaaacagatgtagagggtcgagtggtggaaaatatctcgaagcgatgcggtggattcctgaggaagctcagcttgcgaggctgcattggtgttggggattcctccttgaagacctttgcacagaactgccgaaacattgaacatttgaacctcaatggatgcacaaaaatcactgacagcacgtgttatagccttagcagattctgttccaagctgaaacatctggatctgacctcctgtgtgtctattacaaacagctccttgaaggggatcagtgagggctgccgaaacctggagtacctgaacctctcttggtgtgatcagatcacgaaggatggcatcgaggcactggtgcgaggttgtcgaggcctgaaagccctgctcctgaggggctgcacacagttagaagatgaagctctgaaacacattcagaattactgccatgagcttgtgagcctcaacttgcagtcctgctcacgtatcacggatgaaggtgtggtgcagatatgcaggggctgtcaccggctacaggctctctgcctttcgggttgcagcaacctcacagatgcctctcttacagccctgggtttgaactgtccgcgactgcaaattttggaggctgcccgatgctcccatttgactgacgcaggttttacacttttagctcggaattgccacgaattggagaagatggatcttgaagaatgcatcctgataaccgacagcacactcatccagctctccattcactgtcctaaactgcaagccctggtgagtctgagtttttctgacattattcacctgttaaagatgaaagagccctcccaccacaacaagaagctgtttgggttctctttctgtaagagcctgtcccactgtgaactcatcacagatgatgggatcctgcacctgagcaacagtacctgtggccatgagaggctgcgggtactggagttggacaactgcctcctcatcactgatgtggccctggaacacctagagaactgccgaggcctggagcgcctcgagctgtacgactgccagcaggttacccgtgcaggcatcaagcggatgcgggctcagctccctcatgtcaaagtccacgcctactttgctcccgtcaccccaccgacagcagtggcaggaagtggacagcgactgtgcaggtgctgtgtcattctctgacagcagctgcctgggcccaaggggtgatgaggcatcctttcctctagaagacctgagtcttcctgaccgactccaccatcacccaatctgttgattctccattgggaaaggcatttacaggtaaaagacttctgtatggattgcagttactctggtgatagttttcacctttattctgctgtgaaacaatcaaatcaaagccttgtgtcagttaacacatgacaagtggtctcaatgcagctaggaccatgccagaaacctggatctcttaagagattggtacctacctaggtacgaaagttctacccttggcatactcagcattcctcaaaaagaccat

SEQ ID NO: 133461 - DNA, 3847 bp, Homo sapiens
  Payload ID: 6081
  Gene Symbol: FBXL2
  Gene Name: F-box and leucine-rich repeat protein 2
  Uniprot ID: Q9UKC9
  ENST ID: ENST00000484457
  CDS Start-End: 92-1363
gggcggggcgcctggctggcgtcaccaggacaacgggcgtcgccggcgccgtgtgacttcgggctgtgggctcgctcgcggctcttcggccatggttttctcaaacaatgatgaaggccttattaacaaaaagttacccaaagaacttctgttaagaatattttccttcttggatatagtaactttgtgccgatgtgcacagatttccaaggcttggaacatcttagccctggatggaagcaactggcaaagaatagatctttttaactttcaaacagatgtagagggtcgagtggtggaaaatatctcgaagcgatgcggtggattcctgaggaagctcagcttgcgaggctgcattggtgttggggattcctccttgaagacctttgcacagaactgccgaaacattgaacatttgaacctcaatggatgcacaaaaatcactgacagcacgtgttatagccttagcagattctgttccaagctgaaacatctggatctgacctcctgtgtgtctattacaaacagctccttgaaggggatcagtgagggctgccgaaacctggagtacctgaacctctcttggtgtgatcagatcacgaaggatggcatcgaggcactggtgcgaggttgtcgaggcctgaaagccctgctcctgaggggctgcacacagttagaagatgaagctctgaaacacattcagaattactgccatgagcttgtgagcctcaacttgcagtcctgctcacgtatcacggatgaaggtgtggtgcagatatgcaggggctgtcaccggctacaggctctctgcctttcgggttgcagcaacctcacagatgcctctcttacagccctgggtttgaactgtccgcgactgcaaattttggaggctgcccgatgctcccatttgactgacgcaggttttacacttttagctcggaattgccacgaattggagaagatggatcttgaagaatgcatcctgataaccgacagcacactcatccagctctccattcactgtcctaaactgcaagccctgagcctgtcccactgtgaactcatcacagatgatgggatcctgcacctgagcaacagtacctgtggccatgagaggctgcgggtactggagttggacaactgcctcctcatcactgatgtggccctggaacacctagagaactgccgaggcctggagcgcctcgagctgtacgactgccagcaggttacccgtgcaggcatcaagcggatgcgggctcagctccctcatgtcaaagtccacgcctactttgctcccgtcaccccaccgacagcagtggcaggaagtggacagcgactgtgcaggtgctgtgtcattctctgacagcagctgcctgggcccaaggggtgatgaggcatcctttcctctagaagacctgagtcttcctgaccgactccaccatcacccaatctgttgattctccattgggaaaggcatttacaggtaaaagacttctgtatggattgcagttactctggtgatagttttcacctttattctgctgtgaaacaatcaaatcaaagccttgtgtcagttaacacatgacaagtggtctcaatgcagctaggaccatgccagaaacctggatctcttaagagattggtacctacctaggtacgaaagttctacccttggcatactcagcattcctcaaaaagaccatcagtgttagcacaaactgagcagaaaaaataagctgttgattttctacctgatacttaagccagtggcctactttaattcacaattccattttgattagcaggacttttccactttgaagataaatagcaactttatcaaagtgactgtactgcaaattaattcataatgcctgatagttttatatatagagacttatgtggaaggcatgttaataggtttccatgagacaccaaagaaaagaggactctatactgggtggagcagggtcttcacctttttgtttctgtcaacttgtcatatacacctccagggaccaaaaacaaaagcagctcggagtctgtgttgcctgattggaaagtagaagctctggtgtatgctacagcacataacacatttttactaaaggaaaaaagctaattatgtccatgcctctcgtaaaactggggggaaccttaaagagaaagaactaaggcttaagttatctgtagtataatcaattagaagtaatgaatggatgcatgtaaaatggatgtgattttttttcaagcttattttgaaatcttaaaaatcaggttacaccatagctactcaaaagttttacacacttaaaactcagatcagtaagtgttggtaccttttagactcataaaattgaataaaccattgcaatgctttaaaaaaaattaagtcagagggttttattgctatgattttatggcagacacatccaagcaaaaccattttccaaatgcagaccttcctgatgttatctgaaatctgataaaatgaccctactctctgctgtggttcattcttgctccatgctgtccatatttatgatctttattaagaacctgtcaatcagtcatcaccaccttcattgtaaacttaggtgttcatggtggctggcccttccaaacaaccactcccccaaactgaagggccagagctcatgagaaacttaaaagtgaaacggcaaaagcaagatgtgttcccatgactaccaatacctttattaggcagttttagaagtgtttttaaggatatattatgtcagctgcattctaggaagagaagcagattatatatatatataatctccccataaacggacttagcacaattatcatcagagtaagcattaaagtcattttattgccttatgatatattccagtattccttggtctaaaaattgtgtggataccatagcagttagttaaatatacatttatacccactgtttgttgtggaagagatgatgggggaggaggactgatgcaggaagcaacttcaataaatgagcatataacagacttgcttcagtgattatgaattagtttagtttctattaaaaaaaattaacttaaggctggccacggtggttcatgcctataatcccagcacttggggaggccaaggcgggtggatcacctgaggtcaggagtttgagaccagcctggccaacacagtaaaaccccatctctactgaaaatacaaaaattagccgggcgtggtgctgggcacctgtaatctcagctactcgggaggctgaagcaggagaaatgctggaacccaggaggcggaggtggcagtgagccgagattgtgccattgcactccatccagcccaggagacaacagtgagactccatcatcatctcaaaacaaaacaaacaaacaaacaaaacaaaccaccagagccttctatacatgattgatttcttttgagccaggatacaacctatcatcagtcacagctattggacttgatgctcaatgatccatggcctcatttacaaaacaggagaacctcttgtaagaaaatcaggtttgcaggctgggcacggtggctcacgcctgtaatcccagcactttgggaggcagaggcgggcggatcgtgagatcaggagatcaagaccatcctggctaacacagtgaaaccccgtctctactaaaaatacaaaaaaaattagccgggcatagtggcgggtgcctgtagtcccagctactcaggagactgaggcagaagaatggcgtgaacccgggaggcagagcttgcagtgagccgagattgcgccactgcactccagcctgggtgacagagccagactccgtctcaaaaaaaaaaaaaaaaaagaaaa

SEQ ID NO: 133462 - DNA, 1259 bp, Homo sapiens
  Payload ID: 6081
  Gene Symbol: FBXL2
  Gene Name: F-box and leucine-rich repeat protein 2
  Uniprot ID: Q9UKC9
  ENST ID: ENST00000507198
  CDS Start-End: 38-1105
gacttcgggctgtgggctcgctcgcggctcttcggccatggttttctcaaacaatgatgaaggccttattaacaaaaagttacccaaagaacttctgttaagaatattttccttcttggatatagtaactttgtgccgatgtgcacagatttccaaggcttggaacatcttagccctggatggaagcaactggcaaagaatagatctttttaactttcaaacagatgtagagggtcgagtggtggaaaatatctcgaagcgatgcggtggattcctgaggaagctcagcttgcgaggctgcattggtgttggggattcctccttgaagacctttgcacagaactgccgaaacattgaacatttgaacctcaatggatgcacaaaaatcactgacagcacgtgttatagccttagcagattctgttccaagctgaaacacattcagaattactgccatgagcttgtgagcctcaacttgcagtcctgctcacgtatcacggatgaaggtgtggtgcagatatgcaggggctgtcaccggctacaggctctctgcctttcgggttgcagcaacctcacagatgcctctcttacagccctgggtttgaactgtccgcgactgcaaattttggaggctgcccgatgctcccatttgactgacgcaggttttacacttttagctcggaattgccacgaattggagaagatggatcttgaagaatgcatcctgataaccgacagcacactcatccagctctccattcactgtcctaaactgcaagccctgagcctgtcccactgtgaactcatcacagatgatgggatcctgcacctgagcaacagtacctgtggccatgagaggctgcgggtactggagttggacaactgcctcctcatcactgatgtggccctggaacacctagagaactgccgaggcctggagcgcctcgagctgtacgactgccagcaggttacccgtgcaggcatcaagcggatgcgggctcagctccctcatgtcaaagtccacgcctactttgctcccgtcaccccaccgacagcagtggcaggaagtggacagcgactgtgcaggtgctgtgtcattctctgacagcagctgcctgggcccaaggggtgatgaggcatcctttcctctagaagacctgagtcttcctgaccgactccaccatcacccaatctgttgattctccattgggaaaggcatttacaggtaaaagacttctgtatggattgcagttactctg

SEQ ID NO: 133463 - DNA, 2793 bp, Homo sapiens
  Payload ID: 6081
  Gene Symbol: FBXL2
  Gene Name: F-box and leucine-rich repeat protein 2
  Uniprot ID: Q9UKC9
  ENST ID: ENST00000538892
  CDS Start-End: 69-1136
accaggacaacgggcgtcgccggcgccgtgtgacttcgggctgtgggctcgctcgcggctcttcggccatggttttctcaaacaatgatgaaggccttattaacaaaaagttacccaaagaacttctgttaagaatattttccttcttggatatagtaactttgtgccgatgtgcacagatttccaaggcttggaacatcttagccctggatggaagcaactggcaaagaatagatctttttaactttcaaacagatgtagagggtcgagtggtggaaaatatctcgaagcgatgcggtggattcctgaggaagctcagcttgcgaggctgcattggtgttggggattcctccttgaagacctttgcacagaactgccgaaacattgaacatttgaacctcaatggatgcacaaaaatcactgacagcacgtgttatagccttagcagattctgttccaagctgaaacatattcagaattactgccatgagcttgtgagcctcaacttgcagtcctgctcacgtatcacggatgaaggtgtggtgcagatatgcaggggctgtcaccggctacaggctctctgcctttcgggttgcagcaacctcacagatgcctctcttacagccctgggtttgaactgtccgcgactgcaaattttggaggctgcccgatgctcccatttgactgacgcaggttttacacttttagctcggaattgccacgaattggagaagatggatcttgaagaatgcatcctgataaccgacagcacactcatccagctctccattcactgtcctaaactgcaagccctgagcctgtcccactgtgaactcatcacagatgatgggatcctgcacctgagcaacagtacctgtggccatgagaggctgcgggtactggagttggacaactgcctcctcatcactgatgtggccctggaacacctagagaactgccgaggcctggagcgcctcgagctgtacgactgccagcaggttacccgtgcaggcatcaagcggatgcgggctcagctccctcatgtcaaagtccacgcctactttgctcccgtcaccccaccgacagcagtggcaggaagtggacagcgactgtgcaggtgctgtgtcattctctgacagcagctgcctgggcccaaggggtgatgaggcatcctttcctctagaagacctgagtcttcctgaccgactccaccatcacccaatctgttgattctccattgggaaaggcatttacaggtaaaagacttctgtatggattgcagttactctggtgatagttttcacctttattctgctgtgaaacaatcaaatcaaagccttgtgtcagttaacacatgacaagtggtctcaatgcagctaggaccatgccagaaacctggatctcttaagagattggtacctacctaggtacgaaagttctacccttggcatactcagcattcctcaaaaagaccatcagtgttagcacaaactgagcagaaaaaataagctgttgattttctacctgatacttaagccagtggcctactttaattcacaattccattttgattagcaggacttttccactttgaagataaatagcaactttatcaaagtgactgtactgcaaattaattcataatgcctgatagttttatatatagagacttatgtggaaggcatgttaataggtttccatgagacaccaaagaaaagaggactctatactgggtggagcagggtcttcacctttttgtttctgtcaacttgtcatatacacctccagggaccaaaaacaaaagcagctcggagtctgtgttgcctgattggaaagtagaagctctggtgtatgctacagcacataacacatttttactaaaggaaaaaagctaattatgtccatgcctctcgtaaaactggggggaaccttaaagagaaagaactaaggcttaagttatctgtagtataatcaattagaagtaatgaatggatgcatgtaaaatggatgtgattttttttcaagcttattttgaaatcttaaaaatcaggttacaccatagctactcaaaagttttacacacttaaaactcagatcagtaagtgttggtaccttttagactcataaaattgaataaaccattgcaatgctttaaaaaaaattaagtcagagggttttattgctatgattttatggcagacacatccaagcaaaaccattttccaaatgcagaccttcctgatgttatctgaaatctgataaaatgaccctactctctgctgtggttcattcttgctccatgctgtccatatttatgatctttattaagaacctgtcaatcagtcatcaccaccttcattgtaaacttaggtgttcatggtggctggcccttccaaacaaccactcccccaaactgaagggccagagctcatgagaaacttaaaagtgaaacggcaaaagcaagatgtgttcccatgactaccaatacctttattaggcagttttagaagtgtttttaaggatatattatgtcagctgcattctaggaagagaagcagattatatatatatataatctccccataaacggacttagcacaattatcatcagagtaagcattaaagtcattttattgccttatgatatattccagtattccttggtctaaaaattgtgtggataccatagcagttagttaaatatacatttatacccactgtttgttgtggaagagatgatgggggaggaggactgatgcaggaagcaacttcaataaatgagcatataacaga

SEQ ID NO: 133464 - DNA, 10388 bp, Homo sapiens
  Payload ID: 6082
  Gene Symbol: FBXL20
  Gene Name: F-box and leucine-rich repeat protein 20
  Uniprot ID: Q96IG2
  ENST ID: ENST00000264658
  CDS Start-End: 262-1572
ggggagtgtttttgttttgggttgaagttgaggctgaggagagagccgagctagcgacgagcagtcgttgcggccgccggcgccgcgggaggtggtggaggcctagccggagccgagaggtctcttgttcccgtcccacggtcccggcgtcacccctccggcgcccagtccccgtcccggaactcccgggcctgtcctgggcccccggtctgtgcactccgctcgccgcagcgcccggcccgggccgcacccgccggccccatgaggagggacgtgaacggagtgaccaagagcaggtttgagatgttctcaaatagtgatgaagctgtaatcaataaaaaacttcccaaagaactcctgttacggatattttcttttctagatgttgttaccctgtgccgctgtgctcaggtctccagggcctggaatgttctggctctggatggcagtaactggcagcgaattgacctatttgatttccagagggatattgagggccgagtagtggagaatatttcaaaacgatgtgggggctttttacgaaagttaagtcttcgtggatgtcttggagtgggagacaatgcattaagaacctttgcacaaaactgcaggaacattgaagtactgaatctaaatgggtgtacaaagacaacagacgctacatgtactagccttagcaagttctgttccaaactcaggcaccttgacttggcttcctgtacatcaataacaaacatgtctctaaaagctctgagtgagggatgtccactgttggagcagttgaacatttcctggtgtgaccaagtaaccaaggatggcattcaagcactagtgaggggctgtgggggtctcaaggccttattcttaaaaggctgcacgcagctagaagatgaagctctcaagtacataggtgcacactgccctgaactggtgactttgaacttgcagacttgcttgcaaatcacagatgaaggtctcattactatatgcagagggtgccataagttacaatccctttgtgcctctggctgctccaacatcacagatgccatcctgaatgctctaggtcagaactgcccacggcttagaatattggaagtggcaagatgttctcaattaacagatgtgggctttaccactctagccaggaattgccatgaacttgaaaagatggacctggaagagtgtgttcagataacagatagcacattaatccaactttctatacactgtcctcgacttcaagtattgagtctgtctcactgtgagctgatcacagatgatggaattcgtcacctggggaatggggcctgcgcccatgaccagctggaggtgattgagctggacaactgcccactaatcacagatgcatccctggagcacttgaagagctgtcatagccttgagcggatagaactctatgactgccagcaaatcacacgggctggaatcaagagactcaggacccatttacccaatattaaagtccacgcctacttcgcacctgtcactccacccccatcagtagggggcagcagacagcgcttctgcagatgctgcatcatcctatgacaatggaggtggtcaaccttggcgaactgagtatttaatgacacttctagagctaccgtggagtctctccagtggaagcaaccccagtgttctgagcaagggttacaaagtgagggagggcagtgtccagatccccagagccacacatacatacacatacacacccttacccccatccactctagctttgtgaccatgggactgaagtttgtgatggcttttttatcaagtagattggtaaaatttaaccattcctgttgaggtgcccataagaaaatcataggccaagatagggaggggcattccagcaaaccccgtgttaatgctactgtggtttttaaatttttgtctaggggtttctttggggattttagaacagcatctgctgtcctccggggtcaagaaaagcatggaaagacaatatatgatgtacccagggaccagaaagaaaatttctttgcatcttagaaatggtagacattcattgtgactaaagagcttctatgcttccttgtttccatgccaacatgctgagcatgctcacaaagaaggctcgtccattcctcctgtgttttagtatttggcccagaggtttcctaaatggttgccttgaaatcactgtggtccaaatgtaattcttacacactcaaattatcactgtctgtagcacacttgtgcacctgtcttacattctctgttgctcccccccacactcttgctcagtctgtcacctgttcagtctgcttactcactcaattgttacccttttgctgttgtcgtgtttacagtttgcattttgaatgattagttgggattaccaaacattttttaaaaagatattatcaataaatatttttttaattctaaattttaccattaggggaccctgcctgaatctttgccaacctgcaaggaaactctaatgaaagcaagaaaagttatgagaagaaactgttttgatgaaaacagatgctaccttttggtttctattttatcttctgatatgtgataattcgcatggtatccccaatattccccctacatattcttccttctgtcagactccaccaactgtatcataaggaaagagagagatgtattattaggaaagagtgaaaatgataaatcacaaaacagagcctgaaagtccccaacacccaagttcagacattaatgattaatgttattatatatttactgaaatctaggagtgatcagtggcatctctgacctatgaggttgttttaacaggaatgccactagaggagctgtgtattctagccagtctgtttctctcttttcccccatttcagcctttcagggatacaagaatggctctataacagctggtcaattgtatgtcagtgttaatggattcatatctagtgttggcaccccaaagggccagaaccttcccataacctgtcagtcatctctcttttctgccccagtctttttttttttttttttttttttttaagacgggttctcactcttgcccagactggagtgcagtggtgcgatctcggctcaccgcaacctccacttcccaggctcaagcgattctcttgcctcagcctaccgagtagctgggattacaggcatgcaccactactgcctggctaatttttgtatttttagtagagatggggtttcacatgttggccagcctggtcttgaactcctgacctcaaatgatccacctgcctcagcctcccaaagtgctgggactacaggcatgagccaccatgcccggccctgttcagacttctgaatgaagtatgaatgtagccaggtgaagcattgaggcagctgaaagagaacactgagaggaagtaaggggtttagtgtctctgcttagcctgggcactagaactgagggaggaatttagtgtccaggactcaagagtccaagaagaagcaccctctgtcttcccaaaaaatcagaggataaaggaagtaaaatgagtttttaaagcataagaagaaaatttctaaaccccaagattagaaacccagtgtgatttttagtagggtgattttggcggggggtgtcctttgagacattaatgtgcaatccatcataatattaatcttctatatgatccagactattaaaaggcttgttttatttatttattttattttattttatttttttagagatggggtctcgctatcttgcccagcctggactcaaactcctgggctcaagccttcctcccacctcagcctcccaagtagctgggactacaggtgtgtgccactgtacccagcttaagaggtttgttttaatgctgcagttgctgattataccagcatatataagaataaagtctgatttatttatccattgatttagaaggcaattggatgaaagggtcttagaagtctatactatccattaatatttatcatattaaatttattttaaatcctgttttattgtgccgctttaaaaacgcagattacttgtttattcattcccctttccccttattctctttcagattaccttataaggaatatagtttttaacatgaaactcagtttcttgtctgtacccctacacataaaaatacatacgtgcatacacacatacttccagatgtggttaataatattcagatccctaggttactcaaacaaaactaaaggagagaactatttaggggccatctgctttaaagtttaaggtgttttgttgttgttttagtgcctgtacaaattgaccataaaacccagattgattagtgagtgtggatttgagttgcctaagttgaggctattaaggtacttctttacttaaaagataagtttaaaagactctattcatcagttcatgatgatcttggaaatgctgtttctctgctcaaaggatatacccacaggcaggtccatggggacttgctctggtgatctctgctattaaggcaaattccagcctgtttgtgccaagaacagagtcaagtgagagagaatgaagactcagagatgtgcagcactggcttgtatgttgtcaggcagaagccttgttcctttctcaagaaaacttcaggcctatcaagcttggaaggaaatacatttttttatgctgatttgcagcctacaccagctgatgaatatgctaggactttgagagaacacaaagcatggtaagttttggtcaggtggaaaggagcctgacatctgaacataatgcttcctctctcaacatctgggatacttttgaaaattcagtaaggcttaatgtaggaaaaattctttacaggaaaagctaattgatctgtttgtctaacctcatagccactccaaaatatgccttttataatggaaaaaaacagtgaacagagagaagagatttggggataagttagaaggtaccctcaaaactactgccgtaaacctacaggtgggcaaggaggaattactgtagtgtctctggagaaagttcttgaacatccaaatcatctcttttctaagcagtttttcccctaatctcataccttacatcttccagcatcatttgctacatcaatgtcttttcatcctcttcatcagccccattgagctgactccagcttatttttgcactgatttccaccatttccttcccacacccatcctttccctctatttaaagcctccatctcaccctcagtaatgctgctgatttactctcagatgtctcaagtctagcttcctttttgaatccttctcctactccaggggctgtcaaaggcagccttaaagttcagtgactgttaggtggctcaggccatttttcattgggtggtctttggtgtttgcatactgaatttgaattcagtttaaaagcaaactgttggatatgaggaagaaagggatatggccttagccctttttccaatatttggaatatgaaagcatattgtgctttgtgtaaaaaatgttttcttctcctattctgctcttgtctttactgaaggtaaaagtattccttaagtagcttttgcaaatttctagtctgatttccacattcattaagttgatttagcagacatgtaagtcagaagtttcacatatcccttgtatcaaacattttatagggaaacctagtaaatttatgatgcttcattttgggctttccagactatttgagttattcaagatagccataatgttttagtagcgacattcttttattacttctaattgccttgtaaaatgcattgttatggcccggcacggtgggtggatcacaaggtcaggagttcaagaacagcctggccaagatggtgaaatgctgtctctactgaaaatacaaaaattagccaggtgtggtggcaggtgcctgtaatcccagctactcgggaggctgaggcagagaattgcttgaacccgggaggtggaggttgcagtgagctgagatcgcaccactgcactccaccctgggcgacagagtgagactatctcaaaaaaaaagaaagaaagaaagaaaaaaatgcatcgttactagtttgatagcccactaatgccatgggggactaaacaaaatatgtgatgaaacctgtcttggtttgaagttgttagaaagtgtgagagtgtcactggaaagaagagagtggcttcctgcctgcttgtttagtcagcatgtccttaggtgactgtgttgttgggagaagagcactcatgggtcatgggtgacccttggccattttatgtttattgtgctgaaagtcacaggcggctcatgccagttgctaccagtgagaggaggggtttaaaggaaattgctctattttgccttattcctccttatgtgtatgatttaagggtaggcttttatcctggttgtatctcctggctgacagactttctcaatcatatgtttgagctctgaagcattttacaaaaagattgcctctctatctgcctgccaatcctagaatctttagccacctcaaacccaggcactgtgaattagccaagtcctgtttgagaagaaatgtaggatgtttggttggaattcttgagacagaacctctctccccattaatgatgttgtaccaaagaattctaaagcagtaaaaggataatggggaaaaatggagtcacagcctttcctcgcctatatttcttttttttttttttttttttgacatggagtctcgctctgtcacccaggttggagtgccatggcacaatctcagttcactgcaacctctgcctcctgggttcaagtgattcttctgtttcagcctcccaagaggccaggattacaggtgcccaccaccacgcccagctaatgtttgtatttttcatagagatggggttttgccatgttggccaggctagtctcgaacttctgacctcaagtggtccacctgccttggcctcccaaagtgctgggattacaggtgtaagccaccgcacctggccagtttctatcataaattttaaatgtaagattggaagatacagagagctgtataaaatcataccagtagggtataattagcccaggtagtttaggaataaaattgggttgtatccgagtgccctaacttgacattttgattctccagcaaagaacataggttactaggttactaaccttgccttctcacttgggataaactttttttttttttcttgttgcccaggctggagtgcaatagtgagatctcggctcaccgcaacctccgcctcttgggttcaagcgattctcctcccttagcctcccgagtagctggaattacagcctgtgccaccacgcccggcaaaatttgtatttttagtagagacggggtttcaccatgttggtcaggctggtttcaaactcccaacctcaggtgatctgcccacctcagcctcccaacatgctaggattacaggcgtgagccactgcgcccagcccaggataaacattctacctgcctgaaagtaccataagaggcaagtgagtttcttgcatgatgggcttctgcagcttccccctcaagtcacatctacctgttgtatttatttatttatttatttttgagacagagtctcgctctgtttcccaggctggagtgcagtggcgtgatctcggctcactgcaagctccacctcccaggttcacgccattctcctgcctcagcctcccaagtagctgggactacaggctcccgccaccacgcccggctaattttttgtatttttagtagagacggggtttcaccctgttagccaggatggtctcgatctcctgacctcatgatccacccgcctcggcctcccaaagtgctgggattacaggcgtgagccaccgcgcccggcccgttgtatctattttttttagacgcatcaattcagtgtctctgaagcctttgatcgttaggaaggtcagtacataacctcttaggtgaagctgagttgatctttggagcccaagagagttaattttcaggagaaaaagaattagggcaagctcccctgtgggatgttaagagaaagtccatatgcgcttcttccatctctgcctcttgtttttaaataagtgcttgtgaagttcagtttatagaggttgagtctcagtgcttcctcagccagggtggtttattgctgttttacaaagaaccatgaacaagcaaaatcctatcaatagtcctttctgttttatgttttatagtcttattttgaagaatcggcatggtaaaatgatagacaagtttcaaataaagcagataattagctctagaattggggtactttgcctcaggtacagcatctgtcttgaatacatagtgatggctgtgtcacacatgggtacatttactttcctctctgatcaactgcacccctttttactggcaaagagggctcctactttctacacacttaaccagtcaaacagataggttttggcaccaccgaaagaaccacaagtgcaccccagctgcatctgggcatggttttggtactaggactagagaagtgagcagtaaatgacagtccttaccctaggaagagatgggagaagagaggtgtccagacatatttaccttttctcttctgtcatgccccaagaaccaaggatcatctttgaagtgacgtcttttttgttaaattggaagaagaaaactttgcagccaggcgtggtggctcacgcctgtaatcccagcactttgggaggccgaggcgggcggatcacaaagtgtcaggagtttgagaacagcctggccaacatggtgaaaccccatctctactgaaaatacaaaatcccagctacttgggaggctgaggcaagagaatcacttgaacctgggaggcggatgttgcagtgagccgagatcacgccactgcactccagcctgggcaacggagtgagactccatctcacaaaaaagagaaaagaaaagaaaactttgcttcactaagtttctcttgccattatctcattaattcagatctgtacctcattgctgctcacacatatatgtttcttaccttagcctgaaccttctcaggccttgaagtcattattctactctttttttttcttttccttttttatggcactagagaatgaaaacctaaggtcttagaaaatcttaacttgaaaaagtctctaactggcatgatttgattacttttttcccctgtggacaaataattttctttcctatataatagatttttagtaagtgaaacctttgctgctgctttcctgggtttacattagttttttcctgcccttaagaataatttatctgtgcttctctgatgactgttaatttctaatagtgcaggaagggatgagcttttgatttcttctcactcccctcctcaccctacttccaaattacacactaacttctaacccttacagcctgttggcacatacacaagatccacgagaccatgctcctcagaagctacccatgtcctttctcaccatggtgtggctcttggagccctgagtatctgtgactacccactccaaaggttgactgtaagaggagagcggccttcttaattttgcatttcttaattttgtttttctccattcctgttttatgacttggccttcagatgcttcctactctggcctcctccttttttctcctaggaattgtttccaggtaacctaccatgtgcacttctcagctgctctgctcacctttgcccaccttcccgtgaccctgagagtacagatccgaataatgtggcctgtgcagagctcagagaactgtgaggactacccatgcctgtcagactctgctcagggacagagatggatgggtaaatggtgctgttggagacatttttatcttcataccaggctctgtttcatccctgcaccccgcacccccactcactcccctgagggggtaaaatgcagaggtggttgacctgaagggtctgattccctccttcccaagccttagggcctaccctggagtgctgcagtgtgtgagagctgctgcttgcttgtttctccactaggcctgctccaaatgcttagccaatctctggagccgacacagttgcctacggggtgacttagcaccaggttccattagctctccaagtgactgtttccacccagtacttttggcgcttgaggatggggggagggggattatttaaaataaataaaatccgaggtggcagtagaggattccttttgctttaaaaatctttggactaaaaaaaaaaaaaaaaagttttttatatataaatatataaagtaaattgttatgtaactattattgtttcttgtatgttctaattttgttttatgatgtaattaaagaaagtaagctgtgaagacttttcattttcctgtg

SEQ ID NO: 133465 - DNA, 2309 bp, Homo sapiens
  Payload ID: 6082
  Gene Symbol: FBXL20
  Gene Name: F-box and leucine-rich repeat protein 20
  Uniprot ID: Q96IG2
  ENST ID: ENST00000394294
  CDS Start-End: 222-1436
gagagccgagctagcgacgagcagtcgttgcggccgccggcgccgcgggaggtggtggaggcctagccggagccgagaggtctcttgttcccgtcccacggtcccggcgtcacccctccggcgcccagtccccgtcccggaactcccgggcctgtcctgggcccccggtctgtgcactccgctcgccgcagcgcccggcccgggccgcacccgccggccccatgaggagggacgtgaacggagtgaccaagagcaggtttgagatgttctcaaatagtgatgaagctgtaatcaataaaaaacttcccaaagaactcctgttacggatattttcttttctagatgttgttaccctgtgccgctgtgctcaggtctccagggcctggaatgttctggctctggatggcagtaactggcagcgaattgacctatttgatttccagagggatattgagggccgagtagtggagaatatttcaaaacgatgtgggggctttttacgaaagttaagtcttcgtggatgtcttggagtgggagacaatgcattaagaacctttgcacaaaactgcaggaacattgaagtactgaatctaaatgggtgtacaaagacaacagacgctgagggatgtccactgttggagcagttgaacatttcctggtgtgaccaagtaaccaaggatggcattcaagcactagtgaggggctgtgggggtctcaaggccttattcttaaaaggctgcacgcagctagaagatgaagctctcaagtacataggtgcacactgccctgaactggtgactttgaacttgcagacttgcttgcaaatcacagatgaaggtctcattactatatgcagagggtgccataagttacaatccctttgtgcctctggctgctccaacatcacagatgccatcctgaatgctctaggtcagaactgcccacggcttagaatattggaagtggcaagatgttctcaattaacagatgtgggctttaccactctagccaggaattgccatgaacttgaaaagatggacctggaagagtgtgttcagataacagatagcacattaatccaactttctatacactgtcctcgacttcaagtattgagtctgtctcactgtgagctgatcacagatgatggaattcgtcacctggggaatggggcctgcgcccatgaccagctggaggtgattgagctggacaactgcccactaatcacagatgcatccctggagcacttgaagagctgtcatagccttgagcggatagaactctatgactgccagcaaatcacacgggctggaatcaagagactcaggacccatttacccaatattaaagtccacgcctacttcgcacctgtcactccacccccatcagtagggggcagcagacagcgcttctgcagatgctgcatcatcctatgacaatggaggtggtcaaccttggcgaactgagtatttaatgacacttctagagctaccgtggagtctctccagtggaagcaaccccagtgttctgagcaagggttacaaagtgagggagggcagtgtccagatccccagagccacacatacatacacatacacacccttacccccatccactctagctttgtgaccatgggactgaagtttgtgatggcttttttatcaagtagattggtaaaatttaaccattcctgttgaggtgcccataagaaaatcataggccaagatagggaggggcattccagcaaaccccgtgttaatgctactgtggtttttaaatttttgtctaggggtttctttggggattttagaacagcatctgctgtcctccggggtcaagaaaagcatggaaagacaatatatgatgtacccagggaccagaaagaaaatttctttgcatcttagaaatggtagacattcattgtgactaaagagcttctatgcttccttgtttccatgccaacatgctgagcatgctcacaaagaaggctcgtccattcctcctgtgttttagtatttggcccagaggtttcctaaatggttgccttgaaatcactgtggtccaaatgtaattcttacacactcaaattatcactgtctgtagcacacttgtgcacctgtcttacattctctgttgctcccccccacactcttgctcagtctgtcacctgttcagtctgcttactcactcaattgttacccttttgctgttgtcgtgtttacagtttgcattttgaatgattagttgggattaccaaacattttttaaaaagatattatcaataaatatttttttaattctaaatttta

SEQ ID NO: 133466 - DNA, 1739 bp, Homo sapiens
  Payload ID: 6082
  Gene Symbol: FBXL20
  Gene Name: F-box and leucine-rich repeat protein 20
  Uniprot ID: Q96IG2
  ENST ID: ENST00000583610
  CDS Start-End: 255-1565
gtttttgttttgggttgaagttgaggctgaggagagagccgagctagcgacgagcagtcgttgcggccgccggcgccgcgggaggtggtggaggcctagccggagccgagaggtctcttgttcccgtcccacggtcccggcgtcacccctccggcgcccagtccccgtcccggaactcccgggcctgtcctgggcccccggtctgtgcactccgctcgccgcagcgcccggcccgggccgcacccgccggccccatgaggagggacgtgaacggagtgaccaagagcaggtttgagatgttctcaaatagtgatgaagctgtaatcaataaaaaacttcccaaagaactcctgttacggatattttcttttctagatgttgttaccctgtgccgctgtgctcaggtctccagggcctggaatgttctggctctggatggcagtaactggcagcgaattgacctatttgatttccagagggatattgagggccgagtagtggagaatatttcaaaacgatgtgggggctttttacgaaagttaagtcttcgtggatgtcttggagtgggagacaatgcattaagaacctttgcacaaaactgcaggaacattgaagtactgaatctaaatgggtgtacaaagacaacagacgctacatgtactagccttagcaagttctgttccaaactcaggcaccttgacttggcttcctgtacatcaataacaaacatgtctctaaaagctctgagtgagggatgtccactgttggagcagttgaacatttcctggtgtgaccaagtaaccaaggatggcattcaagcactagtgaggggctgtgggggtctcaaggccttattcttaaaaggctgcacgcagctagaagatgaagctctcaagtacataggtgcacactgccctgaactggtgactttgaacttgcagacttgcttgcaaatcacagatgaaggtctcattactatatgcagagggtgccataagttacaatccctttgtgcctctggctgctccaacatcacagatgccatcctgaatgctctaggtcagaactgcccacggcttagaatattggaagtggcaagatgttctcaattaacagatgtgggctttaccactctagccaggaattgccatgaacttgaaaagatggacctggaagagtgtgttcagataacagatagcacattaatccaactttctatacactgtcctcgacttcaagtattgagtctgtctcactgtgagctgatcacagatgatggaattcgtcacctggggaatggggcctgcgcccatgaccagctggaggtgattgagctggacaactgcccactaatcacagatgcatccctggagcacttgaagagctgtcatagccttgagcggatagaactctatgactgccagcaaatcacacgggctggaatcaagagactcaggacccatttacccaatattaaagtccacgcctacttcgcacctgtcactccacccccatcagtagggggcagcagacagcgcttctgcagatgctgcatcatcctatgacaatggagagatggggtctcgctatcttgcccagcctggactcaaactcctgggctcaagccttcctcccacctcagcctcccaagtagctgggactacaggtgtgtgccactgtacccagcttaagaggtttgttttaatgctgcagttgctgattataccagcatatataag

SEQ ID NO: 133467 - DNA, 1620 bp, Homo sapiens
  Payload ID: 6082
  Gene Symbol: FBXL20
  Gene Name: F-box and leucine-rich repeat protein 20
  ENST ID: ENST00000577399
  CDS Start-End: 304-1620
gccaaaggaagggttgcccggctccagccctgcacccccgacccccggcctcaggtgcagctccgcagccatccccggaccagggcgggcacttggcctgttgctcagcgcaaccaccctcgccctcccgagccatgcacagggagacaagcgtccggccccggccccccaggcctccctgcagcaccccgtaatgtaatgcactggggcgggggaggcgggggaggcggcggcggcggcaaccgcggaggcgcggcggcagccgcactgccccaatctagacacatccagaagaggaggaaaatggctccgagcagggaccgcctgctgcactttgggttcaaggcgacaatgttctcaaatagtgatgaagctgtaatcaataaaaaacttcccaaagaactcctgttacggatattttcttttctagatgttgttaccctgtgccgctgtgctcaggtctccagggcctggaatgttctggctctggatggcagtaactggcagcgaattgacctatttgatttccagagggatattgagggccgagtagtggagaatatttcaaaacgatgtgggggctttttacgaaagttaagtcttcgtggatgtcttggagtgggagacaatgcattaagaacctttgcacaaaactgcaggaacattgaagtactgaatctaaatgggtgtacaaagacaacagacgctacatgtactagccttagcaagttctgttccaaactcaggcaccttgacttggcttcctgtacatcaataacaaacatgtctctaaaagctctgagtgagggatgtccactgttggagcagttgaacatttcctggtgtgaccaagtaaccaaggatggcattcaagcactagtgaggggctgtgggggtctcaaggccttattcttaaaaggctgcacgcagctagaagatgaagctctcaagtacataggtgcacactgccctgaactggtgactttgaacttgcagacttgcttgcaaatcacagatgaaggtctcattactatatgcagagggtgccataagttacaatccctttgtgcctctggctgctccaacatcacagatgccatcctgaatgctctaggtcagaactgcccacggcttagaatattggaagtggcaagatgttctcaattaacagatgtgggctttaccactctagccaggaattgccatgaacttgaaaagatggacctggaagagtgtgttcagataacagatagcacattaatccaactttctatacactgtcctcgacttcaagtattgagtctgtctcactgtgagctgatcacagatgatggaattcgtcacctggggaatggggcctgcgcccatgaccagctggaggtgattgagctggacaactgcccactaatcacagatgcatccctggagcacttgaagagctgtcatagccttgagcggatagaactctatgactgccagcaaatcacacgggctggaatcaagagactcaggacccatttacccaatattaaagtccacgcctacttcgcacctgtcactccacccccatcagtagggggcagcagacagcgcttctgcagatgctgcatcatcctatga

SEQ ID NO: 133468 - DNA, 629 bp, Homo sapiens
  Payload ID: 6082
  Gene Symbol: FBXL20
  Gene Name: F-box and leucine-rich repeat protein 20
  ENST ID: ENST00000581781
  CDS Start-End: 1-348
accactctagccaggaattgccatgaacttgaaaagatggacctggaagagtgtgttcagataacagatagcacattaatccaactttctatacactgtcctcgacttcaagtattgagtctgtctcactgtgagctgatcacagatgatggaattcgtcacctggggaatggggcctgcgcccatgaccagctggaggtgattgagctggacaactgcccactaatcacagatgcatccctggagcacttgaagagctgtcatagccttgagcggatagaactctatgactgccagcaaatcacacgggctggaatcaagagactcagggtaaaaatggctacataactctccaactctagtgttagcagcactttcttctctctttttttttccttttttcaaatttaggttcctatgatttttatatttacttgaacatttaacaagggaaagagaaaaaagtgcaaacctaaggacagatagtttttccctctggctccagagatggaaatttagtaggaaaagacccactgaagggaagaaaagtaggtctcctcccagcagagtctgtctaataatgtctagggcttaataacattcccagattgaagaaaaaaaaaaaaaaa

SEQ ID NO: 133469 - DNA, 1526 bp, Homo sapiens
  Payload ID: 6083
  Gene Symbol: FBXL22
  Gene Name: F-box and leucine-rich repeat protein 22
  Uniprot ID: Q6P050
  ENST ID: ENST00000360587
  CDS Start-End: 41-784
ggaggcaggtcagccgtcccccggctgcagctgcactcacatgtggccactgctcaccatgcacataacccagctcaaccgggagtgcctgctgcacctcttctccttcctagacaaggacagcaggaagagccttgccaggacctgctcccagctccacgacgtgtttgaggaccccgcactctggtccctgctgcacttccgttccctcactgaactccagaaggacaacttcctcctgggcccggcactccgcagcctctccatctgctggcactccagccgcgtgcaggtgtgcagcattgaggactggctcaagagtgccttccagagaagcatctgcagccggcacgagagcctggtcaatgatttcctcctccgggtgtgcgacaggctttctgctgtgcgctccccacggaggcgggaggcgcctgcaccgtcctcggggactccgatcgccgttggaccgaaatcacctcggtggggaggacctgaccactcggagttcgccgacttgcgctcgggggtgacgggggccagggctgccgcgcgcaggggtctggggagcctccgggcggagcgacccagcgagaccccgccggctcccggagtgtcctggggaccgccacctccaggagccccggtggtgatctcggtgaagcaggaggaggggaagcaggggcgcacgggcagaaggagccaccgagccgctcctccttgcggttttgcccgcacgcgcgtctgcccgcccacctttcctggggcggatgcgttcccgcagtgaccgcactcgcgattgtagaaaattcgctcccaattgttgaatgcttacataaactgcatagttacccatattttctactgttctcataagggaaaaagaaatgatttggaagaaaaaaaaagcctcaaactaaacaaaaacaaaaccagcagccctggctaagcttttgataatggaaccattataagctgacaagctagatttttcacctgttggatttgctggacatgagcacaagcctaggcttccaatttgaatttcagggctgtagtcactgatgtgtcacatttagtgaaggctctcggccccccggcagccgcctggtcctgggtcactggggagaattctgggtgggtggaagaggcgaggagcactgtgatgggcgctgttcacactccggctccacccagcgccagctgcgacaaagccctttacccctcccaggccaggtgtttcttctgtgtgaaagaggagcttgatccctactcacaggttccttaattcattgctcaaatagggaaacggcaaggaaaaagacaaattctgttctcatgaagcttaccttctagtgggggaagagacaacaggtaactggtatataagagggtagaagggccaggtgcggtggctcaatgcctgtaatcccagcactttaggaggccaagatgggcgattcacgaggtcaggagatcgagaccatcctggctaacaaggtgaaacccccgtctgtactaaaaaaaaa

SEQ ID NO: 133470 - DNA, 2443 bp, Homo sapiens
  Payload ID: 6083
  Gene Symbol: FBXL22
  Gene Name: F-box and leucine-rich repeat protein 22
  ENST ID: ENST00000534939
  CDS Start-End: 3-395
acatgtggccactgctcaccatgcacataacccagctcaaccgggagtgcctgctgcacctcttctccttcctagacaaggacagcaggaagagccttgccaggacctgctcccagctccacgacgtgtttgaggaccccgcactctggtccctgctgcacttccgttccctcactgaactccagaaggacaacttcctcctgggcccggcactccgcagcctctccatctgctggcactccagccgcgtgcaggtgtgcagcattgaggactggctcaagagtgccttccagagaagcatctgcagccggcacgagagcctggtcaatgatttcctcctccgggtgtgcgacagggtaagaggattaaatgacacagtggcacctggcacatagtaggtactgatgaacgtctactgaatctggttcttctggcactcagctcaggtcgggaggaatggctgaggatggctgggcagggggacagtccgctctttgttttttccctgtatcagaattattccaaagattcttagaagaaaagatcacccaacacctttgaggcttaaacacctaatccttataaccaccttgaaggtaacaattcctcccacttgacaaatgaggaagtgacgcccagcaaggttcagacatctgtcctgggtctgacagcaaataagtcaccagccagtcacctgagctgccggagccagtttcttcatgtacaaaactgggggtgcagaggttgacggggtgactaatgagggcacacaaacctgaaggaggcccgggctcggtgtgacacctggctgcacccaacatatttaagttccttacttccctcccctggcacaaaggagccgagctggcacagccaggggcagtcacggagctgcgggggaggctggcagggaaagggaaacgcttccccagcccagactctagctccctctggctgcggggagccaaggccccggcccattagtcggtccttctggactggaagcaggctggtcccgtttgtttccagggaaagcgggttaggactgcctgtggaaggccccgttgcaggctcctcacaaccccagtggtagacattattccccccacgcagaggaaatgaaggctccgtgagtgactgacacggcgataaaccaagtctaacttggctcaagatcttttctttgctgggaggggctggtgaggctgcagcagagggtcccccaagctttctggccaagcgacctgggtgggtgtccgtgactgtacctgctcagggcttgcctctagctgcctccgaaccctacccttttccaggctggtggcccaggggatgcaggaacagctctagtctactaagctgaacccggactcaatgctaacgcgtgcccccaccgccttgagggttgggatgggcctgtcactaggccacctccaaggaaacaaatccctcttcccactcacgtcccgccgggacattcaggggcctcagcttgaagctagactggagcaatcgccaagcaccgctcccctgcaaggcagcacatccagagcgaaacaaagagtcaagggttgtggctcctggaaccggcattccctctgtccacagccgccccaggactctgctgggccggggtcggggcttcccactaggggctcccaaggctacgagccaagaacccacgcagatgaaggtacggtggggtgcaggggcagaaagaggagggaaaatgggccggccagaaagccgacttggaaccctgcagtgtcatcgcagccaagtgtcttcacctcgcagggcccgagtcctcctcggtaaatgagtccactcggtcccatggggcggttgggtagctttaacaagccagtgagccccgggtcaccgcactctcctcacaggtgccccaacctggcgtccgtcacgctctcgggctgcggccacgttaccgacgactgcctggcgcgcctgctgcgctgctgcccacgcctgcgcgcactgcgcctggagaactgcgcgcgcgtcaccaaccgcacgttggctgccgtggcggcggacgggcgcgcgctgcagacattgcacgtggacttctgccgcaacgtgagcgcggccggcctgcgccgcctgcgcgccgcgtgcccgcgcctggccctgcgggcagagcacagcgccgccatgctgcccgaccagcccccgcgcccgcgcgcgcccgccgcggccctcggcaagctgctgcagcgctagacgccgccccgccgctgcccccggggaaggagcgcagccccagaccgtcctggcttcgaacccagctcttccaccttcagaccaccaccgcatattctgagcctcattttccccgtctgcacagtggggataagaaagcctacctcacgttacgattttatacataggataaacgcaagattaaatggatatttggaaaaca

SEQ ID NO: 133471 - DNA, 397 bp, Homo sapiens
  Payload ID: 6083
  Gene Symbol: FBXL22
  Gene Name: F-box and leucine-rich repeat protein 22
  ENST ID: ENST00000560325
  CDS Start-End: 1-84
cacgagagcctggtcaatgatttcctcctccgggtgtgcgacagggtaagaggattaaatgacacagtggcacctggcacatagtaggctttctgctgtgcgctccccacggaggcgggaggcgcctgcaccgtcctcggggactccgatcgccgttggaccgaaatcacctcggtggggaggacctgaccactcggagttcgccgacttgcgctcgggggtgacgggggccagggctgccgcgcgcaggggtctggggagcctccgggcggagcgacccagcgagaccccgccggctcccggagtgtcctggggaccgccacctccaggagccccggtggtgatctcggtgaagcaggaggaggggaagcaggggcgcacgggcagaaggagccac

SEQ ID NO: 133472 - DNA, 3503 bp, Homo sapiens
  Payload ID: 6084
  Gene Symbol: FBXL3
  Gene Name: F-box and leucine-rich repeat protein 3
  Uniprot ID: Q9UKT7
  ENST ID: ENST00000355619
  CDS Start-End: 326-1612
gtttgtggcccaggtgcaggaagcttacgcggtggcagccgctcgctgaggtagtctctcgcggcgccggggatccctgaacacagacagcgcgggactgagaaggaaagcttctttctgggcagccagagccgcaaaggtggagccgcgttggcgccctccgcgggaccagcgcctcggatgcgggcggagcgcggggggccgcggctgcgggagcgcgaagcggggggccaggggcgcctcatgtgagagccgcgggacctgcagccgccgccgtccccggagcacggggtggtgtgtgggggaagccgcccccggcagcaggatgaaacgaggaggaagagatagtgaccgtaattcatcagaagaaggaactgcagagaaatccaagaaactgaggactacaaatgagcattctcagacttgtgattggggtaatctccttcaggacattattctccaagtatttaaatatttgcctcttcttgaccgggctcatgcttcacaagtttgccgcaactggaaccaggtatttcacatgcctgacttgtggagatgttttgaatttgaactgaatcagccagctacatcttatttgaaagctacccatccagagctgatcaaacagattattaaaagacattcaaaccatctacaatatgtcagcttcaaggtggacagcagcaaggaatcagctgaagcagcttgtgatatactatcgcaacttgtgaattgctctttaaaaacacttggacttatttcaactgctcgaccaagctttatggatttaccaaagtctcactttatctctgcactgacagttgtgttcgtaaactccaaatccctgtcttcgcttaagatagatgatactccagtagatgatccatctctcaaagtactagtggccaacaatagtgatacactcaagctgttgaaaatgagcagctgtcctcatgtctctccagcaggtatcctttgtgtggctgatcagtgtcacggcttaagagaactagccctgaactaccacttattgagtgatgagttgttacttgcattgtcttctgaaaaacatgttcgattagaacatttgcgcattgatgtagtcagtgagaatcctggacagacacacttccatactattcagaagagtagctgggatgctttcatcagacattcacccaaagtgaacttagtgatgtatttttttttatatgaagaagaatttgaccccttctttcgctatgaaatacctgccacccatctgtactttgggagatcagtaagcaaagatgtgcttggccgtgtgggaatgacatgccctagactggttgaactagtagtgtgtgcaaatggattacggccacttgatgaagagttaattcgcattgcagaacgttgcaaaaatttgtcagctattggactaggggaatgtgaagtctcatgtagtgcctttgttgagtttgtgaagatgtgtggtggccgcctatctcaattatccattatggaagaagtactaattcctgaccaaaagtatagtttggagcagattcactgggaagtgtccaagcatcttggtagggtgtggtttcccgacatgatgcccacttggtaaaaactgcatgatgaatagcaccttaatttcaagcaaatgtattataattaaagttttatttgctgtagttctgatataattctactattttgtggcacagaaatttgatatcttcagtcagtatatgtaaagattgtttatcggaagacccatgaatgagttttggtcagaaaattccacttgtttccttagtgtaatagcagtcatatctccgaattttttttaatgtggttcggatgtgaaataaccagttatacgtattaaacagtttacagtctaaaggaaacaaaacctatatgttataatatccaagaagtactaataggttttctgaaatgttatattctctatgcatttaaaaaaaaatgtaaacttgacattttagggtcttcagttacacatacacctgttataaggtgtttaatatagctcaggaaagtgagcattttgtgagaaaaatgaatatatcatatctaatggaaaagattggatgaatgttctcaaatgttacaaagctgtttaaagaaaaaggtatatataagtaatcagaacacttagaagactgatagatgtcacacagtggtattatagaaggataatacagagccaagatcaaattaaaagacaataaatggaacagaagggaggcagtgtttagctttgtataaacttttaggtttgctctgtaatctgctaaaccatatacattcttttgtgatatgttattatgtatgtggcacttgaggcactgtatgtaaagtaaggaatgctttactagttctccttggttttatctttgtttaaactagctttaaagtattaaacaataattgaaatgaaaagcttacctattttaaaaagccaaatttaaataaatatagaactttaaaatgtttatcagttgtttccatgaaagaatattagtttccagtaaattttagtgatggctcactcacttttctattttggaattacatagttatgtaagtaaaatttttaaaaatcataaagggagcaccattgtacagtctagcataaacagcaaattttaaagaggacatatttaagttcataatcatatttttcagtaaatattgctcagtgaactggaaaactttaatagaaaaatgtctgcagttttgtgattgttaatttggttaaaccgatattttatattatttaagttaggtaacattttatattactttcatatgaataaaagtaatccatgcattgtagagtctataaaatgttgagttttaaaagatgatataaactttgatgctgggcactagtgctagtagatattactaccctcctgagggaaatcagaaatgatttaaccccggtggaatacattaattcttaaagcggctcttttcagtggtgtgacttttagattgtgtctcagtggttgaggaagctaacagtcttagatctacttttaaaacggatggccttcttaagaataaagcaaaaggtgattttctacataatttttgctttccaaaagtgatgatatgctctcctacagcaacatatgagaagaaaaaaggcttatctagattcgaaaattaacagcaattatagtaatatatcccctccttctaaatagtaaaaagctctgattgtacaagaattacctgtgctagtcaagttgttgtttttccttgaacaactttggaaaaatggatttgacagtacataatcagttctactaaccaaagcttgtatttggaaatttactttttgtacaaattgaattatataatgcttaaaatactttgtcactttataagcaaaatgcatagtacttaatttgtttatactgtaaagtatatgttaaatgcttttatcactttgagaataaaaagttactaatgctgttgta

SEQ ID NO: 133473 - DNA, 1093 bp, Homo sapiens
  Payload ID: 6084
  Gene Symbol: FBXL3
  Gene Name: F-box and leucine-rich repeat protein 3
  ENST ID: ENST00000417323
  CDS Start-End: 371-1093
gggaagcgcgcggccgcgagccctgggcgccattttagactcgctgtttgtggcccaggtgcaggaagcttacgcggtggcagccgctcgctgaggtagtctctcgcggcgccggggatccctgaacacagacagcgcgggactgagaaggaaagcttctttctgggcagccagagccgcaaaggtggagccgcgttggcgccctccgcgggaccagcgcctcggatgcgggcggagcgcggggggccgcggctgcgggagcgcgaagcggggggccaggggcgcctcatgtgagagccgcgggacctgcagccgccgccgtccccggagcacggggtggtgtgtgggggaagccgcccccggcagcaggatgaaacgaggaggaagagatagtgaccgtaattcatcagaagaaggaactgcagagaaatccaagaaactgaggactacaaatgagcattctcagacttgtgattggggtaatctccttcaggacattattctccaagtatttaaatatttgcctcttcttgaccgggctcatgcttcacaagtttgccgcaactggaaccaggtggacagcagcaaggaatcagctgaagcagcttgtgatatactatcgcaacttgtgaattgctctttaaaaacacttggacttatttcaactgctcgaccaagctttatggatttaccaaagtctcactttatctctgcactgacagttgtgttcgtaaactccaaatccctgtcttcgcttaagatagatgatactccagtagatgatccatctctcaaagtactagtggccaacaatagtgatacactcaagctgttgaaaatgagcagctgtcctcatgtctctccagcaggtatcctttgtgtggctgatcagtgtcacggcttaagagaactagccctgaactaccacttattgagtgatgagttgttacttgcattgtcttctgaaaaacatgttcgattagaacatttgcgcattgatgtagtcagtgagaatcctggacagacacacttccatactattcagaagagtagctgggatgctttcatcagacattcacccaaagtgaactta

SEQ ID NO: 133474 - DNA, 2810 bp, Homo sapiens
  Payload ID: 6085
  Gene Symbol: FBXL4
  Gene Name: F-box and leucine-rich repeat protein 4
  Uniprot ID: Q9UKA2
  ENST ID: ENST00000229971
  CDS Start-End: 392-2257
ctcctccccggctccgccccgcctccccgggcccgccgctcctcgcggcctccgcgtcttccttccgggtcgcgctaggccgggcttgcggcggttgtgccgcatctagagagtcggggagccgcccccgcacccaggccttctcgcgctgcctggtcgctggtgaagcccgcggcgcgcgcctctcccggaccctgcagggtaaaagaatgtcacatgtcagcatttgtacctgaagtcagcatgcaaagttcagggtacctggatgaatgccaacttttgcatttcccatgtgtatcctgtgaccattctatctgggaacatccttcaaagagttcatgcatcttactgaggacacctgaccttttgaagcttcataattcacatctagatgtcaccggtctttcccatgttaacagttctgaccatgttttattatatatgccttcggcgccgagccaggacagctacaagaggagaaatgatgaacacccatagagctatagaatcaaacagccagacttcccctctcaatgcagaggtagtccagtatgccaaagaagtagtggatttcagttcccattatggaagtgagaatagtatgtcctatactatgtggaatttggctggtgtaccaaatgtattcccaagttctggtgactttactcagacagctgtgtttcgaacttatgggacatggtgggatcagtgtcctagtgcttccttgccattcaagaggacgccacctaattttcagagccaggactatgtggaacttacttttgaacaacaggtgtatcctacagctgtacatgttctagaaacctatcatcccggagcagtcattagaattctcgcttgttctgcaaatccttattccccaaatccaccagctgaagtaagatgggagattctttggtcagagagacctacgaaggtgaatgcttcccaagctcgccagtttaaaccttgtattaagcagataaatttccccacaaatcttatacgactggaagtaaatagttctcttctggaatattacactgaattagatgcagttgtgctacatggtgtgaaggacaagccagtgctttctctcaagacttcacttattgacatgaatgatatagaagatgatgcctatgcagaaaaggatggttgtggaatggacagtcttaacaaaaagtttagcagtgctgtcctcggggaagggccaaataatgggtattttgataaactaccttatgagcttattcagctgattctgaatcatcttacactaccagacctgtgtagattagcacagacttgcaaactactgagccagcattgctgtgatcctctgcaatacatccacctcaatctgcaaccatactgggcaaaactagatgacacttctctggaatttctacagtctcgctgcactcttgtccagtggcttaatttatcttggactggcaatagaggcttcatctctgttgcaggatttagcaggtttctgaaggtttgtggatccgaattagtacgccttgaattgtcttgcagccactttcttaatgaaacttgcttagaagttatttctgagatgtgtccaaatctacaggccttaaatctctcctcctgtgataagctaccacctcaagctttcaaccacattgccaagttatgcagccttaaacgacttgttctctatcgaacaaaagtagagcaaacagcactgctcagcattttgaacttctgttcagagcttcagcacctcagtttaggcagttgtgtcatgattgaagactatgatgtgatagctagcatgataggagccaagtgtaaaaaactccggaccctggatctgtggagatgtaagaatattactgagaatggaatagcagaactggcttctgggtgtccactactggaggagcttgaccttggctggtgcccaactctgcagagcagcaccgggtgcttcaccagactggcacaccagctcccaaacttgcaaaaactctttcttacagctaatagatctgtgtgtgacacagacattgatgaattggcatgtaattgtaccaggttacagcagctggacatattaggaacaagaatggtaagtccggcatccttaagaaaactcctggaatcttgtaaagatctttctttacttgatgtgtccttctgttcgcagattgataacagagctgtgctagaactgaatgcaagctttccaaaagtgttcataaaaaagagctttactcagtgacttaatatatgttctgtattaaaattaatgtgctttgttggggtttaattttgggattggttttgggttttgtttttagttgttttaatggtaagaattaagacatttgtagattttaaagaaaaatatgaaattgtccattaaatcaagtaaaaatgtgcacaaatgttttcataaaatactgcaagcacttctcttcaagaatatgagtggatattatttttaccttatgttaatcagtgatatgctttagtcaataatatgattgataaaagaataacatggaatcatgctaacttattttcaaaggaacactgagcaataaagtatcgtggcatttatgcaaaaaaaaaagttaattttttacaccttcatgtaaggatgtcttattaagcctgtgacctggcaagtgttttgtttggtatgtacaaaatggtcagagctagttggagaatgagacatgcttttccagctgtttggttatttctctggattaactgttcaactggaaaatttttagtttttctagccaggtgtggtggcacacacttgt

SEQ ID NO: 133475 - DNA, 8035 bp, Homo sapiens
  Payload ID: 6085
  Gene Symbol: FBXL4
  Gene Name: F-box and leucine-rich repeat protein 4
  Uniprot ID: Q9UKA2
  ENST ID: ENST00000369244
  CDS Start-End: 430-2295
cgggcttgcggcggttgtgccgcatctagagagtcggggagccgcccccgcacccaggccttctcgcgctgcctggtcgctggtgaagcccgcggcgcgcgcctctcccggaccctgcaggatttttcttcctggcctggttcccttgccttctccatttgcttcattcgcttggattttcaagaagctttgaagctggataggagtctccagtcttcctcttgatccatatgtttcaggtaaaagaatgtcacatgtcagcatttgtacctgaagtcagcatgcaaagttcagggtacctggatgaatgccaacttttgcatttcccatgtgtatcctgtgaccattctatctgggaacatccttcaaagagttcatgcatcttactgaggacacctgaccttttgaagcttcataattcacatctagatgtcaccggtctttcccatgttaacagttctgaccatgttttattatatatgccttcggcgccgagccaggacagctacaagaggagaaatgatgaacacccatagagctatagaatcaaacagccagacttcccctctcaatgcagaggtagtccagtatgccaaagaagtagtggatttcagttcccattatggaagtgagaatagtatgtcctatactatgtggaatttggctggtgtaccaaatgtattcccaagttctggtgactttactcagacagctgtgtttcgaacttatgggacatggtgggatcagtgtcctagtgcttccttgccattcaagaggacgccacctaattttcagagccaggactatgtggaacttacttttgaacaacaggtgtatcctacagctgtacatgttctagaaacctatcatcccggagcagtcattagaattctcgcttgttctgcaaatccttattccccaaatccaccagctgaagtaagatgggagattctttggtcagagagacctacgaaggtgaatgcttcccaagctcgccagtttaaaccttgtattaagcagataaatttccccacaaatcttatacgactggaagtaaatagttctcttctggaatattacactgaattagatgcagttgtgctacatggtgtgaaggacaagccagtgctttctctcaagacttcacttattgacatgaatgatatagaagatgatgcctatgcagaaaaggatggttgtggaatggacagtcttaacaaaaagtttagcagtgctgtcctcggggaagggccaaataatgggtattttgataaactaccttatgagcttattcagctgattctgaatcatcttacactaccagacctgtgtagattagcacagacttgcaaactactgagccagcattgctgtgatcctctgcaatacatccacctcaatctgcaaccatactgggcaaaactagatgacacttctctggaatttctacagtctcgctgcactcttgtccagtggcttaatttatcttggactggcaatagaggcttcatctctgttgcaggatttagcaggtttctgaaggtttgtggatccgaattagtacgccttgaattgtcttgcagccactttcttaatgaaacttgcttagaagttatttctgagatgtgtccaaatctacaggccttaaatctctcctcctgtgataagctaccacctcaagctttcaaccacattgccaagttatgcagccttaaacgacttgttctctatcgaacaaaagtagagcaaacagcactgctcagcattttgaacttctgttcagagcttcagcacctcagtttaggcagttgtgtcatgattgaagactatgatgtgatagctagcatgataggagccaagtgtaaaaaactccggaccctggatctgtggagatgtaagaatattactgagaatggaatagcagaactggcttctgggtgtccactactggaggagcttgaccttggctggtgcccaactctgcagagcagcaccgggtgcttcaccagactggcacaccagctcccaaacttgcaaaaactctttcttacagctaatagatctgtgtgtgacacagacattgatgaattggcatgtaattgtaccaggttacagcagctggacatattaggaacaagaatggtaagtccggcatccttaagaaaactcctggaatcttgtaaagatctttctttacttgatgtgtccttctgttcgcagattgataacagagctgtgctagaactgaatgcaagctttccaaaagtgttcataaaaaagagctttactcagtgacttaatatatgttctgtattaaaattaatgtgctttgttggggtttaattttgggattggttttgggttttgtttttagttgttttaatggtaagaattaagacatttgtagattttaaagaaaaatatgaaattgtccattaaatcaagtaaaaatgtgcacaaatgttttcataaaatactgcaagcacttctcttcaagaatatgagtggatattatttttaccttatgttaatcagtgatatgctttagtcaataatatgattgataaaagaataacatggaatcatgctaacttattttcaaaggaacactgagcaataaagtatcgtggcatttatgcaaaaaaaaaagttaattttttacaccttcatgtaaggatgtcttattaagcctgtgacctggcaagtgttttgtttggtatgtacaaaatggtcagagctagttggagaatgagacatgcttttccagctgtttggttatttctctggattaactgttcaactggaaaatttttagtttttctagccaggtgtggtggcacacacttgtagtcctagcgacacaggaggtggaggcaggaggattacttgagatgggattttgagactctagtgtacttatgattgcacctgtgagcagccactgcactccaacctgggcaatatagcaagtccctttctcttaaaaaaaattgtagtgtttccacttttcttctgatatttttgtctatttcactactggataatgccaatataaaaatttgggtataatcaagaataagaggtaaactactaaataaaaaaagctttccaactgttagaagcagatgccttaacattttgtgaaaggtaaagttttgaggtttctgaattatataaaaaaacataaatgtggagatatatattatatatacacattatatatacatattatagataatatatatccacatttatgatttttaatatatacatgtatatattatatattatataattatatattacatttatattatatgtaatgtacatgtatatattatatacatatatataattatatatattatatagagagagatatatatcttgctagggtgtgtggatgctggaatataacgattttgcacttaacaggacaatgaattttgttatactacagttaatattagttttgtgttcaaaacagctgtgccttttcatgccacaaaatattttctgtctactttctgagtagcagaattaattcatttttttaacaaaacgatgtatgtcaagtgttcagtagtcacatgaggagaatgcttcctttgtgcctggcactgtttcttgtgctttgcattgactaattcaattctcacaacaaccctgtaagataaatgccattacttacccccatttacagatgaggaaactgaggcaaagaaagattgaagaatttatttatgatcatacagctgctagtggcagagccaacatataaacccaggccatctggcttctgaagcattgcattaaacctgtgcttttaggtgttcagggtagcttctggctctagggcagaggtcaggaaactttttctataaagggccagatagtaaatattttaggctttgtgggctaagaggtaaaactgagattgttatgtagatacttaaataactagagagaaataaaatttgcacgaaaattttattgacaaaattcaaaacaataatttagaacaattttttttgtaatacgggtttactaatgaaaagaattaaatatttacagggaggatcaaagttaatgtttcgtgtcattaaagttgattgtaagtactcatttgttaatgctgatctgtaataagattttatgtattttacttctgaaaattccttgcagataggtattgtcaaatacttacattaatccatgagaatatgatttttgttgagcatattcatcacttgaaaggttacttcttctctggatattttccttttagcatgttattacattgcagcttaatcacttccaattgaagactaggcagaagctcctcaattgcactgttaaattgattttgaaaaatggaaatttcctttacatttgcaaactccaaaaaatactgcaggcactatggtgtgagctacaaatttgtgtgagagtggagatctcgcttctttgtcttaccttttgatagcacaggaaatgtgtaaagcagcttgttgttacttgtaattcaaacaatgttgtcatcaaaatgacttatgttttgcttgtaaacacgttttgccttgtaattttggcttgaattcatttcaaaattttattaagtcttgagcaaaagctaaattccaaagccattcagtgttccataatagtgattgaggacatgtcttctttttcagaaaaatgtcaatatcagccctgaacgcaaaagctcacaatagaactaacactattatgccaatgtggttgggcaaatcagcatattcatcttctgtatctgacaaaagataactgaaccattgatgtttaatctatcagaaactatgagagcaaatgaagttcaccattgctaccagtagttcagtaatacaaaattgaatcaaatatatcccacaaagtacctgctgatgaataatacagtaaataaccatagattttaaataccttcttaccttttcacaggctttataaatttgacaaacgtaatcattttgcttcacacatttttaacaccaccagttgtaacacatcttagcagattctacttcaggttgcatgaaatttgtgttttcttcttataaaatattcatgcttgtaattgtgccacacagataattcatagagactaatttcagtcacttcaacgttggcattgacttatcaaataagcaataactaggcagtgtcagtaacatctgttgactcatcaagagccaaggaaaaccactcagggtcatttgccttgttttttattgactgttgatgttgttcccagtgttctcaattctttaagcaaccattcttgccaaaaggctaatttaatagtcttaagtttactttggacacagtccttcagccgatagaatcaaacacaatttagttatcgttagtaaaatgttttccttgcttggttaacatctgagtcactttggctgcaactttattttcatttttgagtttgtttttttttttttttgagactgagtctcattcttttgcccaggctggagtgcagtggcacaatctcagttcactgcaacctccaccctgcaggttcaagcgagtctcctgcctcagcctcccaagtagctgagattacaggcacatgccaccacacctaactaatttttatgtttttagtagaaatggggttttaccatgttgtccaggctggtcttgaactcctgacctcaagtgatccacccacttcagcctcccaaaatgcttggattacaggcatgaaccactgcatctgacctccctatagtattctttaagaacagctataatgacattgcatattaaacatcatactctgacatctaatctgatttttaaaaattcatatactaatgtgccttaaaaatgtcacttcaagtctacttttctttttttctcttgttttgatgttatgggtaagcactagtaataaaaaatttaaaaatattgtggtatgacaacatatgtggcactcaaaatgctggtaactgcattactgcagtttttagtgtgccaagtagcagtgcaaaatgatgacagcaccacataagtctcctttgcatttgttcaactctgccattctaatgtgaaagcaatcatagacagtacctaaacgaatgagtgtggccatgttccaataaaatttcatgagcactgaaagttgaattttacataattttgatgtgttacaaaatactactgtgttagccattagattttttcagccattagaaaatgtgaaactgttcttatgagctggctggatttggcttgtggaccaaatttgtgacccctattccagagtattttcgagtcagttaatccatgtttgcccattcctaattttataaaccacattcaaacctgttaattcgctgttatcattctcattttgccatttagattttaaaatgaagagcagtgttttgttagaaaaaacaaaatgtttaccataacaagaaagatgtgtagacaagaaagatatttatgtagactctttgtttgttaaattttgaagccaggtgatgcattgttagctttgacaactgacttaaatttttgtataattatttatctttgcattttgctcaggtaaattatcttcccagagtctagaaataaagatatccctgatcctgtttaagagcataaataatactctcaatgtaaattgttttgaaataagatcttaaaaatacaaaatgtagacaattaatattcaggtgcttacttttgagccaatatgtagcagagaaaaactaatttctctgtggcagtatttttatttttggcatttcccaggaattaactgaagactaaaactcatatgtgaagtgtaatgatactaatcaaagagtcagtaaaatttccatttggctaccatgtatgtgtgtatatatttatgtatgtatgtgtgtgttacatatttgagacagggtctcactctattgccccaggctggagtgcagtggcatgatctcagcttactgcagcctcagtctcccaggctcaagcgatcctcccacctcggcctcccgagtacctgggactacagacaccaccacacctggctaatttttttattttttatagagacacagtctttccatgttgcctatgttggtcttgaactcctgggctcaaataattttcccaccttggcctcctgtagtgctgggattacgggcataagccactgtgtcaggccccatgtatgttaatagtgaatgtttggcttttcatttgttactttcagctattaaaggatacctattacagacacaggaatttacattttcaaagtcatttttgacacatcagtgctgcatctacttttctccttttagcacatttgatattgatacttcagagaaacttttttaactacccttaaaatcttgtcaatgaccattaactgccaatcatcacctcatttgctttttttgacaacatactactagaaacctaggctgtgagtgtaaaaccataactgttagaatcatttttttggcaatagctcacattctgttaagagtcatttgctttaatcaaagatcatgatttattatatattttttataagtagggatggggccaagattattcctttggcacagcagtaagtgtgctcaagatctttgcctgtaagcttgaatatttggcttaaattttgtgcatatgaatactgttaaaggtatatttgactacattttgaaaggaaaaaggtagtcctgctaaaattgacatttagggatattttaatctatgtatttggtaaagtaattagtgaagtattagttataaaaattttaaggaaaacatttaaaagcaaaatagtcgtatcagataaatagagtagaatacactaaagataaaacaagtctctgttacaaatgaagttgtctgtacagacgactgagatattttaattttatttacataaaaatgctgttcaatatctaatgatttctgttgtttgtattctgtactttagagtaataaaataagtttgagtatctca

SEQ ID NO: 133476 - DNA, 3385 bp, Homo sapiens
  Payload ID: 6086
  Gene Symbol: FBXL5
  Gene Name: F-box and leucine-rich repeat protein 5
  Uniprot ID: Q9UKA1
  ENST ID: ENST00000341285
  CDS Start-End: 126-2201
accgggcgcgcgcgccgacggggcgggcgcatgcgcaagggggcgcgccgcctctgccccgcggcgagggtgtctatggagaggcggcggccgcggctgctgaggcggaggctgaggcagtggcgatggcgccctttcctgaagaagtggacgtcttcaccgccccacactggcggatgaagcagctggtggggctctactgcgacaagctttctaaaaccaatttttccaacaacaacgatttccgtgctcttctgcagtctttgtatgctactttcaaggagttcaaaatgcatgagcagattgaaaatgaatacattattggtttgcttcaacaacgcagccagaccatttataatgtacattctgacaataaactctccgagatgcttagcctctttgaaaagggactgaagaatgttaagaatgaatatgaacagttaaattatgcaaaacaactgaaagagagattggaggcttttacaagagattttcttcctcacatgaaagaggaagaggaggtttttcagcccatgttaatggaatattttacctatgaagagcttaaggatattaaaaagaaagtgattgcacaacactgctctcagaaggatactgcagaactccttagaggtcttagcctatggaatcatgctgaagagcgacagaagttttttaaatattccgtggatgaaaagtcagataaagaagcagaagtgtcagaacactccacaggtataacccatcttcctcctgaggtaatgctgtcaattttcagctatcttaatcctcaagagttatgtcgatgcagtcaagtaagcatgaaatggtctcagctgacaaaaacgggatcgctttggaaacatctttaccctgttcattgggccagaggtgactggtatagtggtcccgcaactgaacttgatactgaacctgatgatgaatgggtgaaaaataggaaagatgaaagtcgtgcttttcatgagtgggatgaagatgctgacattgatgaatctgaagagtctgcggaggaatcaattgctatcagcattgcacaaatggaaaaacgtttactccatggcttaattcataacgttctaccatatgttggtacttctgtaaaaaccttagtattagcatacagctctgcagtttccagcaaaatggttaggcagattttagagctttgtcctaacctggagcatctggatcttacccagactgacatttcagattctgcatttgacagttggtcttggcttggttgctgccagagtcttcggcatcttgatctgtctggttgtgagaaaatcacagatgtggccctagagaagatttccagagctcttggaattctgacatctcatcaaagtggctttttgaaaacatctacaagcaaaattacttcaactgcgtggaaaaataaagacattaccatgcagtccaccaagcagtatgcctgtttgcacgatttaactaacaagggcattggagaagaaatagataatgaacacccctggactaagcctgtttcttctgagaatttcacttctccttatgtgtggatgttagatgctgaagatttggctgatattgaagatactgtggaatggagacatagaaatgttgaaagtctttgtgtaatggaaacagcatccaactttagttgttccacctctggttgttttagtaaggacattgttggactaaggactagtgtctgttggcagcagcattgtgcttctccagcctttgcgtattgtggtcactcattttgttgtacaggaacagctttaagaactatgtcatcactcccagaatcttctgcaatgtgtagaaaagcagcaaggactagattgcctaggggaaaagacttaatttactttgggagtgaaaaatctgatcaagagactggacgtgtacttctgtttctcagtttatctggatgttatcagatcacagaccatggtctcagggttttgactctgggaggagggctgccttatttggagcaccttaatctctctggttgtcttactataactggtgcaggcctgcaggatttggtttcagcatgtccttctctgaatgatgaatacttttactactgtgacaacattaacggtcctcatgctgataccgccagtggatgccagaatttgcagtgtggttttcgagcctgctgccgctctggcgaatgacccttgacttctgatctttgtctacttcatttagctgagcaggctttctttcatgcactttactcatagcacatttcttgtgttaaccatccctttttgagcgtgacttgttttggccccatttcttacaacttcagaaatcttaatttaccagtgaattgtaatgttgtttctcttgcaaattatacttttggtttagaaagggattaggtcttttcaaaagggtgagaacagtcttacatttttcttttaaatgaaatgctttaaagaatgttggtaatgccatgtcatttaaagtatttcatagataattttgagttttaaagtccatggaggtgattggttctctttacacattaacactgtaccaagctttgcagatcttttccgacacacatgtctgaagacttattttcaaagacagcacatttttggaaactaatctcttttccgtaatatttcctttatttcaatgattctcagaaggccaattcaaacaaacccacatttaaggttctttaggattatagaataaattggcttctgagtgttagctcagtgagctaggaaagcaccaatcgatatttgtttcctttagggatactttgttctcaccactgtccctatgtcatcaaatttgggagagattttttaaaataccacaatcatttgaagaaatgtataaataaaatctactttgaggactttaccaagtaatactgttgtgttgtgatttttattataaatctcaatccaggtttactttagtatagaataggactacatactttgtctttggacctcccatgaacttattaccctgacaaatagttttagacagatactgaattttattgagctgaattttctttttgaaatgagttattcagtagtcaaaatttgaatccgtaagtatatctactttgctttgttaaaacatcatgagagtggaggcctgccacccagaaaggcacatactagtgccttttagtacaattttatgtcatgtagaagaaaatggcaatgttcctcctattgatacagatacaggcatatgtcatcttattgcgttttgctttattgcactttgcaaataatgcattttttacaaatggaaggtttatggcaactctgcgttgagccagtctattggtgccatgtttccaataaaacttctcctttca

SEQ ID NO: 133477 - DNA, 2837 bp, Homo sapiens
  Payload ID: 6086
  Gene Symbol: FBXL5
  Gene Name: F-box and leucine-rich repeat protein 5
  Uniprot ID: Q9UKA1
  ENST ID: ENST00000412094
  CDS Start-End: 96-2120
atgcgcaagggggcgcgccgcctctgccccgcggcgagggtgtctatggagaggcggcggccgcggctgctgaggcggaggctgaggcagtggcgatggcgccctttcctgaagaagtggacgtcttcaccgccccacactggcggatgaagcagctggtggggctctactgcgacaagtctttgtatgctactttcaaggagttcaaaatgcatgagcagattgaaaatgaatacattattggtttgcttcaacaacgcagccagaccatttataatgtacattctgacaataaactctccgagatgcttagcctctttgaaaagggactgaagaatgttaagaatgaatatgaacagttaaattatgcaaaacaactgaaagagagattggaggcttttacaagagattttcttcctcacatgaaagaggaagaggaggtttttcagcccatgttaatggaatattttacctatgaagagcttaaggatattaaaaagaaagtgattgcacaacactgctctcagaaggatactgcagaactccttagaggtcttagcctatggaatcatgctgaagagcgacagaagttttttaaatattccgtggatgaaaagtcagataaagaagcagaagtgtcagaacactccacaggtataacccatcttcctcctgaggtaatgctgtcaattttcagctatcttaatcctcaagagttatgtcgatgcagtcaagtaagcatgaaatggtctcagctgacaaaaacgggatcgctttggaaacatctttaccctgttcattgggccagaggtgactggtatagtggtcccgcaactgaacttgatactgaacctgatgatgaatgggtgaaaaataggaaagatgaaagtcgtgcttttcatgagtgggatgaagatgctgacattgatgaatctgaagagtctgcggaggaatcaattgctatcagcattgcacaaatggaaaaacgtttactccatggcttaattcataacgttctaccatatgttggtacttctgtaaaaaccttagtattagcatacagctctgcagtttccagcaaaatggttaggcagattttagagctttgtcctaacctggagcatctggatcttacccagactgacatttcagattctgcatttgacagttggtcttggcttggttgctgccagagtcttcggcatcttgatctgtctggttgtgagaaaatcacagatgtggccctagagaagatttccagagctcttggaattctgacatctcatcaaagtggctttttgaaaacatctacaagcaaaattacttcaactgcgtggaaaaataaagacattaccatgcagtccaccaagcagtatgcctgtttgcacgatttaactaacaagggcattggagaagaaatagataatgaacacccctggactaagcctgtttcttctgagaatttcacttctccttatgtgtggatgttagatgctgaagatttggctgatattgaagatactgtggaatggagacatagaaatgttgaaagtctttgtgtaatggaaacagcatccaactttagttgttccacctctggttgttttagtaaggacattgttggactaaggactagtgtctgttggcagcagcattgtgcttctccagcctttgcgtattgtggtcactcattttgttgtacaggaacagctttaagaactatgtcatcactcccagaatcttctgcaatgtgtagaaaagcagcaaggactagattgcctaggggaaaagacttaatttactttgggagtgaaaaatctgatcaagagactggacgtgtacttctgtttctcagtttatctggatgttatcagatcacagaccatggtctcagggttttgactctgggaggagggctgccttatttggagcaccttaatctctctggttgtcttactataactggtgcaggcctgcaggatttggtttcagcatgtccttctctgaatgatgaatacttttactactgtgacaacattaacggtcctcatgctgataccgccagtggatgccagaatttgcagtgtggttttcgagcctgctgccgctctggcgaatgacccttgacttctgatctttgtctacttcatttagctgagcaggctttctttcatgcactttactcatagcacatttcttgtgttaaccatccctttttgagcgtgacttgttttggccccatttcttacaacttcagaaatcttaatttaccagtgaattgtaatgttgtttctcttgcaaattatacttttggtttagaaagggattaggtcttttcaaaagggtgagaacagtcttacatttttcttttaaatgaaatgctttaaagaatgttggtaatgccatgtcatttaaagtatttcatagataattttgagttttaaagtccatggaggtgattggttctctttacacattaacactgtaccaagctttgcagatcttttccgacacacatgtctgaagacttattttcaaagacagcacatttttggaaactaatctcttttccgtaatatttcctttatttcaatgattctcagaaggccaattcaaacaaacccacatttaaggttctttaggattatagaataaattggcttctgagtgttagctcagtgagctaggaaagcaccaatcgatatttgtttcctttagggatactttgttctcaccactgtccctatgtcatcaaatttgggagagattttttaaaataccacaatcatttgaagaaatgtataaataaaatctactttgaggactttaccaagtaa

SEQ ID NO: 133478 - DNA, 596 bp, Homo sapiens
  Payload ID: 6086
  Gene Symbol: FBXL5
  Gene Name: F-box and leucine-rich repeat protein 5
  ENST ID: ENST00000509314
  CDS Start-End: 220-596
agtagccacctttccctcaggccatacacatggaaccattctttctccctacaagtcagcccataatagagcctctggttgaaaatcaagattttggtgttcacttggcaatatttactaagaggtaaatgacgcaagctttctaaaaccaatttttccaacaacaacgatttccgtgctcttctgcagtctttgtatgctactttcaaggagttcaaaatgcatgagcagattgaaaatgaatacattattggtttgcttcaacaacgcagccagaccatttataatgtacattctgacaataaactctccgagatgcttagcctctttgaaaagggactgaagaatgttaagaatgaatatgaacagttaaattatgcaaaacaactgaaagagagattggaggcttttacaagagattttcttcctcacatgaaagaggaagaggaggtttttcagcccatgttaatggaatattttacctatgaagagcttaaggatattaaaaagaaagtgattgcacaacactgctctcagaaggatactgcagaactccttagaggtcttagcctatggaatcatgctgaagagcgaca

SEQ ID NO: 133479 - DNA, 741 bp, Homo sapiens
  Payload ID: 6086
  Gene Symbol: FBXL5
  Gene Name: F-box and leucine-rich repeat protein 5
  ENST ID: ENST00000507899
  CDS Start-End: 456-741
gagacaccgcggagaactctgcctctgagctggtgggcgggccggatgtagccgagcgcggacagggctagtccggacagagtcccagagccatgggagcgaaaagagactgctgcggattaaggaggcctttcggttggcgcagcagccacaccacaaccaggcgaagcagaaacttgtgatactttctcactacatggtgcaaacagctgagtcaagttgtccctgagagtagccacctttccctcaggccatacacatggaaccattctttctccctacaagtcagcccataatagagcctctggttgaaaatcaagattttggtgttcacttggcaatatttactaagaggtaaatgacgcaagcagtactccagccaaccaatctaagactgaccggcgtgagcagagaacagagtctccaggaggtctgtggccagggccaggcgatttatgggaaagaggcagacattttcctggctttctaaaaccaatttttccaacaacaacgatttccgtgctcttctgcagtctttgtatgctactttcaaggagttcaaaatgcatgagcagattgaaaatgaatacattattggtttgcttcaacaacgcagccagaccatttataatgtacattctgacaataaactctccgagatgcttagcctctttgaaaagggactgaagaatgttaagaatgaatatgaacagttaaattatgcaaaacaactgaaagaga

SEQ ID NO: 133480 - DNA, 532 bp, Homo sapiens
  Payload ID: 6086
  Gene Symbol: FBXL5
  Gene Name: F-box and leucine-rich repeat protein 5
  ENST ID: ENST00000510802
  CDS Start-End: 297-532
caagaaaccctaggagacaccgcggagaactctgcctctgagctggtgggcgggccggatgtagccgagcgcggacagggctagtccggacagagtcccagagccatgggagcgaaaagagactgctgcggattaaggaggcctttcggttggcgcagcagccacaccacaaccaggcgaagcaggtagtggcgctgaatcgctcctgccgcgggctttctaaaaccaatttttccaacaacaacgatttccgtgctcttctgcagtctttgtatgctactttcaaggagttcaaaatgcatgagcagattgaaaatgaatacattattggtttgcttcaacaacgcagccagaccatttataatgtacattctgacaataaactctccgagatgcttagcctctttgaaaagggactgaagaatgttaagaatgaatatgaacagttaaattatgcaaaacaactgaaagagagattggaggcttttacaagagattttcttcctcacatgaaagaggaagaggaggtttt

SEQ ID NO: 133481 - DNA, 591 bp, Homo sapiens
  Payload ID: 6086
  Gene Symbol: FBXL5
  Gene Name: F-box and leucine-rich repeat protein 5
  ENST ID: ENST00000515679
  CDS Start-End: 422-591
ttatttgaatgccagggcggtaacgactccctaggcgcctggggccctctgacaagaaaccctaggagacaccgcggagaactctgcctctgagctggtgggcgggccggatgtagccgagcgcggacagggctagtccggacagagtcccagagccatgggagcgaaaagagactgctgcggattaaggaggcctttcggttggcgcagcagccacaccacaaccaggcgaagcaggtagtggcgctgaatcgctcctgccgcggggtaagcgctcccggcccgcgcccgccccagccccgacctggcggggccaggacgctggttcatacactccaagctttctaaaaccaatttttccaacaacaacgatttccgtgctcttctgcagtctttgtatgctactttcaaggagttcaaaatgcatgagcagattgaaaatgaatacattattggtttgcttcaacaacgcagccagaccatttataatgtacattctgacaataaactctccgagatgcttagcctctttgaaaagggactgaagaatgttaagaatgaatatgaacagttaaattatgcaaaacaact

SEQ ID NO: 133482 - DNA, 2951 bp, Homo sapiens
  Payload ID: 6086
  Gene Symbol: FBXL5
  Gene Name: F-box and leucine-rich repeat protein 5
  ENST ID: ENST00000511441
  CDS Start-End: 55-387
gtctatggagaggcggcggccgcggctgctgaggcggaggctgaggcagtggcgatggcgccctttcctgaagaagtggacgtcttcaccgccccacactggcggatgaagcagctggtggggctctactgcgacaagctttctaaaaccaatttttccaacaacaacgatttccgtgctcttctgcagtctttgtatgctactttcaaggagttcaaaatgcatgagcagattgaaaatgaatacattattggtttgcttcaacaacgcagccagaccatttataatgtacattctgacaataaactctccgagatgcttagcctctttgaaaagggactgaagaatgttaagcctactactgttgactggaagccttaccaataacataaaacaatcgaataacaattatttcatgtattatatgtaaaatatatatactggattcttacagtaagaatgaatatgaacagttaaattatgcaaaacaactgaaagagagattggaggcttttacaagagattttcttcctcacatgaaagaggaagaggaggtttttcagcccatgttaatggaatattttacctatgaagagcttaaggatattaaaaagaaagtgattgcacaacactgctctcagaaggatactgcagaactccttagaggtcttagcctatggaatcatgctgaagagcgacagaagttttttaaatattccgtggatgaaaagtcagataaagaagcagaagtgtcagaacactccacaggtataacccatcttcctcctgaggtaatgctgtcaattttcagctatcttaatcctcaagagttatgtcgatgcagtcaagtaagcatgaaatggtctcagctgacaaaaacgggatcgctttggaaacatctttaccctgttcattgggccagaggtgactggtatagtggtcccgcaactgaacttgatactgaacctgatgatgaatgggtgaaaaataggaaagatgaaagtcgtgcttttcatgagtgggatgaagatgctgacattgatgaatctgaagagtctgcggaggaatcaattgctatcagcattgcacaaatggaaaaacgtttactccatggcttaattcataacgttctaccatatgttggtacttctgtaaaaaccttagtattagcatacagctctgcagtttccagcaaaatggttaggcagattttagagctttgtcctaacctggagcatctggatcttacccagactgacatttcagattctgcatttgacagttggtcttggcttggttgctgccagagtcttcggcatcttgatctgtctggttgtgagaaaatcacagatgtggccctagagaagatttccagagctcttggaattctgacatctcatcaaagtggctttttgaaaacatctacaagcaaaattacttcaactgcgtggaaaaataaagacattaccatgcagtccaccaagcagtatgcctgtttgcacgatttaactaacaagggcattggagaagaaatagataatgaacacccctggactaagcctgtttcttctgagaatttcacttctccttatgtgtggatgttagatgctgaagatttggctgatattgaagatactgtggaatggagacatagaaatgttgaaagtctttgtgtaatggaaacagcatccaactttagttgttccacctctggttgttttagtaaggacattgttggactaaggactagtgtctgttggcagcagcattgtgcttctccagcctttgcgtattgtggtcactcattttgttgtacaggaacagctttaagaactatgtcatcactcccagaatcttctgcaatgtgtagaaaagcagcaaggactagattgcctaggggaaaagacttaatttactttgggagtgaaaaatctgatcaagagactggacgtgtacttctgtttctcagtttatctggatgttatcagatcacagaccatggtctcagggttttgactctgggaggagggctgccttatttggagcaccttaatctctctggttgtcttactataactggtgcaggcctgcaggatttggtttcagcatgtccttctctgaatgatgaatacttttactactgtgacaacattaacggtcctcatgctgataccgccagtggatgccagaatttgcagtgtggttttcgagcctgctgccgctctggcgaatgacccttgacttctgatctttgtctacttcatttagctgagcaggctttctttcatgcactttactcatagcacatttcttgtgttaaccatccctttttgagcgtgacttgttttggccccatttcttacaacttcagaaatcttaatttaccagtgaattgtaatgttgtttctcttgcaaattatacttttggtttagaaagggattaggtcttttcaaaagggtgagaacagtcttacatttttcttttaaatgaaatgctttaaagaatgttggtaatgccatgtcatttaaagtatttcatagataattttgagttttaaagtccatggaggtgattggttctctttacacattaacactgtaccaagctttgcagatcttttccgacacacatgtctgaagacttattttcaaagacagcacatttttggaaactaatctcttttccgtaatatttcctttatttcaatgattctcagaaggccaattcaaacaaacccacatttaaggttctttaggattatagaataaattggcttctgagtgttagctcagtgagctaggaaagcaccaatcgatatttgtttcctttagggatactttgttctcaccactgtccctatgtcatcaaatttgggagagattttttaaaataccacaatcatttgaagaaatgtataaataaaatctactttgaggactttaccaagtaa

SEQ ID NO: 133483 - DNA, 2554 bp, Homo sapiens
  Payload ID: 6086
  Gene Symbol: FBXL5
  Gene Name: F-box and leucine-rich repeat protein 5
  ENST ID: ENST00000513163
  CDS Start-End: 1-1837
tgctactttcaaggagttcaaaatgcatgagcagattgaaaatgaatacattattggtttgcttcaacaacgcagccagaccatttataatgtacattctgacaataaactctccgagatgcttagcctctttgaaaagggactgaagaatgttaaggtttttcagcccatgttaatggaatattttacctatgaagagcttaaggatattaaaaagaaagtgattgcacaacactgctctcagaaggatactgcagaactccttagaggtcttagcctatggaatcatgctgaagagcgacagaagttttttaaatattccgtggatgaaaagtcagataaagaagcagaagtgtcagaacactccacaggtataacccatcttcctcctgaggtaatgctgtcaattttcagctatcttaatcctcaagagttatgtcgatgcagtcaagtaagcatgaaatggtctcagctgacaaaaacgggatcgctttggaaacatctttaccctgttcattgggccagaggtgactggtatagtggtcccgcaactgaacttgatactgaacctgatgatgaatgggtgaaaaataggaaagatgaaagtcgtgcttttcatgagtgggatgaagatgctgacattgatgaatctgaagagtctgcggaggaatcaattgctatcagcattgcacaaatggaaaaacgtttactccatggcttaattcataacgttctaccatatgttggtacttctgtaaaaaccttagtattagcatacagctctgcagtttccagcaaaatggttaggcagattttagagctttgtcctaacctggagcatctggatcttacccagactgacatttcagattctgcatttgacagttggtcttggcttggttgctgccagagtcttcggcatcttgatctgtctggttgtgagaaaatcacagatgtggccctagagaagatttccagagctcttggaattctgacatctcatcaaagtggctttttgaaaacatctacaagcaaaattacttcaactgcgtggaaaaataaagacattaccatgcagtccaccaagcagtatgcctgtttgcacgatttaactaacaagggcattggagaagaaatagataatgaacacccctggactaagcctgtttcttctgagaatttcacttctccttatgtgtggatgttagatgctgaagatttggctgatattgaagatactgtggaatggagacatagaaatgttgaaagtctttgtgtaatggaaacagcatccaactttagttgttccacctctggttgttttagtaaggacattgttggactaaggactagtgtctgttggcagcagcattgtgcttctccagcctttgcgtattgtggtcactcattttgttgtacaggaacagctttaagaactatgtcatcactcccagaatcttctgcaatgtgtagaaaagcagcaaggactagattgcctaggggaaaagacttaatttactttgggagtgaaaaatctgatcaagagactggacgtgtacttctgtttctcagtttatctggatgttatcagatcacagaccatggtctcagggttttgactctgggaggagggctgccttatttggagcaccttaatctctctggttgtcttactataactggtgcaggcctgcaggatttggtttcagcatgtccttctctgaatgatgaatacttttactactgtgacaacattaacggtcctcatgctgataccgccagtggatgccagaatttgcagtgtggttttcgagcctgctgccgctctggcgaatgacccttgacttctgatctttgtctacttcatttagctgagcaggctttctttcatgcactttactcatagcacatttcttgtgttaaccatccctttttgagcgtgacttgttttggccccatttcttacaacttcagaaatcttaatttaccagtgaattgtaatgttgtttctcttgcaaattatacttttggtttagaaagggattaggtcttttcaaaagggtgagaacagtcttacatttttcttttaaatgaaatgctttaaagaatgttggtaatgccatgtcatttaaagtatttcatagataattttgagttttaaagtccatggaggtgattggttctctttacacattaacactgtaccaagctttgcagatcttttccgacacacatgtctgaagacttattttcaaagacagcacatttttggaaactaatctcttttccgtaatatttcctttatttcaatgattctcagaaggccaattcaaacaaacccacatttaaggttctttaggattatagaataaattggcttctgagtgttagctcagtgagctaggaaagcaccaatcgatatttgtttcctttagggatactttgttctcaccactgtccctatgtcatcaaatttgggagagattttttaaaataccacaatcatttgaagaaatgtataaataaaatctactttgaggactttaccaagtaa

SEQ ID NO: 133484 - DNA, 595 bp, Homo sapiens
  Payload ID: 6086
  Gene Symbol: FBXL5
  Gene Name: F-box and leucine-rich repeat protein 5
  ENST ID: ENST00000503196
  CDS Start-End: 209-595
gagagtagccacctttccctcaggccatacacatggaaccattctttctccctacaagtcagcccataatagagcctctggttgaaaatcaagattttggtgttcacttggcaatatttactaagagctttctaaaaccaatttttccaacaacaacgatttccgtgctcttctgcagtctttgtatgctactttcaaggagttcaaaatgcatgagcagattgaaaatgaatacattattggtttgcttcaacaacgcagccagaccatttataatgtacattctgacaataaactctccgagatgcttagcctctttgaaaagggactgaagaatgttaagaatgaatatgaacagttaaattatgcaaaacaactgaaagagagattggaggcttttacaagagattttcttcctcacatgaaagaggaagaggaggtttttcagcccatgttaatggaatattttacctatgaagagcttaaggatattaaaaagaaagtgattgcacaacactgctctcagaaggatactgcagaactccttagaggtcttagcctatggaatcatgctgaagagcgacagaagtttttt

SEQ ID NO: 133485 - DNA, 550 bp, Homo sapiens
  Payload ID: 6086
  Gene Symbol: FBXL5
  Gene Name: F-box and leucine-rich repeat protein 5
  ENST ID: ENST00000512066
  CDS Start-End: 1-550
gatttccgtgctcttctgcagtctttgtatgctactttcaaggagttcaaaatgcatgagcagattgaaaatgaatacattattggtttgcttcaacaacgcagccagaccatttataatgtacattctgacaataaactctccgagatgcttagcctctttgaaaagggactgaagaatgttaagaatgaatatgaacagttaaattatgcaaaacaactgaaagagagattggaggcttttacaagagattttcttcctcacatgaaagaggaagaggaggtttttcagcccatgttaatggaatattttacctatgaagagcttaaggatattaaaaagaaagtgattgcacaacactgctctcagaaggatactgcagaactccttagaggtcttagcctatggaatcatgctgaagagcgacagaagttttttaaatattccgtggatgaaaagtcagataaagaagtgtcagaacactccacaggtataacccatcttcctcctgaggtaatgctgtcaattttcagctatcttaatcctcaag

SEQ ID NO: 133486 - DNA, 1785 bp, Homo sapiens
  Payload ID: 6087
  Gene Symbol: FBXL6
  Gene Name: F-box and leucine-rich repeat protein 6
  Uniprot ID: Q8N531
  ENST ID: ENST00000331890
  CDS Start-End: 66-1685
ggttgtcggtctataagcctcgcccgttccgctccctggggcttccccgagcgccgtcggtggtcatggctgccccagcctcccggcaggtccgacgcagagcccgggcagcgccgcggccccgctcggccgaggactggtggtgggaccggctggcgccgaggggctcggggtaccacctgctgcagtccgacagcatgctgctggtgctgtccgaacccggccccgcccggccccgcgcacagcggcgcgcttcccgccgcactccccggcagccgccccggggccccagcgccgcggccaagcccaaggccgggctcaggtccgaggcggcggccgcgcccgcacccgcaccggcacccacgcccacgcccgaggaagggcccgacgcgggctggggagaccgcattcccttggaaatcctggtgcagattttcgggttgttggtggcggcggacggccccatgcccttcctgggcagggctgcgcgcgtgtgccgccgctggcaggaggccgcttcccaacccgcgctctggcacaccgtgaccctgtcgtccccgctggtcggccggcctgccaagggcggggtcaaggcggagaagaagctccttgcttccctggagtggcttatgcccaatcggttttcacagctccagaggctgaccctcatccactggaagtctcaggtacaccccgtgttgaagctggtaggtgagtgctgtcctcggctcactttcctcaagctctccggctgccacggtgtgactgctgacgctctggtcatgctagccaaagcctgctgccagctccatagcctggacctacagcactccatggtggagtccacagctgtggtgagcttcttggaggaggcagggtcccgaatgcgcaagttgtggctgacctacagctcccagacgacagccatcctgggcgcactgctgggcagctgctgcccccagctccaggtcctggaggtgagcaccggcatcaaccgtaatagcattccccttcagctgcctgtcgaggctctgcagaaaggctgccctcagctccaggtgctgcggctgttgaacctgatgtggctgcccaagcctccgggacgaggggtggctcccggaccaggcttccctagcctagaggagctctgcctggcgagctcaacctgcaactttgtgagcaacgaggtcctgggccgcctactccacggctctcccaacctgcgcttactggatcttcgtggctgtgcgcgcatcacgccggctggccttcaggatctgccatgtcgggagctggagcagcttcatctgggcctgtatggcacgtcagaccggctgactctagccaaggagggcagcccctttttgacccagaagtggtgccatacactgcgagaactggacttgagtggccaggggttcagtgagaaggacctggagcaggccctggctgccttcttaagcacccctgggggctcacacccagccctgtgctctcttaacctcaggggcacccgggtcacaccaagcactgtcagctctgtgatcagcggctgcccgggcctgctctacctcaacctggagtcctgccgctgccttccccggggtctgaagcgggcctaccggggcctggaggaagtccagtggtgtctggagcagctgctcaccagcccctcacccagctaggcagccacagacctgggacacctcagccagcttgcccaccctccacctttgcccaatttcagatatttgagcattttgttaaaataaaacatttttagga

SEQ ID NO: 133487 - DNA, 1727 bp, Homo sapiens
  Payload ID: 6087
  Gene Symbol: FBXL6
  Gene Name: F-box and leucine-rich repeat protein 6
  Uniprot ID: Q8N531
  ENST ID: ENST00000455319
  CDS Start-End: 26-1627
gcttccccgagcgccgtcggtggtcatggctgccccagcctcccggcaggtccgacgcagagcccgggcagcgccgcggccccgctcggccgaggactggtggtgggaccggctggcgccgaggggctcggggtaccacctgctgcagtccgacagcatgctgctggtgctgtccgaacccggccccgcccggccccgcgcacagcggcgcgcttcccgccgcactccccggcagccgccccggggccccagcgccgcggccaagcccaaggccgggctcaggtccgaggcggcggccgcgcccgcacccgcaccggcacccacgcccacgcccgaggaagggcccgacgcgggctggggagaccgcattcccttggaaatcctggtgcagattttcgggttgttggtggcggcggacggccccatgcccttcctgggcagggctgcgcgcgtgtgccgccgctggcaggaggccgcttcccaacccgcgctctggcacaccgtgaccctgtcgtccccgctggtcggccggcctgccaagggcggggtcaaggcggagaagaagctccttgcttccctggagtggcttatgcccaatcggttttcacagctccagaggctgaccctcatccactggaagtctcagctggtaggtgagtgctgtcctcggctcactttcctcaagctctccggctgccacggtgtgactgctgacgctctggtcatgctagccaaagcctgctgccagctccatagcctggacctacagcactccatggtggagtccacagctgtggtgagcttcttggaggaggcagggtcccgaatgcgcaagttgtggctgacctacagctcccagacgacagccatcctgggcgcactgctgggcagctgctgcccccagctccaggtcctggaggtgagcaccggcatcaaccgtaatagcattccccttcagctgcctgtcgaggctctgcagaaaggctgccctcagctccaggtgctgcggctgttgaacctgatgtggctgcccaagcctccgggacgaggggtggctcccggaccaggcttccctagcctagaggagctctgcctggcgagctcaacctgcaactttgtgagcaacgaggtcctgggccgcctactccacggctctcccaacctgcgcttactggatcttcgtggctgtgcgcgcatcacgccggctggccttcaggatctgccatgtcgggagctggagcagcttcatctgggcctgtatggcacgtcagaccggctgactctagccaaggagggcagcccctttttgacccagaagtggtgccatacactgcgagaactggacttgagtggccaggggttcagtgagaaggacctggagcaggccctggctgccttcttaagcacccctgggggctcacacccagccctgtgctctcttaacctcaggggcacccgggtcacaccaagcactgtcagctctgtgatcagcggctgcccgggcctgctctacctcaacctggagtcctgccgctgccttccccggggtctgaagcgggcctaccggggcctggaggaagtccagtggtgtctggagcagctgctcaccagcccctcacccagctaggcagccacagacctgggacacctcagccagcttgcccaccctccacctttgcccaatttcagatatttgagcattttgttaaaataaaacatttttagga

SEQ ID NO: 133488 - DNA, 3960 bp, Homo sapiens
  Payload ID: 6088
  Gene Symbol: FBXL7
  Gene Name: F-box and leucine-rich repeat protein 7
  ENST ID: ENST00000329673
  CDS Start-End: 2-1351
agactccgacctgagcatgcgcacactgagcacgcccagcccagccctgatatgtccaccgaatctcccaggatttcagaatggaaggggctcgtccacctcctcgtcctccatcaccggggagacggtggccatggtgcactccccgcccccgacccgcctcacacacccgctcatccggctcgcctccagaccccagaaggagcaggccagcatagaccggctcccggaccactccatggtgcagatcttctccttcctgcccaccaaccagctgtgccgctgcgcgcgagtgtgccgccgctggtacaacctggcctgggacccgcggctctggaggactatccgcctgacgggcgagaccatcaacgtggaccgcgccctcaaggtgctgacccgcagactctgccaggacacccccaacgtgtgtctcatgctggaaaccgtaactgtcagtggctgcaggcggctcacagaccgagggctgtacaccatcgcccagtgctgccccgaactgaggcgactggaagtctcaggctgttacaatatctccaacgaggccgtctttgatgtggtgtccctctgccctaatctggagcacctggatgtgtcaggatgctccaaagtgacctgcatcagcttgacccgggaggcctccattaaactgtcacccttgcatggcaaacagatttccatccgctacctggacatgacggactgcttcgtgctggaggacgaaggcctgcacaccatcgcggcgcactgcacgcagctcacccacctctacctgcgccgctgcgtccgcctgaccgacgaaggcctgcgctacctggtgatctactgcgcctccatcaaggagctgagcgtcagcgactgccgcttcgtcagcgacttcggcctgcgggagatcgccaagctggagtcccgcctgcggtacctgagcatcgcgcactgcggccgggtcaccgacgtgggcatccgctacgtggccaagtactgcagcaagctgcgctacctcaacgcgaggggctgcgagggcatcacggaccacggtgtggagtacctcgccaagaactgcaccaaactcaaatccctggatatcggcaaatgccctttggtatccgacacgggcctggagtgcctggccctgaactgcttcaacctcaagcggctcagcctcaagtcctgcgagagcatcaccggccagggcttgcagatcgtggccgccaactgctttgacctccagacgctgaatgtccaggactgcgaggtctccgtggaggccctgcgctttgtcaaacgccactgcaagcgctgcgtcatcgagcacaccaacccggctttcttctgaagggacagagttcatccggcgttgtattcacacaaacctgaacaaagcaaatttttttaaaagcagcgtatgtaagcaccgacacccactcaaaacagctctttcttccgggaaggttattaggaatctggcctttatttttcctcatttctcatgggcaacagaggccaaagaaacgaagcaagacaaacagcaaacaggcattttggtcaggtcatttgtaggcagtttctcttctcacaaaagatgtacttaagcaggctgatcgctgttccttgagcaaggcgcttactctcctccgctcaggcccccaaggccgccctttccctcgcacacaggccccacccccacagttccacgccccccccccaaggccacaccctccctccctagagcagcagcgaggatccatcatcagaatcacagtgctctccagacctcctctctaaactgcttcattgacctaagtcactctcttcaatcccacacccatggacattcttgtcaactcaataccatagcactttgcataggcaaaatacttttcaggcctttttaaaaaattcattacagcaaacagctggggaaggacatgcagtcctcccccagctctgtcaatgactatgaccttggccaaagcacttcactgctctgggctgcagcttccagcactgaatcagaggccacacagcccaaagattagcttcatgtccattatagcattgagggagcagagatacccatacacagaagcaccttggcatagagcacccaggcatcgacctcttccaggagaactgattctgtggatggatgtgatttcaggagattgtgcagtgccagcatcagtgcataaagggtcctgtatgtcctttggctgcaaatcacccacttccctgtgtttcagtgggagaatttcctctcccacctcctcacatcctcttttgccaggctggatgctgtcgtctctgtacacaaatactttctgcattcccccctccacaccatcctagcgaggcaccagcacacctaatcacagcaaagcccagatccccccatcagttgcttttactcagtgttttcaaataggagtaaaggcccttgcaatttttaattaacaagcaaggcccaagggaacacatgtcctcaaaagtttttctgatccctcgccttgcacacctggcatgcatcaggcacatctgtcctacagctggcagagacagatgcctcggttctttgtcattcagattgcatttgacctcttctcatctatttatttctttatacatccagacttcatcacatgaagcctattggggttaagtttgtaagtgtttaattgtgcaaattgccaccctgtgtacctcctccatgtctgtctgcgtgttttccaccaaagaatgcaaagcagacttccaggtgtttaaattctgttcactcaacaatgccagatgaatggaagagggaacacactgagatgacttagactctggtccaccaaccagacccttggaaaggaatactaaaatcattacaaggtatggattttaaatggatgaaacttcaaattatcttatttggatagaagtctatattctagcctcatttgcatgaagtcagatagccagaagaaattccattgctggttttcacgaaattcacttgtcttttgctaataaacacatggccctttcccagattattctctagccaagccccacctttgttacgttgaaatccctcatttattttcttctcaaaatgcccattatccaaatgcagaacctctgcatctccaagccagttatgctgaatttgtcaaacttagacacccttgacaactgcactcctactgtaggctcctgtgcatactgtcgtcttctgtgggggatggagaggttagtgtgatgaggtggtgtctgcccaggaggtttctttcaaacatcatggcctcccatccaatcaacatcatcaaattacatgtgtaatcaaggctctgtgccatgggggaaatgaatcatttagctaggccaggatctagtgaaagccacagagtttaaaaccatgaaagaagttgaaggcagcattcctcagctctgtgacttgtgaccctatttgaagtttcaggatttgggtgtcacaaaggattgtccctaatccttggccctggggtcttccgagtgagctggtttaatactctgagaatgagcagggagatccagagaatgaatccctgaccgcatcacctaaactgtcttccaaacatgagacaaagctgactgttcacactgattgcccagcacataccgtcttgccagtttcttcttttctcccagtctcctgttcatccattctgttctcccttggggtgggaatctatgatggaggttactggggaaacagctcagcagatttttggagaccaaaccaaaggtctcactaggaaatttatctgttttaaaacattgcttccttcctggctctgctaaattgaatgctcattgtttgttgttgttgttttttaattctaatgttcaaatcactgcgtgctgtatgaatctagaaagccttaatttactaccaagaaataaagcaatatgttcgtaatc

SEQ ID NO: 133489 - DNA, 4562 bp, Homo sapiens
  Payload ID: 6088
  Gene Symbol: FBXL7
  Gene Name: F-box and leucine-rich repeat protein 7
  Uniprot ID: Q9UJT9
  ENST ID: ENST00000504595
  CDS Start-End: 482-1957
tcactcgctccggggacccgcaacaagtggccgccgcgccctccccggggaagccgcgggcgcgcaggggcagccgaaggaggcggtcgagccgcggagcccaggggcctgcccggctcagcgcccaccggaggggatcggggcgggcggatggggacccggcggcggcggcgcggtgagcctctgggcggccccggggcgcgggctgtgcgcggcgctgcgcccgccggcccccagcgcggattgtaagtgctgcagctgtgcccggccccgcctggagccaccgggggtgccaggaggggacgcagcaccccctcccactggagtgcggggacctctccaggccggaggtcggccccggagcttgggggggatgtgcagctaacggtcccgtcgggcgggctttcctcgggccgagcgcgcaggacgtgcgccgcagctatggagtgtcccgggagacggcgggcatgacggctacaggatgggcgcgaacaatggcaaacagtacggcagtgagggcaaaggcagctcgagcatctcatctgacgtgagttcaagtacagatcacacgcccactaaagcccagaagaatgtggctaccagcgaagactccgacctgagcatgcgcacactgagcacgcccagcccagccctgatatgtccaccgaatctcccaggatttcagaatggaaggggctcgtccacctcctcgtcctccatcaccggggagacggtggccatggtgcactccccgcccccgacccgcctcacacacccgctcatccggctcgcctccagaccccagaaggagcaggccagcatagaccggctcccggaccactccatggtgcagatcttctccttcctgcccaccaaccagctgtgccgctgcgcgcgagtgtgccgccgctggtacaacctggcctgggacccgcggctctggaggactatccgcctgacgggcgagaccatcaacgtggaccgcgccctcaaggtgctgacccgcagactctgccaggacacccccaacgtgtgtctcatgctggaaaccgtaactgtcagtggctgcaggcggctcacagaccgagggctgtacaccatcgcccagtgctgccccgaactgaggcgactggaagtctcaggctgttacaatatctccaacgaggccgtctttgatgtggtgtccctctgccctaatctggagcacctggatgtgtcaggatgctccaaagtgacctgcatcagcttgacccgggaggcctccattaaactgtcacccttgcatggcaaacagatttccatccgctacctggacatgacggactgcttcgtgctggaggacgaaggcctgcacaccatcgcggcgcactgcacgcagctcacccacctctacctgcgccgctgcgtccgcctgaccgacgaaggcctgcgctacctggtgatctactgcgcctccatcaaggagctgagcgtcagcgactgccgcttcgtcagcgacttcggcctgcgggagatcgccaagctggagtcccgcctgcggtacctgagcatcgcgcactgcggccgggtcaccgacgtgggcatccgctacgtggccaagtactgcagcaagctgcgctacctcaacgcgaggggctgcgagggcatcacggaccacggtgtggagtacctcgccaagaactgcaccaaactcaaatccctggatatcggcaaatgccctttggtatccgacacgggcctggagtgcctggccctgaactgcttcaacctcaagcggctcagcctcaagtcctgcgagagcatcaccggccagggcttgcagatcgtggccgccaactgctttgacctccagacgctgaatgtccaggactgcgaggtctccgtggaggccctgcgctttgtcaaacgccactgcaagcgctgcgtcatcgagcacaccaacccggctttcttctgaagggacagagttcatccggcgttgtattcacacaaacctgaacaaagcaaatttttttaaaagcagcgtatgtaagcaccgacacccactcaaaacagctctttcttccgggaaggttattaggaatctggcctttatttttcctcatttctcatgggcaacagaggccaaagaaacgaagcaagacaaacagcaaacaggcattttggtcaggtcatttgtaggcagtttctcttctcacaaaagatgtacttaagcaggctgatcgctgttccttgagcaaggcgcttactctcctccgctcaggcccccaaggccgccctttccctcgcacacaggccccacccccacagttccacgccccccccccaaggccacaccctccctccctagagcagcagcgaggatccatcatcagaatcacagtgctctccagacctcctctctaaactgcttcattgacctaagtcactctcttcaatcccacacccatggacattcttgtcaactcaataccatagcactttgcataggcaaaatacttttcaggcctttttaaaaaattcattacagcaaacagctggggaaggacatgcagtcctcccccagctctgtcaatgactatgaccttggccaaagcacttcactgctctgggctgcagcttccagcactgaatcagaggccacacagcccaaagattagcttcatgtccattatagcattgagggagcagagatacccatacacagaagcaccttggcatagagcacccaggcatcgacctcttccaggagaactgattctgtggatggatgtgatttcaggagattgtgcagtgccagcatcagtgcataaagggtcctgtatgtcctttggctgcaaatcacccacttccctgtgtttcagtgggagaatttcctctcccacctcctcacatcctcttttgccaggctggatgctgtcgtctctgtacacaaatactttctgcattcccccctccacaccatcctagcgaggcaccagcacacctaatcacagcaaagcccagatccccccatcagttgcttttactcagtgttttcaaataggagtaaaggcccttgcaatttttaattaacaagcaaggcccaagggaacacatgtcctcaaaagtttttctgatccctcgccttgcacacctggcatgcatcaggcacatctgtcctacagctggcagagacagatgcctcggttctttgtcattcagattgcatttgacctcttctcatctatttatttctttatacatccagacttcatcacatgaagcctattggggttaagtttgtaagtgtttaattgtgcaaattgccaccctgtgtacctcctccatgtctgtctgcgtgttttccaccaaagaatgcaaagcagacttccaggtgtttaaattctgttcactcaacaatgccagatgaatggaagagggaacacactgagatgacttagactctggtccaccaaccagacccttggaaaggaatactaaaatcattacaaggtatggattttaaatggatgaaacttcaaattatcttatttggatagaagtctatattctagcctcatttgcatgaagtcagatagccagaagaaattccattgctggttttcacgaaattcacttgtcttttgctaataaacacatggccctttcccagattattctctagccaagccccacctttgttacgttgaaatccctcatttattttcttctcaaaatgcccattatccaaatgcagaacctctgcatctccaagccagttatgctgaatttgtcaaacttagacacccttgacaactgcactcctactgtaggctcctgtgcatactgtcgtcttctgtgggggatggagaggttagtgtgatgaggtggtgtctgcccaggaggtttctttcaaacatcatggcctcccatccaatcaacatcatcaaattacatgtgtaatcaaggctctgtgccatgggggaaatgaatcatttagctaggccaggatctagtgaaagccacagagtttaaaaccatgaaagaagttgaaggcagcattcctcagctctgtgacttgtgaccctatttgaagtttcaggatttgggtgtcacaaaggattgtccctaatccttggccctggggtcttccgagtgagctggtttaatactctgagaatgagcagggagatccagagaatgaatccctgaccgcatcacctaaactgtcttccaaacatgagacaaagctgactgttcacactgattgcccagcacataccgtcttgccagtttcttcttttctcccagtctcctgttcatccattctgttctcccttggggtgggaatctatgatggaggttactggggaaacagctcagcagatttttggagaccaaaccaaaggtctcactaggaaatttatctgttttaaaacattgcttccttcctggctctgctaaattgaatgctcattgtttgttgttgttgttttttaattctaatgttcaaatcactgcgtgctgtatgaatctagaaagccttaatttactaccaagaaataaagcaatatgttcgt

SEQ ID NO: 133490 - DNA, 1758 bp, Homo sapiens
  Payload ID: 6088
  Gene Symbol: FBXL7
  Gene Name: F-box and leucine-rich repeat protein 7
  Uniprot ID: Q9UJT9
  ENST ID: ENST00000510662
  CDS Start-End: 391-1725
ataaaaccgtagcgttgtatcccaattagcagctagcccctgatacgcataaggcaaaggcatttttctgcagttcaaaagttaagaaggtttgtgtctagtggtcttggctgaagaggagtggaagagaccgggtcagttttacagcccgcccccagaggacagttggttacaaaggaggggccagcgcttgcagactggtaggaatgcaggctagctattcagcctgtggcctggaggaaactcttatcatcctgttcgaaactttgagctgtggccacagaatgcaaaggcagctcgagcatctcatctgacgtgagttcaagtacagatcacacgcccactaaagcccagaagaatgtggctaccagcgaagactccgacctgagcatgcgcacactgagcacgcccagcccagccctgatatgtccaccgaatctcccaggatttcagaatggaaggggctcgtccacctcctcgtcctccatcaccggggagacggtggccatggtgcactccccgcccccgacccgcctcacacacccgctcatccggctcgcctccagaccccagaaggagcaggccagcatagaccggctcccggaccactccatggtgcagatcttctccttcctgcccaccaaccagctgtgccgctgcgcgcgagtgtgccgccgctggtacaacctggcctgggacccgcggctctggaggactatccgcctgacgggcgagaccatcaacgtggaccgcgccctcaaggtgctgacccgcagactctgccaggacacccccaacgtgtgtctcatgctggaaaccgtaactgtcagtggctgcaggcggctcacagaccgagggctgtacaccatcgcccagtgctgccccgaactgaggcgactggaagtctcaggctgttacaatatctccaacgaggccgtctttgatgtggtgtccctctgccctaatctggagcacctggatgtgtcaggatgctccaaagtgacctgcatcagcttgacccgggaggcctccattaaactgtcacccttgcatggcaaacagatttccatccgctacctggacatgacggactgcttcgtgctggaggacgaaggcctgcacaccatcgcggcgcactgcacgcagctcacccacctctacctgcgccgctgcgtccgcctgaccgacgaaggcctgcgctacctggtgatctactgcgcctccatcaaggagctgagcgtcagcgactgccgcttcgtcagcgacttcggcctgcgggagatcgccaagctggagtcccgcctgcggtacctgagcatcgcgcactgcggccgggtcaccgacgtgggcatccgctacgtggccaagtactgcagcaagctgcgctacctcaacgcgaggggctgcgagggcatcacggaccacggtgtggagtacctcgccaagaactgcaccaaactcaaatccctggatatcggcaaatgccctttggtatccgacacgggcctggagtgcctggccctgaactgcttcaacctcaagcggctcagcctcaagtcctgcgagagcatcaccggccagggcttgcagatcgtggccgccaactgctttgacctccagacgctgaatgtccaggactgcgaggtctccgtggaggccctgcgctttgtcaaacgccactgcaagcgctgcgtcatcgagcacaccaacccggctttcttctgaagggacagagttcatccggcgttgtattcacac

SEQ ID NO: 133491 - DNA, 1658 bp, Homo sapiens
  Payload ID: 6089
  Gene Symbol: FBXL8
  Gene Name: F-box and leucine-rich repeat protein 8
  Uniprot ID: Q96CD0
  ENST ID: ENST00000258200
  CDS Start-End: 178-1302
cctagcccgagccgccccgtccgcccgcgcgtcccgccccgcgggctcccggtggctgcttcccgtccgctgtcctctgctgccagtcccctgccccgggcaaagcccatctggtccgccgagcaggccggagctattgggagtggcggatcctcccaccccagccggatctgggccatggccgagcctggagagggactgccagaggaggtgctggcactcatcttccgccacctgtccctgagagaccgtgctgccgccgccagggtctgcagggcctgggccgccgctgctacctgcagcgccgtgtggcacgacacaaaaatcagttgcgaatgtgagctggaaggcatgctgccaccttatctgtccgcctgcctcgaccacattcacaacctacggctggaatttgagccatcgaggaagccgagccgccgggcggccatcgagctgctgatggttctggcgggccgtgccccggggctgcgaggcctgcgcctggagtgccgcggagaaaaaccgctcttcgacgcgggccgcgacgtcctggaggctgtgcacgctgtatgcggggcggccagccagctacgccacctcgacctgcggcgcttgtccttcacactggacgacgcgctggtgctgcaggcggcgcgcagctgtcccgagctccacagcctttttctggacaacagtaccctagtgggcagcgtgggtcccggctcagtgctcgagctactggaggcctgcccgcgcctgcgcgctctcggcctgcacctagccagtttgtcgcacgccatcctcgaagcactggcggcgccagaccgagcgcctttcgcgctcttggctctgcggtgcgcgtgccccgaagatgcacgcgcgtccccgctgcccaacgaagcctgggtcgcgttgcgccgccgccaccctgggctggcagtggagctggagctggagcccgcgctgcccgctgagagcgtgacgcgcgtcctgcagccagccgtccccgtggctgcgctgcgcctcaacctctcaggcgacaccgtaggcccagtgcgcttcgcagcacaccactacgccgcaaccctgtgcgcgctcgaggtgcgcgcagccgcttcggccgagctgaacgccgcgctggaggagctggcggcgcgctgcgcggccctgcgcgaggtgcattgtttctgcgtggtgagccactcggtgctggacgccttccgcgcgcactgcccgcgcctgcgcacctataccctcaagctcacgcgcgagccgcatccctggaggcctacgctcgtggcgtgattgggcgacttctctcccccgtccccgtggacgtaagcgctctgagagggaacggggggggtgtccaggcgcgccccgagtgctagtgccttcttttgggattgttgccccccgggtctttaccgagttgggaactgtgatggcatcgggaccagtcctgggcgccctgagaccactcgctgctctcaccctctgcagacgccccacccgctcggtcctggacacactgcccccctctcttgcctccacccctctgcggactctgcagctccgcggccccggcgcagggagagggagggcacgggcgcgggccgggcctcaagggtgagtgtgaaataaacaaatcctgcagtgtt

SEQ ID NO: 133492 - DNA, 574 bp, Homo sapiens
  Payload ID: 6089
  Gene Symbol: FBXL8
  Gene Name: F-box and leucine-rich repeat protein 8
  ENST ID: ENST00000521920
  CDS Start-End: 104-292
ctctgctgccagtcccctgccccgggcaaagcccatctggtccgccgagcaggccggagctattgggagtggcggatcctcccaccccagccggatctgggccatggccgagcctggagagggactgccagaggaggtgctggcactcatcttccgccacctgtccctgagagaccgtgctgccgccgccagggtctgcagggcctgggccgccgctgctacctgcagcgccgtgtggcacgacacaaaaatcaggtttcatcctgtggcagacgccactgaaatcttctaaaaggataggatgcgagttccctcctttggggcaacagtcgtggtctgaacagagacgtggggagggaggcaggaaatgggatggcagctggaaccccagctaaggggtgggtagaggcttctccgctggtcgcagggactcagctgaggccttttctgcacggctctaacccaagttgcgaatgtgagctggaaggcatgctgccaccttatctgtccgcctgcctcgaccacattcacaacctacggctggaatttgagccatcgaggaagccgagccgcc

SEQ ID NO: 133493 - DNA, 559 bp, Homo sapiens
  Payload ID: 6089
  Gene Symbol: FBXL8
  Gene Name: F-box and leucine-rich repeat protein 8
  ENST ID: ENST00000523893
  CDS Start-End: 174-559
actttctactaaccggcggggttaagatggggtttctcaggccgggcgcggtggctcatgcccgtaatcccagcactttgggaggcccaggcgggccgatcgcttgagcctaggagttcgaggccggagctattgggagtggcggatcctcccaccccagccggatctgggccatggccgagcctggagagggactgccagaggaggtgctggcactcatcttccgccacctgtccctgagagaccgtgctgccgccgccagggtctgcagggcctgggccgccgctgctacctgcagcgccgtgtggcacgacacaaaaatcagttgcgaatgtgagctggaaggcatgctgccaccttatctgtccgcctgcctcgaccacattcacaacctacggctggaatttgagccatcgaggaagccgagccgccgggcggccatcgagctgctgatggttctggcgggccgtgccccggggctgcgaggcctgcgcctggagtgccgcggagaaaaaccgctcttcgacgcgggccgcgacgtcctggaggctgtgcacgc

SEQ ID NO: 133494 - DNA, 699 bp, Homo sapiens
  Payload ID: 6089
  Gene Symbol: FBXL8
  Gene Name: F-box and leucine-rich repeat protein 8
  ENST ID: ENST00000519945
  CDS Start-End: 160-363
gtccgcccgcgcgtcccgccccgcgggctcccggtggctgcttcccgtccgctgtcctctgctgccagtcccctgccccgggcaaagcccatctggtccgccgagcaggccggagctattgggagtggcggatcctcccaccccagccggatctgggccatggccgagcctggagagggactgccagaggaggtgctggcactcatcttccgccacctgtccctgagagaccgtgctgccgccgccagggtctgcagggcctgggccgccgctgctacctgcagcgccgtgtggcacgacacaaaaatcagccagccgtccccgtggctgcgctgcgcctcaacctctcaggcgacaccgtaggcccagtgcgcttcgcagcacaccactacgccgcaaccctgtgcgcgctcgaggtgcgcgcagccgcttcggccgagctgaacgccgcgctggaggagctggcggcgcgctgcgcggccctgcgcgaggtgcattgtttctgcgtggtgagccactcggtgctggacgccttccgcgcgcactgcccgcgcctgcgcacctataccctcaagctcacgcgcgagccgcatccctggaggcctacgctcgtggcgtgattgggcgacttctctcccccgtccccgtggacacgccccacccgctcggtcctggacacactgcccccctctcttgcct

SEQ ID NO: 133495 - DNA, 586 bp, Homo sapiens
  Payload ID: 6089
  Gene Symbol: FBXL8
  Gene Name: F-box and leucine-rich repeat protein 8
  ENST ID: ENST00000519378
  CDS Start-End: 98-586
aacactttgcgccttcccgacctcagagacgtccgtctctctccaggccggagctattgggagtggcggatcctcccaccccagccggatctgggccatggccgagcctggagagggactgccagaggaggtgctggcactcatcttccgccacctgtccctgagagaccgtgctgccgccgccagggtctgcagggcctgggccgccgctgctacctgcagcgccgtgtggcacgacacaaaaatcagttgcgaatgtgagctggaaggcatgctgccaccttatctgtccgcctgcctcgaccacattcacaacctacggctggaatttgagccatcgaggaagccgagccgccgggcggccatcgagctgctgatggttctggcgggccgtgccccggggctgcgaggcctgcgcctggagtgccgcggagaaaaaccgctcttcgacgcgggccgcgacgtcctggaggctgtgcacgctgtatgcggggcggccagccagctacgccacctcgacctgcggcgcttgtccttcacactggacgacgcgctggtgctgcaggcggcgcgcagctgtcccgag

SEQ ID NO: 133496 - DNA, 1460 bp, Homo sapiens
  Payload ID: 6089
  Gene Symbol: FBXL8
  Gene Name: F-box and leucine-rich repeat protein 8
  Uniprot ID: Q96CD0
  ENST ID: ENST00000519917
  CDS Start-End: 148-1272
gtcccgccccgcgggctcccggtggctgcttcccgtccgctgtcctctgctgccagtcccctgccccgggcaaagcccatctggtccgccgagcaggccggagctattgggagtggcggatcctcccaccccagccggatctgggccatggccgagcctggagagggactgccagaggaggtgctggcactcatcttccgccacctgtccctgagagaccgtgctgccgccgccagggtctgcagggcctgggccgccgctgctacctgcagcgccgtgtggcacgacacaaaaatcagttgcgaatgtgagctggaaggcatgctgccaccttatctgtccgcctgcctcgaccacattcacaacctacggctggaatttgagccatcgaggaagccgagccgccgggcggccatcgagctgctgatggttctggcgggccgtgccccggggctgcgaggcctgcgcctggagtgccgcggagaaaaaccgctcttcgacgcgggccgcgacgtcctggaggctgtgcacgctgtatgcggggcggccagccagctacgccacctcgacctgcggcgcttgtccttcacactggacgacgcgctggtgctgcaggcggcgcgcagctgtcccgagctccacagcctttttctggacaacagtaccctagtgggcagcgtgggtcccggctcagtgctcgagctactggaggcctgcccgcgcctgcgcgctctcggcctgcacctagccagtttgtcgcacgccatcctcgaagcactggcggcgccagaccgagcgcctttcgcgctcttggctctgcggtgcgcgtgccccgaagatgcacgcgcgtccccgctgcccaacgaagcctgggtcgcgttgcgccgccgccaccctgggctggcagtggagctggagctggagcccgcgctgcccgctgagagcgtgacgcgcgtcctgcagccagccgtccccgtggctgcgctgcgcctcaacctctcaggcgacaccgtaggcccagtgcgcttcgcagcacaccactacgccgcaaccctgtgcgcgctcgaggtgcgcgcagccgcttcggccgagctgaacgccgcgctggaggagctggcggcgcgctgcgcggccctgcgcgaggtgcattgtttctgcgtggtgagccactcggtgctggacgccttccgcgcgcactgcccgcgcctgcgcacctataccctcaagctcacgcgcgagccgcatccctggaggcctacgctcgtggcgtgattgggcgacttctctcccccgtccccgtggacacgccccacccgctcggtcctggacacactgcccccctctcttgcctccacccctctgcggactctgcagctccgcggccccggcgcagggagagggagggcacgggcgcgggccgggcctcaagggtgagtgtgaaataaacaaatcctgcagtg

SEQ ID NO: 133497 - DNA, 543 bp, Homo sapiens
  Payload ID: 6089
  Gene Symbol: FBXL8
  Gene Name: F-box and leucine-rich repeat protein 8
  ENST ID: ENST00000517382
  CDS Start-End: 136-543
gggctcccggtggctgcttcccgtccgctgtcctctgctgccagtcccctgccccgggcaaagcccatctggtccgccgagcaggccggagctattgggagtggcggatcctcccaccccagccggatctgggccatggccgagcctggagagggactgccagaggaggtgctggcactcatcttccgccacctgtccctgagagaccgtgctgccgccgccagggtctgcagggcctgggccgccgctgctacctgcagcgccgtgtggcacgacacaaaaatcagacgccccacccgctcggtcctggacacactgcccccctctcttgcctccacccctctgcggactctgcagctccgcggccccggcgcagggagagggagggcacgggcgcgggccgggcctcaagggacttgcccagcccacaccaggtcgcgcaccggcgatttctcctgtagaacaaagaaggaaatagagggaccgagaggggtgggactcgaacccaagtctcccactcatctcaccccaccccaccccact

SEQ ID NO: 133498 - DNA, 1054 bp, Homo sapiens
  Payload ID: 6089
  Gene Symbol: FBXL8
  Gene Name: F-box and leucine-rich repeat protein 8
  ENST ID: ENST00000518148
  CDS Start-End: 177-332
ctagcccgagccgccccgtccgcccgcgcgtcccgccccgcgggctcccggtggctgcttcccgtccgctgtcctctgctgccagtcccctgccccgggcaaagcccatctggtccgccgagcaggccggagctattgggagtggcggatcctcccaccccagccggatctgggccatggccgagcctggagagggactgccagaggaggtgctggcactcatcttccgccacctgtccctgagagaccgtgctgccgccgccagggtctgcagggcctgggccgccgctgctacctgcagcgccgtgtggcacgacacaaaaatcaggtgagcctgctcctccacactcctctccccaccgcccactcaccttctccgtggagtcgtgggctaggtagatattcaggttgactcccccatattaaaaaataattgctggccgggcgtggtggctcatgcctgtaatcccagcactttggcaggccgaggcgggtggatcacctgaggtcaggagtttgagaccagcctggccaccatgctgaaaccccgtctctactaaaatacaaaaactagccgggcatggtggtgggcgcctataattctagctactcgggaggctgaggcacaagaatcgcttgaacccgggaggcaaaggttgcagtgagccgagatggcaccactgcactccagcttggcgacagagtaacagtttatctcaaaataataataataattgctgacgtattgactgcctagtatataccaaccattgtttttaagtgccttacatatattaactaatttaatccttatgaaaaccttgtgtggtagataggtattatcattacctccattgcccagataggaaactgaggcaaagagacttaatcacttcccacgggtcactcagctagggaatggcagaggcagaattcgaacctagcagtccggaggccatgccaagactccttagagacagctgagaaagcccagttcctaaaatatcattggctctccatgtccaggtttcatcctgtggcagacgccactgaa

SEQ ID NO: 133499 - DNA, 3221 bp, Homo sapiens
  Payload ID: 6090
  Gene Symbol: FBXW10
  Gene Name: F-box and WD repeat domain containing 10
  Uniprot ID: Q5XX13
  ENST ID: ENST00000301938
  CDS Start-End: 171-3170
gagagagataggctttccatccatggcagccatttacttttgctctgggagacgtttgtaatagaaaaggcacaactggggtatttattcattccccccgttcctctagtgtttggtggcgttgccgttgcaagtgcgcagggctaaaatggactggttatcttaggatcatggaaaacctggaatcaaggctcaagaatgccccctattttcgttgtgagaagggaaccgattccatccctctatgccggaagtgtgagacgtgtgtcttagcctggaagatcttctctaccaaagagtggttctgcaggatcaatgacatatcacagaggaggtttctagttggcattctgaagcagttaaatagcttatatttgttacactatttccaaaatatccttcagaccacacagggaaaggatttcatctataacaggtcccggatcaacctcagcaagaaagaggggaaagttgtgaagtcctccttgaaccaaatgttggataaaacagtagaacagaagatgaaagagatcttgtactggtttgcgaacagcacccagtggaccaaggcgaattatactctcttactgctgcagatgtgcaaccccaaattactgctcactgctgccaatgtgatcagagtcctgtttctgagagaggagaacaatatctcagggctcaatcaagacatcacagatgtgtgtttttcccctgagaaagaccacagctccaagtctgcgacctcacaagtctattggacagccaaaactcagcacacatcccttcctttgtccaaagccccagaaaatgaacacttgcttggggcagcatctaaccctgaggaaccatggaggaattcactccggtgtatatccgaaatgaataggctgttttctggaaaaggagacataaccaagccagggtacgatccctgcaatctattggttgacctggatgacatcagagacctgtcttctgggttcagcaaataccgagacttcatccgttacctgcccatccacctctccaagtacattctaagaatgctggatagacacaccctgaacaagtgcgcctctgtgagccagcactgggccgccatggctcaacaggtcaagatggacttgtcagcgcacggcttcattcagaaccagattaccttcttgcaggggtcctacacaagaggaattgatcctaattatgccaataaggtttctatcccagttcctaaaatggtagatgacgggaagagcatgcgtgtgaaacatccgaagtggaagctgagaacgaagaatgagtacaacctgtggactgcataccagaacgaggaaacgcagcaggtcctgatagaggagagaaatgttttctgtgggacctacaatgttcgcattctctctgacacgtgggatcaaaaccgagtcatccactattccgggggagatctgatagctgtgtcatctaatcgaaagatccatcttctggacatcatacaagtgaaagcgatacccgttgaattccgaggccatgctgggagtgtccgggccctcttcctgtgtgaggaggaaaactttctcctaagcgggagctatgacctaagtatcagatactgggatctgaaaagtggggtttgcacacgaatcttcggtggtcaccaggggactatcacttgcatggacttgtgtaagaacaggctcgtatctggaggaagagattgccaggtaaaagtatgggatgtagacacagggaagtgcctgaagacgtttagacacaaagaccccatcttggccaccaggatcaatgatacctacattgtgagcagctgtgagcgagggctggtgaaagtgtggcacattgccatggcccagttggtaaagactctcagtggccatgagggagccgtgaaatgcctgttctttgaccagtggcatctcctctcaggaagtactgatggcctggtcatggcctggagcatggtggggaagtacgagcgctgcctgatggccttcaagcatcccaagatggtggtcaacacagagagcaatgttctcatgttccagtttgagcacataaagtggcagtatgccgtggaaaaaacgaaacaaaagaagaataaggagaaagaggaggaaaaagaagaaaatagtctcatggaaattctctctaagtgtaatattcaggttcacagcccaagagagtctgtatccagtaaacaaactgtgatccaagagctcctaccaggcaaacctcccaagtcccgagtactcctgaagccggccaagttctcttcagcagtgttaatagaggaacttcaaagtcaaggaaagtcaaaatcaccccgaagagatgcagatgatgtggagaaagcacaaaaacaaggacaattggaaactcctggaaaactgcccagtcacccaaagaaaaagtcttggaaaatccctatgtcacctgaccaattcctcctgactgttagcgccctgcagcacgcccataattccggggaatttgcctatccctgtaggccccaaacagaaattactgatgtctggggaccttcaatttcatacccaaggaaggtcttgaatttcaaaggaaaatcaatccaacgtgcagttgatcggttgagattgagcaatcctcctatagatgtgaaacgaaccagtattccccttgaaatccagaaactgcagcccaacttgaagatctctttgcacagtcctagagtccagtccaccataccccagcccatgattatccgctccaggttctctggcagcttaaagggtggagaccaagtgaccagttcaattgaaagggctgtgtgcagtacgggtcccctgaccagtatgcaggtcattaaaccaaaccgcatgctagctccacaagtgggcacagccaccctgtctcttaagaaagaacggcctcgcatctatacagcccttgatccttttagagtgaacactgagttcgtgctgttgaccgtgaaggaggagaaggagcaccaggaagccaagatgaaggaatatcaggccagggagtccactggagtggttgatccaggaaaagtcagcaaagctgcatggatcaggaagatcaaaggcctgcctattgataatttcacgaagcaagggaaaacagcggcccctgaacttggacaaaatgtatttatctaaaccagccttgggaaattacaatgttttacaataaacagaaagccaagcgga

SEQ ID NO: 133500 - DNA, 3456 bp, Homo sapiens
  Payload ID: 6090
  Gene Symbol: FBXW10
  Gene Name: F-box and WD repeat domain containing 10
  Uniprot ID: Q5XX13
  ENST ID: ENST00000308799
  CDS Start-End: 220-3405
gtttccaaggaggtctgtacaaaaagccagacttctgctggcagttactgagagagataggctttccatccatggcagccatttacttttgctctgggagacgtttgtaatagaaaaggcacaactggggtatttattcattccccccgttcctctagtgtttggtggcgttgccgttgcaagtgcgcagggctaaaatggactggttatcttaggatcatggaaaacctggaatcaaggctcaagaatgccccctattttcgttgtgagaagggaaccgattccatccctctatgccggaagtgtgagacgtgtgtcttagcctggaagatcttctctaccaaagagtggttctgcaggatcaatgacatatcacagaggaggtttctagttggcattctgaagcagttaaatagcttatatttgttacactatttccaaaatatccttcagaccacacagggaaaggatttcatctataacaggtcccggatcaacctcagcaagaaagaggggaaagttgtgaagtcctccttgaaccaaatgttggataaaacagtagaacagaagatgaaagagatcttgtactggtttgcgaacagcacccagtggaccaaggcgaattatactctcttactgctgcagatgtgcaaccccaaattactgctcactgctgccaatgtgatcagagtcctgtttctgagagaggagaacaatatctcagggctcaatcaagacatcacagatgtgtgtttttcccctgagaaagaccacagctccaagtctgcgacctcacaagtctattggacagccaaaactcagcacacatcccttcctttgtccaaagccccagaaaatgaacacttgcttggggcagcatctaaccctgaggaaccatggaggaattcactccggtgtatatccgaaatgaataggctgttttctggaaaaggagacataaccaagccagggtacgatccctgcaatctattggttgacctggatgacatcagagacctgtcttctgggttcagcaaataccgagacttcatccgttacctgcccatccacctctccaagtacattctaagtatgctggggtgtatgaggggatttcccagacacctcccctcttggcccagttctggggtttctgggtccatctttttttttccaggaatgctggatagacacaccctgaacaagtgcgcctctgtgagccagcactgggccgccatggctcaacaggtcaagatggacttgtcagcgcacggcttcattcagaaccagattaccttcttgcaggggtcctacacaagaggaattgatcctaattatgccaataaggtttctatcccagttcctaaaatggtagatgacgggaagagcatgcgtgtgaaacatccgaagtggaagctgagaacgaagaatgagtacaacctgtggactgcataccagaacgaggaaacgcagcaggtcctgatagaggagagaaatgttttctgtgggacctacaatgttcgcattctctctgacacgtgggatcaaaaccgagtcatccactattccgggggagatctgatagctgtgtcatctaatcgaaagatccatcttctggacatcatacaagtgaaagcgatacccgttgaattccgaggccatgctgggagtgtccgggccctcttcctgtgtgaggaggaaaactttctcctaagcgggagctatgacctaagtatcagatactgggatctgaaaagtggggtttgcacacgaatcttcggtggtcaccaggggactatcacttgcatggacttgtgtaagaacaggctcgtatctggaggaagagattgccaggtaaaagtatgggatgtagacacagggaagtgcctgaagacgtttagacacaaagaccccatcttggccaccaggatcaatgatacctacattgtgagcagctgtgagcgagggctggtgaaagtgtggcacattgccatggcccagttggtaaagactctcagtggccatgagggagccgtgaaatgcctgttctttgaccagtggcatctcctctcaggaagtactgatggcctggtcatggcctggagcatggtggggaagtacgagcgctgcctgatggccttcaagcatcccaaggaggtgctcgacgtgtcccttctcttcctccgggtcatcagcgcctgtgcagatggcaagatccgaatttacaatttcctcaacgggaactgtatgaaggtgttaaaagccaatggcagaggtgatcctgtgctgtccttctttattcagggcaacaggatggtggtcaacacagagagcaatgttctcatgttccagtttgagcacataaagtggcagtatgccgtggaaaaaacgaaacaaaagaagaataaggagaaagaggaggaaaaagaagaaaatagtctcatggaaattctctctaagtgtaatattcaggttcacagcccaagagagtctgtatccagtaaacaaactgtgatccaagagctcctaccaggcaaacctcccaagtcccgagtactcctgaagccggccaagttctcttcagatgatgtggagaaagcacaaaaacaaggacaattggaaactcctggaaaactgcccagtcacccaaagaaaaagtcttggaaaatccctatgtcacctgaccaattcctcctgactgttagcgccctgcagcacgcccataattccggggaatttgcctatccctgtaggccccaaacagaaattactgatgtctggggaccttcaatttcatacccaaggaaggtcttgaatttcaaaggaaaatcaatccaacgtgcagttgatcggttgagattgagcaatcctcctatagatgtgaaacgaaccagtattccccttgaaatccagaaactgcagcccaacttgaagatctctttgcacagtcctagagtccagtccaccataccccagcccatgattatccgctccaggttctctggcagcttaaagggtggagaccaagtgaccagttcaattgaaagggctgtgtgcagtacgggtcccctgaccagtatgcaggtcattaaaccaaaccgcatgctagctccacaagtgggcacagccaccctgtctcttaagaaagaacggcctcgcatctatacagcccttgatccttttagagtgaacactgagttcgtgctgttgaccgtgaaggaggagaaggagcaccaggaagccaagatgaaggaatatcaggccagggagtccactggagtggttgatccaggaaaagtcagcaaagctgcatggatcaggaagatcaaaggcctgcctattgataatttcacgaagcaagggaaaacagcggcccctgaacttggacaaaatgtatttatctaaaccagccttgggaaattacaatgttttacaataaacagaaagccaagcgga

SEQ ID NO: 133501 - DNA, 3431 bp, Homo sapiens
  Payload ID: 6090
  Gene Symbol: FBXW10
  Gene Name: F-box and WD repeat domain containing 10
  Uniprot ID: Q5XX13
  ENST ID: ENST00000395665
  CDS Start-End: 222-3380
atgtttccaaggaggtctgtacaaaaagccagacttctgctggcagttactgagagagataggctttccatccatggcagccatttacttttgctctgggagacgtttgtaatagaaaaggcacaactggggtatttattcattccccccgttcctctagtgtttggtggcgttgccgttgcaagtgcgcagggctaaaatggactggttatcttaggatcatggaaaacctggaatcaaggctcaagaatgccccctattttcgttgtgagaagggaaccgattccatccctctatgccggaagtgtgagacgtgtgtcttagcctggaagatcttctctaccaaagagtggttctgcaggatcaatgacatatcacagaggaggtttctagttggcattctgaagcagttaaatagcttatatttgttacactatttccaaaatatccttcagaccacacagggaaaggatttcatctataacaggtcccggatcaacctcagcaagaaagaggggaaagttgtgaagtcctccttgaaccaaatgttggataaaacagtagaacagaagatgaaagagatcttgtactggtttgcgaacagcacccagtggaccaaggcgaattatactctcttactgctgcagatgtgcaaccccaaattactgctcactgctgccaatgtgatcagagtcctgtttctgagagaggagaacaatatctcagggctcaatcaagacatcacagatgtgtgtttttcccctgagaaagaccacagctccaagtctgcgacctcacaagtctattggacagccaaaactcagcacacatcccttcctttgtccaaagccccagaaaatgaacacttgcttggggcagcatctaaccctgaggaaccatggaggaattcactccggtgtatatccgaaatgaataggctgttttctggaaaaggagacataaccaagccagggtacgatccctgcaatctattggttgacctggatgacatcagagacctgtcttctgggttcagcaaataccgagacttcatccgttacctgcccatccacctctccaagtacattctaagaatgctggatagacacaccctgaacaagtgcgcctctgtgagccagcactgggccgccatggctcaacaggtcaagatggacttgtcagcgcacggcttcattcagaaccagattaccttcttgcaggggtcctacacaagaggaattgatcctaattatgccaataaggtttctatcccagttcctaaaatggtagatgacgggaagagcatgcgtgtgaaacatccgaagtggaagctgagaacgaagaatgagtacaacctgtggactgcataccagaacgaggaaacgcagcaggtcctgatagaggagagaaatgttttctgtgggacctacaatgttcgcattctctctgacacgtgggatcaaaaccgagtcatccactattccgggggagatctgatagctgtgtcatctaatcgaaagatccatcttctggacatcatacaagtgaaagcgatacccgttgaattccgaggccatgctgggagtgtccgggccctcttcctgtgtgaggaggaaaactttctcctaagcgggagctatgacctaagtatcagatactgggatctgaaaagtggggtttgcacacgaatcttcggtggtcaccaggggactatcacttgcatggacttgtgtaagaacaggctcgtatctggaggaagagattgccaggtaaaagtatgggatgtagacacagggaagtgcctgaagacgtttagacacaaagaccccatcttggccaccaggatcaatgatacctacattgtgagcagctgtgagcgagggctggtgaaagtgtggcacattgccatggcccagttggtaaagactctcagtggccatgagggagccgtgaaatgcctgttctttgaccagtggcatctcctctcaggaagtactgatggcctggtcatggcctggagcatggtggggaagtacgagcgctgcctgatggccttcaagcatcccaaggaggtgctcgacgtgtcccttctcttcctccgggtcatcagcgcctgtgcagatggcaagatccgaatttacaatttcctcaacgggaactgtatgaaggtgttaaaagccaatggcagaggtgatcctgtgctgtccttctttattcagggcaacaggatggtggtcaacacagagagcaatgttctcatgttccagtttgagcacataaagtggcagtatgccgtggaaaaaacgaaacaaaagaagaataaggagaaagaggaggaaaaagaagaaaatagtctcatggaaattctctctaagtgtaatattcaggttcacagcccaagagagtctgtatccagtaaacaaactgtgatccaagagctcctaccaggcaaacctcccaagtcccgagtactcctgaagccggccaagttctcttcagcagtgttaatagaggaacttcaaagtcaaggaaagtcaaaatcaccccgaagagatgcagatgatgtggagaaagcacaaaaacaaggacaattggaaactcctggaaaactgcccagtcacccaaagaaaaagtcttggaaaatccctatgtcacctgaccaattcctcctgactgttagcgccctgcagcacgcccataattccggggaatttgcctatccctgtaggccccaaacagaaattactgatgtctggggaccttcaatttcatacccaaggaaggtcttgaatttcaaaggaaaatcaatccaacgtgcagttgatcggttgagattgagcaatcctcctatagatgtgaaacgaaccagtattccccttgaaatccagaaactgcagcccaacttgaagatctctttgcacagtcctagagtccagtccaccataccccagcccatgattatccgctccaggttctctggcagcttaaagggtggagaccaagtgaccagttcaattgaaagggctgtgtgcagtacgggtcccctgaccagtatgcaggtcattaaaccaaaccgcatgctagctccacaagtgggcacagccaccctgtctcttaagaaagaacggcctcgcatctatacagcccttgatccttttagagtgaacactgagttcgtgctgttgaccgtgaaggaggagaaggagcaccaggaagccaagatgaaggaatatcaggccagggagtccactggagtggttgatccaggaaaagtcagcaaagctgcatggatcaggaagatcaaaggcctgcctattgataatttcacgaagcaagggaaaacagcggcccctgaacttggacaaaatgtatttatctaaaccagccttgggaaattacaatgttttacaataaacagaaagccaagcgga

SEQ ID NO: 133502 - DNA, 3418 bp, Homo sapiens
  Payload ID: 6090
  Gene Symbol: FBXW10
  Gene Name: F-box and WD repeat domain containing 10
  ENST ID: ENST00000574478
  CDS Start-End: 174-764
actgagagagataggctttccatccatggcagccatttacttttgctctgggagacgtttgtaatagaaaaggcacaactggggtatttattcattccccccgttcctctagtgtttggtggcgttgccgttgcaagtgcgcagggctaaaatggactggttatcttaggatcatggaaaacctggaatcaaggctcaagaatgccccctattttcgttgtgagaagggaaccgattccatccctctatgccggaagtgtgagacgtgtgtcttagcctggaagatcttctctaccaaagagtggttctgcaggatcaatgacatatcacagaggaggtttctagttggcattctgaagcagttaaatagcttatatttgttacactatttccaaaatatccttcagaccacacagggaaaggatttcatctataacaggtcccggatcaacctcagcaagaaagaggggaaagttgtgaagtcctccttgaaccaaatgttggataaaacagtagaacagaagatgaaagagatcttgtactggtttgcgaacagcacccagtggaccaaggcgaattatactctcttactgctgcagatgtgcaaccccaaattactgctcactgctgccaatgtgatcagagtcctgtttctgagagaggagaacaatatctcaggtaaacaaggccacaggcagagactagagggcccccgaagaccagaaggcaaggcttcagaaatctgtaaggaactgcagttgtagacaacataggtagacagagattgcacagaactcagcataggttttttgaactgacaccttgtcctgacacccgatcctgtttaccaaaggagaaatgactgagtgtaacttccttcttgaaaatgatcaatgcaggaggaagtacacaacttttaactcacaagcatttatcatggatttctgcatctcataggcccagaaatggctggtccctgcccctgaccccttaatgctggtgtcgttcctgctttagggattggactgagctcgagagggttgtaaaggggaagcttttgtttttctcttcagctgccctgcacagaaaccagaccaagaagtcaaaacttagggctttttttttttttttcattcactctaccatgctccttgcttatccatgaaatgaaaccttaaagtagagtttctccaaggctggagatagcttaagggccaaataagtctagggtggtagttctccagctgtggcttgtatcaggatctccagcaggacctgttaaaacaagctcctcccccagaacttcggactcagcaggtctgagggctcaatcaagacatcacagatgtgtgtttttcccctgagaaagaccacagctccaagtctgcgacctcacaagtctattggacagccaaaactcagcacacatcccttcctttgtccaaagccccagaaaatgaacacttgcttggggcagcatctaaccctgaggaaccatggaggaattcactccggtgtatatccgaaatgaataggctgttttctggaaaaggagacataaccaagccagggtacgatccctgcaatctattggttgacctggatgacatcagagacctgtcttctgggttcagcaaataccgagacttcatccgttacctgcccatccacctctccaagtacattctaagaatgctggatagacacaccctgaacaagtgcgcctctgtgagccagcactgggccgccatggctcaacaggtcaagatggacttgtcagcgcacggcttcattcagaaccagattaccttcttgcaggggtcctacacaagaggaattgatcctaattatgccaataaggtttctatcccagttcctaaaatggtagatgacgggaagagcatgcgtgtgaaacatccgaagtggaagctgagaacgaagaatgagtacaacctgtggactgcataccagaacgaggaaacgcagcaggtcctgatagaggagagaaatgttttctgtgggacctacaatgttcgcattctctctgacacgtgggatcaaaaccgagtcatccactattccgggggagatctgatagctgtgtcatctaatcgaaagatccatcttctggacatcatacaagtgaaagcgatacccgttgaattccgaggccatgctgggagtgtccgggccctcttcctgtgtgaggaggaaaactttctcctaagcgggagctatgacctaagtatcagatactgggatctgaaaagtggggtttgcacacgaatcttcggtggtcaccaggggactatcacttgcatggacttgtgtaagaacaggctcgtatctggaggaagagattgccaggtaaaagtatgggatgtagacacagggaagtgcctgaagacgtttagacacaaagaccccatcttggccaccaggatcaatgatacctacattgtgagcagctgtgagcgagggctggtgaaagtgtggcacattgccatggcccagttggtaaagactctcagtggccatgagggagccgtgaaatgcctgttctttgaccagtggcatctcctctcaggaagtactgatggcctggtcatggcctggagcatggtggggaagtacgagcgctgcctgatggccttcaagcatcccaaggaggtgctcgacgtgtcccttctcttcctccgggtcatcagcgcctgtgcagatggcaagatccgaatttacaatttcctcaacgggaactgtatgaaggtgttaaaagccaatggcagaggtgatcctgtgctgtccttctttattcagggcaacaggatggtggtcaacacagagagcaatgttctcatgttccagtttgagcacataaagtggcagtatgccgtggaaaaaacgaaacaaaagaagaataaggagaaagaggaggaaaaagaagaaaatagtctcatggaaattctctctaagtgtaatattcaggttcacagcccaagagagtctgtatccagtaaacaaactgtgatccaagagctcctaccaggcaaacctcccaagtcccgagtactcctgaagccggccaagttctcttcagcagtgttaatagaggaacttcaaagtcaaggaaagtcaaaatcaccccgaagagatgagtgaacactgagttcgtgctgttgaccgtgaaggaggagaaggagcaccaggaagccaagatgaaggaatatcaggccagggagtccactggagtggttgatccaggaaaagtcagcaaagctgcatggatcaggaagatcaaaggcctgcctattgataatttcacgaagcaagggaaaacagcggcccctgaacttggacaaaatgtatttatctaaaccagccttgggaaattacaatgttttacaataaacagaaagcc

SEQ ID NO: 133503 - DNA, 4342 bp, Homo sapiens
  Payload ID: 6091
  Gene Symbol: FBXW11
  Gene Name: F-box and WD repeat domain containing 11
  Uniprot ID: Q9UKB1
  ENST ID: ENST00000265094
  CDS Start-End: 139-1767
ctgccggcggcccgggcgggctggcagctagagtgggtgcgatagccgcctccgcctctgccgcctccgccgtcgcctcctccgcccgggccgttcgctgctgcgcggggagagcgaggcggggccgccggggccgccatggagcccgactcggtgattgaggacaagaccatcgagctcatgtgttctgtgccaaggtctttgtggctaggctgcgccaacctggtagagagcatgtgcgcactgagttgcctgcagagcatgcccagtgtcagatgtctccagataagtaatggaacatcatctgtgatcgtctccagaaagaggccatcagaaggaaactatcaaaaagaaaaagacttgtgtattaaatattttgaccagtggtctgaatcagatcaagtggaatttgtggaacatcttatttcacgaatgtgtcattatcagcatggacatattaactcttacctgaagcccatgttgcagcgggactttattaccgctttaccagagcaaggcttagatcacatagcagaaaacattctttcgtacctggatgccaggtctctgtgtgcagcagagctggtatgtaaagaatggcagcgagtgatctcagaaggaatgctttggaagaagctgattgaacgaatggtacgcactgatcccctatggaaaggactttcagaaagaagagggtgggatcagtacctgtttaaaaacagacccacagatggccctccaaattcattttataggtcattatacccaaagattatccaggatatagagactatagaatctaactggcggtgtggacgacacaacttgcagaggattcagtgccgctctgaaaatagtaaaggtgtctactgtttacagtacgatgatgaaaaaattatcagtggcctacgagataattctattaagatatgggataaaaccagcctggaatgtttgaaagtgttaacaggacacacaggctctgtcctctgtctgcagtatgatgagcgtgtcattgtaactggctcttcagattctacggtgagagtgtgggatgtgaacacgggtgaagttcttaacacattgatccaccacaatgaggctgtattgcacttacgcttcagcaatggactgatggtgacctgttccaaggaccgctccattgctgtgtgggacatggcttctgcgaccgacatcactttacgccgtgtcctggttggccaccgggctgccgtcaatgtagtagactttgacgacaagtacatcgtgtctgcctctggtgacaggaccatcaaagtctggagcacgagcacctgtgaatttgttcgtactctcaatgggcacaagcggggcattgcctgtctccagtacagggatcgcctggttgttagtggatcatcagataataccattaggctctgggatattgaatgtggtgcctgtttaagagtcctagagggacatgaagaattggtccgatgcatccggtttgataacaagaggattgtcagtggggcctatgatgggaaaattaaagtttgggacttgcaagctgctcttgaccctcgagccccagcaagcacattgtgtttgcgcacattggtggaacattctggacgtgtgtttcggctccagtttgatgagtttcagatcatcagcagctcccatgatgacactattttgatttgggatttcttaaatgtgcctcccagtgcccagaatgagacccgttctccctccagaacatacacttacatctctagataacagtctgcactttcacccgtttcagggttttctagtcttgaactactggctacgtggctaccaaatgcctaagggagttcgttcacagctgagttatgaagctggaattggttctagacgctgggtagatgcaaagcagcctaactcttcaagtaccgacatttctcacctctgattccggctctcctttgagaaggagaccttagcttccccggcttcaagtagaacagaagcccgtttccttccctcatcagtgaaaaaatctaatgtttcaaatgtaaattgttcatagaaaaggaacatagaatctgttttacagaagtaaatcgaccgtcaagagaagacttggcctctaatttatattgctttgcactttggtttgatattaagaaacagcattcttcttcagtgaaattttgggtgccaaacacctacccagaatgtccagggctttcattttcaaaagttagcattctccttttgaccgtccaagtcattatgaattctgacttgttgtattaggaacatgttggacagtggaaaattttctctggattgttttagtaatatttttgggattatacttcctttctgtaccaatttcttttaatttaaagaactataagtcagttatattatctaccaacaggtaatatagctctttcttttattaactgttctctgtcccccaaccatctcctgatatttggtagagtaacacctttatacgtgtgcttgcctcctaatttaaaatactgtattcgcatgtagatataatgtacataacagtttaacctcaaagttgctggagtcagggccccctgtgcttgagacactaatacagagtgtgttcgcacttagccatgggctgggctcaagaacctgatacctgggttgatgtggattacctagaacccttcctgcagtattcatacagtgtttttattttgttgttgtcattgcgtgtgtgtggtttgtgtgtgtttttaatgagaatcttgttttaaaatgtaatttctaaggtttaacaccaaaatgttttatttgttgtggagtatatattatacaatagagaggtaccttaaacattttttgttcttattctttttctcataagtactcctgagtacaagtggtcacctcccatagtattcatttggcttcgctgtcaaaaatcattattctgtgcagtcgtggccctgggaaggggaaataagaaggccctgttgacgggctgtcttggctctggaattcatgcatcctggccttgccaaggttctggcagggcctgctggtgtgttggagcctgcagggcaggtcaggctggttcagaggcccatgctgaggggtgggtgctctgaagtggagtgaagcctcaagcccatgaatgccaccccagtcatctctggtgtcagctgctgctgtggccccagcaggttctcaaagctcccaagtcctccctacgacacagcccaaatgtgtaaatggcactgttgccctgacagtgcatggaaaggacgttggcatccaattggcactccttctcccttattcaatattaggtttgatttgcccttcgccattgtttccaaagatcaaggaatgtcaataacattttaaaggaccaataaacagcctcctataaagtaaacctcttcccgtggaagcacactctactactaaagggaaggccctgggctctgatttgtcctttgcattgagaacggtgtggggatcagtgtgtgtgtatgtgatttgtttattgagttggctttgcttttttagtttttcttttaaaaataaaatccttccttcccatgttactaaattaatttatgtttttgagaggttgagtctcaaagtgtaaacaataaacctccattcataaggtggatgttgtaagcttgatggtggttgtgaaagtgatttagctttgaccacttttcatcctacagcttcaatatcaaactggttaggaaagcccagggggaagggagggggcaggggaggaggcaattctgaatgaatgaatggattttttgttgtttttgcatgtttaatatagaagttcccctcgttccttgggagatgatggcctttgaatatgcagacaacctttgaattgtgcctactaaattatagcaggggactttggcacccaaggagttctgactttctgggattataatagtaattcccagccatactctggactttattttgctaaccataactgagcaaatgtaaattactgctatattaatgttttaaagcactgggatagtctaattctaacttgtaattaattatgtttgccaattatctgtttgaaataaatttgtgtctgaacagctattgaaactgttaaattgtacagatattattcatgacagctttgtactgtggaatgtgcttaataaaaaacaaaaaagtttgacttttgtccagtaaattgctaagtaatgtcaataaatcgagtatgggtattatgcagtgcacctaatctggcttcatgcaattgttacttcagctactgattcaaagccaatactcttaataaagtgttgcaatactc

SEQ ID NO: 133504 - DNA, 4539 bp, Homo sapiens
  Payload ID: 6091
  Gene Symbol: FBXW11
  Gene Name: F-box and WD repeat domain containing 11
  Uniprot ID: Q9UKB1
  ENST ID: ENST00000296933
  CDS Start-End: 372-1961
gtagtcgtggcgctctcgaggccctgccatgagcaagctcttaactcttcaggtctgcacgtcctacgcccaccgtccagtgctactctcagctcggagttcagcttcgggctgccaagagccagcaacctggtgtcagaggctcggtcccacaacgctctgcgggccgcggcgcctgctgggaggtgtagtccccgatctgcgtactgcgttcgccgagggggagggcggagctgccggcggcccgggcgggctggcagctagagtgggtgcgatagccgcctccgcctctgccgcctccgccgtcgcctcctccgcccgggccgttcgctgctgcgcggggagagcgaggcggggccgccggggccgccatggagcccgactcggtgattgaggacaagaccatcgagctcatgaacacttcagttatggaagatcaaaatgaagatgagtccccaaagaaaaatactctttggcagataagtaatggaacatcatctgtgatcgtctccagaaagaggccatcagaaggaaactatcaaaaagaaaaagacttgtgtattaaatattttgaccagtggtctgaatcagatcaagtggaatttgtggaacatcttatttcacgaatgtgtcattatcagcatggacatattaactcttacctgaagcccatgttgcagcgggactttattaccgctttaccagagcaaggcttagatcacatagcagaaaacattctttcgtacctggatgccaggtctctgtgtgcagcagagctggtatgtaaagaatggcagcgagtgatctcagaaggaatgctttggaagaagctgattgaacgaatggtacgcactgatcccctatggaaaggactttcagaaagaagagggtgggatcagtacctgtttaaaaacagacccacagatggccctccaaattcattttataggtcattatacccaaagattatccaggatatagagactatagaatctaactggcggtgtggacgacacaacttgcagaggattcagtgccgctctgaaaatagtaaaggtgtctactgtttacagtacgatgatgaaaaaattatcagtggcctacgagataattctattaagatatgggataaaaccagcctggaatgtttgaaagtgttaacaggacacacaggctctgtcctctgtctgcagtatgatgagcgtgtcattgtaactggctcttcagattctacggtgagagtgtgggatgtgaacacgggtgaagttcttaacacattgatccaccacaatgaggctgtattgcacttacgcttcagcaatggactgatggtgacctgttccaaggaccgctccattgctgtgtgggacatggcttctgcgaccgacatcactttacgccgtgtcctggttggccaccgggctgccgtcaatgtagtagactttgacgacaagtacatcgtgtctgcctctggtgacaggaccatcaaagtctggagcacgagcacctgtgaatttgttcgtactctcaatgggcacaagcggggcattgcctgtctccagtacagggatcgcctggttgttagtggatcatcagataataccattaggctctgggatattgaatgtggtgcctgtttaagagtcctagagggacatgaagaattggtccgatgcatccggtttgataacaagaggattgtcagtggggcctatgatgggaaaattaaagtttgggacttgcaagctgctcttgaccctcgagccccagcaagcacattgtgtttgcgcacattggtggaacattctggacgtgtgtttcggctccagtttgatgagtttcagatcatcagcagctcccatgatgacactattttgatttgggatttcttaaatgtgcctcccagtgcccagaatgagacccgttctccctccagaacatacacttacatctctagataacagtctgcactttcacccgtttcagggttttctagtcttgaactactggctacgtggctaccaaatgcctaagggagttcgttcacagctgagttatgaagctggaattggttctagacgctgggtagatgcaaagcagcctaactcttcaagtaccgacatttctcacctctgattccggctctcctttgagaaggagaccttagcttccccggcttcaagtagaacagaagcccgtttccttccctcatcagtgaaaaaatctaatgtttcaaatgtaaattgttcatagaaaaggaacatagaatctgttttacagaagtaaatcgaccgtcaagagaagacttggcctctaatttatattgctttgcactttggtttgatattaagaaacagcattcttcttcagtgaaattttgggtgccaaacacctacccagaatgtccagggctttcattttcaaaagttagcattctccttttgaccgtccaagtcattatgaattctgacttgttgtattaggaacatgttggacagtggaaaattttctctggattgttttagtaatatttttgggattatacttcctttctgtaccaatttcttttaatttaaagaactataagtcagttatattatctaccaacaggtaatatagctctttcttttattaactgttctctgtcccccaaccatctcctgatatttggtagagtaacacctttatacgtgtgcttgcctcctaatttaaaatactgtattcgcatgtagatataatgtacataacagtttaacctcaaagttgctggagtcagggccccctgtgcttgagacactaatacagagtgtgttcgcacttagccatgggctgggctcaagaacctgatacctgggttgatgtggattacctagaacccttcctgcagtattcatacagtgtttttattttgttgttgtcattgcgtgtgtgtggtttgtgtgtgtttttaatgagaatcttgttttaaaatgtaatttctaaggtttaacaccaaaatgttttatttgttgtggagtatatattatacaatagagaggtaccttaaacattttttgttcttattctttttctcataagtactcctgagtacaagtggtcacctcccatagtattcatttggcttcgctgtcaaaaatcattattctgtgcagtcgtggccctgggaaggggaaataagaaggccctgttgacgggctgtcttggctctggaattcatgcatcctggccttgccaaggttctggcagggcctgctggtgtgttggagcctgcagggcaggtcaggctggttcagaggcccatgctgaggggtgggtgctctgaagtggagtgaagcctcaagcccatgaatgccaccccagtcatctctggtgtcagctgctgctgtggccccagcaggttctcaaagctcccaagtcctccctacgacacagcccaaatgtgtaaatggcactgttgccctgacagtgcatggaaaggacgttggcatccaattggcactccttctcccttattcaatattaggtttgatttgcccttcgccattgtttccaaagatcaaggaatgtcaataacattttaaaggaccaataaacagcctcctataaagtaaacctcttcccgtggaagcacactctactactaaagggaaggccctgggctctgatttgtcctttgcattgagaacggtgtggggatcagtgtgtgtgtatgtgatttgtttattgagttggctttgcttttttagtttttcttttaaaaataaaatccttccttcccatgttactaaattaatttatgtttttgagaggttgagtctcaaagtgtaaacaataaacctccattcataaggtggatgttgtaagcttgatggtggttgtgaaagtgatttagctttgaccacttttcatcctacagcttcaatatcaaactggttaggaaagcccagggggaagggagggggcaggggaggaggcaattctgaatgaatgaatggattttttgttgtttttgcatgtttaatatagaagttcccctcgttccttgggagatgatggcctttgaatatgcagacaacctttgaattgtgcctactaaattatagcaggggactttggcacccaaggagttctgactttctgggattataatagtaattcccagccatactctggactttattttgctaaccataactgagcaaatgtaaattactgctatattaatgttttaaagcactgggatagtctaattctaacttgtaattaattatgtttgccaattatctgtttgaaataaatttgtgtctgaacagctattgaaactgttaaattgtacagatattattcatgacagctttgtactgtggaatgtgcttaataaaaaacaaaaaagtttgacttttgtccagtaaattgctaagtaatgtcaataaatcgagtatgggtattatgcagtgcacctaatctggcttcatgcaattgttacttcagctactgattcaaagccaatactcttaataaagtgttgcaatactctga

SEQ ID NO: 133505 - DNA, 2181 bp, Homo sapiens
  Payload ID: 6091
  Gene Symbol: FBXW11
  Gene Name: F-box and WD repeat domain containing 11
  Uniprot ID: Q9UKB1
  ENST ID: ENST00000393802
  CDS Start-End: 149-1675
gagggcggagctgccggcggcccgggcgggctggcagctagagtgggtgcgatagccgcctccgcctctgccgcctccgccgtcgcctcctccgcccgggccgttcgctgctgcgcggggagagcgaggcggggccgccggggccgccatggagcccgactcggtgattgaggacaagaccatcgagctcatgataagtaatggaacatcatctgtgatcgtctccagaaagaggccatcagaaggaaactatcaaaaagaaaaagacttgtgtattaaatattttgaccagtggtctgaatcagatcaagtggaatttgtggaacatcttatttcacgaatgtgtcattatcagcatggacatattaactcttacctgaagcccatgttgcagcgggactttattaccgctttaccagagcaaggcttagatcacatagcagaaaacattctttcgtacctggatgccaggtctctgtgtgcagcagagctggtatgtaaagaatggcagcgagtgatctcagaaggaatgctttggaagaagctgattgaacgaatggtacgcactgatcccctatggaaaggactttcagaaagaagagggtgggatcagtacctgtttaaaaacagacccacagatggccctccaaattcattttataggtcattatacccaaagattatccaggatatagagactatagaatctaactggcggtgtggacgacacaacttgcagaggattcagtgccgctctgaaaatagtaaaggtgtctactgtttacagtacgatgatgaaaaaattatcagtggcctacgagataattctattaagatatgggataaaaccagcctggaatgtttgaaagtgttaacaggacacacaggctctgtcctctgtctgcagtatgatgagcgtgtcattgtaactggctcttcagattctacggtgagagtgtgggatgtgaacacgggtgaagttcttaacacattgatccaccacaatgaggctgtattgcacttacgcttcagcaatggactgatggtgacctgttccaaggaccgctccattgctgtgtgggacatggcttctgcgaccgacatcactttacgccgtgtcctggttggccaccgggctgccgtcaatgtagtagactttgacgacaagtacatcgtgtctgcctctggtgacaggaccatcaaagtctggagcacgagcacctgtgaatttgttcgtactctcaatgggcacaagcggggcattgcctgtctccagtacagggatcgcctggttgttagtggatcatcagataataccattaggctctgggatattgaatgtggtgcctgtttaagagtcctagagggacatgaagaattggtccgatgcatccggtttgataacaagaggattgtcagtggggcctatgatgggaaaattaaagtttgggacttgcaagctgctcttgaccctcgagccccagcaagcacattgtgtttgcgcacattggtggaacattctggacgtgtgtttcggctccagtttgatgagtttcagatcatcagcagctcccatgatgacactattttgatttgggatttcttaaatgtgcctcccagtgcccagaatgagacccgttctccctccagaacatacacttacatctctagataacagtctgcactttcacccgtttcagggttttctagtcttgaactactggctacgtggctaccaaatgcctaagggagttcgttcacagctgagttatgaagctggaattggttctagacgctgggtagatgcaaagcagcctaactcttcaagtaccgacatttctcacctctgattccggctctcctttgagaaggagaccttagcttccccggcttcaagtagaacagaagcccgtttccttccctcatcagtgaaaaaatctaatgtttcaaatgtaaattgttcatagaaaaggaacatagaatctgttttacagaagtaaatcgaccgtcaagagaagacttggcctctaatttatattgctttgcactttggtttgatattaagaaacagcattcttcttcagtgaaattttgggtgccaaacacctacccagaatgtccagggctttcattttcaaaagttagcattctccttttgaccgtccaagtcattatgaattc

SEQ ID NO: 133506 - DNA, 758 bp, Homo sapiens
  Payload ID: 6091
  Gene Symbol: FBXW11
  Gene Name: F-box and WD repeat domain containing 11
  ENST ID: ENST00000519693
  CDS Start-End: 158-301
gccgagggggagggcggagctgccggcggcccgggcgggctggcagctagagtgggtgcgatagccgcctccgcctctgccgcctccgccgtcgcctcctccgcccgggccgttcgctgctgcgcggggagagcgaggcggggccgccggggccgccatggagcccgactcggtgattgaggacaagaccatcgagctcatgttaccgaagtgcatgtttgggattttgttgaagaaagctggatacagtaaacggaaagaatcttggaagatgcttgactgctgtcttttctcagactagtctgaaagggaaaacccccattcattctggattggtggatctgaagtacaaaatattttccagataagtaatggaacatcatctgtgatcgtctccagaaagaggccatcagaaggaaactatcaaaaagaaaaagacttgtgtattaaatattttgaccagtggtctgaatcagatcaagtggaatttgtggaacatcttatttcacgaatgtgtcattatcagcatggacatattaactcttacctgaagcccatgttgcagcgggactttattaccgctttaccagagcaaggcttagatcacatagcagaaaacattctttcgtacctggatgccaggtctctgtgtgcagcagagctggtatgtaaagaatggcagcgagtgatctcagaaggaatgctttggaagaagctgattgaacgaatggtacgcactgatcccctatggaaaggac

SEQ ID NO: 133507 - DNA, 636 bp, Homo sapiens
  Payload ID: 6091
  Gene Symbol: FBXW11
  Gene Name: F-box and WD repeat domain containing 11
  ENST ID: ENST00000517395
  CDS Start-End: 47-636
gttcgctgctgcgcggggagagcgaggcggggccgccggggccgccatggagcccgactcggtgattgaggacaagaccatcgagctcatgtgttctgtgccaaggtctttgtggctaggctgcgccaacctggtagagagcatgtgcgcactgagttgcctgcagagcatgcccagtgtcagatgtctccagaacacttcagttatggaagatcaaaatgaagatgagtccccaaagaaaaatactctttggcagataagtaatggaacatcatctgtgatcgtctccagaaagaggccatcagaaggaaactatcaaaaagaaaaagacttgtgtattaaatattttgaccagtggtctgaatcagatcaagtggaatttgtggaacatcttatttcacgaatgtgtcattatcagcatggacatattaactcttacctgaagcccatgttgcagcgggactttattaccgctttaccagagcaaggcttagatcacatagcagaaaacattctttcgtacctggatgccaggtctctgtgtgcagcagagctggtatgtaaagaatggcagcgagtgatctcagaaggaatgctttggaagaagctgattgaacgaatggtacgcactgatcc

SEQ ID NO: 133508 - DNA, 310 bp, Homo sapiens
  Payload ID: 6091
  Gene Symbol: FBXW11
  Gene Name: F-box and WD repeat domain containing 11
  ENST ID: ENST00000518752
  CDS Start-End: 89-310
aaaaggggagtttccctgcacaagcttctctctctttgcttgctgccattctacttaagatgtgacctgctcctccttgctttctgccatgattatgaggcctccccatccatgtggaactaacacttcagttatggaagatcaaaatgaagatgagtccccaaagaaaaatactctttggcagataagtaatggaacatcatctgtgatcgtctccagaaagaggccatcagaaggaaactatcaaaaagaaaaagacttgtgtattaaatattttgaccagtggtctgaatcagatcaagtggaattt

SEQ ID NO: 133509 - DNA, 2099 bp, Homo sapiens
  Payload ID: 6091
  Gene Symbol: FBXW11
  Gene Name: F-box and WD repeat domain containing 11
  ENST ID: ENST00000523843
  CDS Start-End: 148-291
agggcggagctgccggcggcccgggcgggctggcagctagagtgggtgcgatagccgcctccgcctctgccgcctccgccgtcgcctcctccgcccgggccgttcgctgctgcgcggggagagcgaggcggggccgccggggccgccatggagcccgactcggtgattgaggacaagaccatcgagctcatgttaccgaagtgcatgtttgggattttgttgaagaaagctggatacagtaaacggaaagaatcttggaagatgcttgactgctgtcttttctcagactagtctgaaagggaaaacccccattcattctggattggtggatctgaagtacaaaatattttccagaacacttcagttatggaagatcaaaatgaagatgagtccccaaagaaaaatactctttggcagataagtaatggaacatcatctgtgatcgtctccagaaagaggccatcagaaggaaactatcaaaaagaaaaagacttgtgtattaaatattttgaccagtggtctgaatcagatcaagtggaatttgtggaacatcttatttcacgaatgtgtcattatcagcatggacatattaactcttacctgaagcccatgttgcagcgggactttattaccgctttaccagagcaaggcttagatcacatagcagaaaacattctttcgtacctggatgccaggtctctgtgtgcagcagagctggtatgtaaagaatggcagcgagtgatctcagaaggaatgctttggaagaagctgattgaacgaatggtacgcactgatcccctatggaaaggactttcagaaagaagagggtgggatcagtacctgtttaaaaacagacccacagatggccctccaaattcattttataggtcattatacccaaagattatccaggatatagagactatagaatctaactggcggtgtggacgacacaacttgcagaggattcagtgccgctctgaaaatagtaaaggtgtctactgtttacagtacgatgatgaaaaaattatcagtggcctacgagataattctattaagatatgggataaaaccagcctggaatgtttgaaagtgttaacaggacacacaggctctgtcctctgtctgcagtatgatgagcgtgtcattgtaactggctcttcagattctacggtgagagtgtgggatgtgaacacgggtgaagttcttaacacattgatccaccacaatgaggctgtattgcacttacgcttcagcaatggactgatggtgacctgttccaaggaccgctccattgctgtgtgggacatggcttctgcgaccgacatcactttacgccgtgtcctggttggccaccgggctgccgtcaatgtagtagactttgacgacaagtacatcgtgtctgcctctggtgacaggaccatcaaagtctggagcacgagcacctgtgaatttgttcgtactctcaatgggcacaagcggggcattgcctgtctccagtacagggatcgcctggttgttagtggatcatcagataataccattaggctctgggatattgaatgtggtgcctgtttaagagtcctagagggacatgaagaattggtccgatgcatccggtttgataacaagaggattgtcagtggggcctatgatgggaaaattaaagtttgggacttgcaagctgctcttgaccctcgagccccagcaagcacattgtgtttgcgcacattggtggaacattctggacgtgtgtttcggctccagtttgatgagtttcagatcatcagcagctcccatgatgacactattttgatttgggatttcttaaatgtgcctcccagtgcccagaatgagacccgttctccctccagaacatacacttacatctctagataacagtctgcactttcacccgtttcagggttttctagtcttgaactactggctacgtggctaccaaatgcctaagggagttcgttcacagctgagttatgaagctggaattggttctagacgctgggtagatgcaaagcagcctaactcttcaagtaccgacatttctcacctctgattccggctctcctttgagaaggaga

SEQ ID NO: 133510 - DNA, 686 bp, Homo sapiens
  Payload ID: 6091
  Gene Symbol: FBXW11
  Gene Name: F-box and WD repeat domain containing 11
  ENST ID: ENST00000520376
  CDS Start-End: 148-291
agggcggagctgccggcggcccgggcgggctggcagctagagtgggtgcgatagccgcctccgcctctgccgcctccgccgtcgcctcctccgcccgggccgttcgctgctgcgcggggagagcgaggcggggccgccggggccgccatggagcccgactcggtgattgaggacaagaccatcgagctcatgttaccgaagtgcatgtttgggattttgttgaagaaagctggatacagtaaacggaaagaatcttggaagatgcttgactgctgtcttttctcagactagtctgaaagggaaaacccccattcattctggattggtggatctgaagtacaaaatattttccagtgttctgtgccaaggtctttgtggctaggctgcgccaacctggtagagagcatgtgcgcactgagttgcctgcagagcatgcccagtgtcagatgtctccagaacacttcagttatggaagatcaaaatgaagatgagtccccaaagaaaaatactctttggcagataagtaatggaacatcatctgtgatcgtctccagaaagaggccatcagaaggaaactatcaaaaagaaaaagacttgtgtattaaatattttgaccagtggtctgaatcagatcaagtggaatttgtggaacatcttatttcacgaatgtgtcattatcagcatgg

SEQ ID NO: 133511 - DNA, 1647 bp, Homo sapiens
  Payload ID: 6092
  Gene Symbol: FBXW12
  Gene Name: F-box and WD repeat domain containing 12
  Uniprot ID: Q6X9E4
  ENST ID: ENST00000296438
  CDS Start-End: 187-1581
ttctttctcctccactgcaaagttaaatgcgagaaggtagaaacccagaggccatgctggcgctgagagatgagccccactcaccagattcaagatcccaagtgctgcagactttggcaaagcctataaattcagagcagcccggagaggagaaaggaaagtggatgtgggttcaggccgcatgaaatggagatccgattgcctgacttagctttgaagcgaatcttctctttcctggacctgttcggcttgctgcaggtttcccaggtgaacaagcattggaataggattgcagacagtgattacctgtggaggtcactatctctgcagagatgggactgcagcaacttcaccaatcaacacctgggcacacacacatggaagcaatttttcctgcatcaaagaaggaaggagcttcggttggcattggcacagccgcataactttatctacaaagtaactaagaacatcgcatttgagacggagttggcttatctctcaggaaatagacttacagtggatgaacaggagaaatcaatcatttgtagtgtatctccaaagcaagagctttgtgcctgggatgtgcaagagggtaccatgatctggtcaagcccagtccaggagttccatttctcaaatctggtaaccctccctcagatgcatctcgccatcactatggatcggaaaaaaactatcaaagtgtggaactgtcaggacagggacgctctggctgttctccccatgccacagccctgttattgcatggaagcctatcttacaaaggatggcccattcctgatggttggcgatgctgcaggtgacatctacacatttacactgcctgggttaagagatgtttctaaagttactgcatttcaatatggtattgtacttctacactgctctcctgacaagaaatgggtatttgcatgtgggacatacagtcgtaccttgccacaggtattcctcacagagtccttactgagaccatcagaaggcagtgttcctctgtctacctttctcccacataaattatgtgccagcgcctgctggaccccaaaggtgaaaaacaggataacactgatgtcccaaagtagcactggaaaaaagacagaatttatcacctttgatctaacaaccaagaagactggaggccaaacagtcatccaagcatatgagatcgcaagtttccaggtggcagctcatctgaagtgccctatctggatgggagccagtgatggatatatgattgtctttaccagtggaccatacttgttactcttcagcatcactggcttcctgctgcaacgatttgaggaccatcaggcagccatcaacaacttctgggtggatccttgctatgtgctcaccacatccgagaactctgtgcacgtgtacatgtgggaagaaggaggccgccatccatacctcaggagctgctgtcacctggaaaacacgtggcatgatcacacaacagacagctgcatctccagtgtgatgtgtgataatgcaagcatagtacttagggtgaggaaagtaagtgactccagcattctggtgatgtattctttgaatacgtaatatggaaactaacaaaattgaccttgcatcatcttctgcaatgtagtaaagaaattctatttgcaa

SEQ ID NO: 133512 - DNA, 1379 bp, Homo sapiens
  Payload ID: 6092
  Gene Symbol: FBXW12
  Gene Name: F-box and WD repeat domain containing 12
  Uniprot ID: Q6X9E4
  ENST ID: ENST00000445170
  CDS Start-End: 14-1351
ctggcgctgagagatgagccccactcaccagattcaagatcccaagcattggaataggattgcagacagtgattacctgtggaggtcactatctctgcagagatgggactgcagcaacttcaccaatcaacacctgggcacacacacatggaagcaatttttcctgcatcaaagaaggaaggagcttcggttggcattggcacagccgcataactttatctacaaagtaactaagaacatcgcatttgagacggagttggcttatctctcaggaaatagacttacagtggatgaacaggagaaatcaatcatttgtagtgtatctccaaagcaagagctttgtgcctgggatgtgcaagagggtaccatgatctggtcaagcccagtccaggagttccatttctcaaatctggtaaccctccctcagatgcatctcgccatcactatggatcggaaaaaaactatcaaagtgtggaactgtcaggacagggacgctctggctgttctccccatgccacagccctgttattgcatggaagcctatcttacaaaggatggcccattcctgatggttggcgatgctgcaggtgacatctacacatttacactgcctgggttaagagatgtttctaaagttactgcatttcaatatggtattgtacttctacactgctctcctgacaagaaatgggtatttgcatgtgggacatacagtcgtaccttgccacaggtattcctcacagagtccttactgagaccatcagaaggcagtgttcctctgtctacctttctcccacataaattatgtgccagcgcctgctggaccccaaaggtgaaaaacaggataacactgatgtcccaaagtagcactggaaaaaagacagaatttatcacctttgatctaacaaccaagaagactggaggccaaacagtcatccaagcatatgagatcgcaagtttccaggtggcagctcatctgaagtgccctatctggatgggagccagtgatggatatatgattgtctttaccagtggaccatacttgttactcttcagcatcactggcttcctgctgcaacgatttgaggaccatcaggcagccatcaacaacttctgggtggatccttgctatgtgctcaccacatccgagaactctgtgcacgtgtacatgtgggaagaaggaggccgccatccatacctcaggagctgctgtcacctggaaaacacgtggcatgatcacacaacagacagctgcatctccagtgtgatgtgtgataatgcaagcatagtacttagggtgaggaaagtaagtgactccagcattctggtgatgtattctttgaatacgtaatatggaaactaacaaaattgaccttgca

SEQ ID NO: 133513 - DNA, 1117 bp, Homo sapiens
  Payload ID: 6092
  Gene Symbol: FBXW12
  Gene Name: F-box and WD repeat domain containing 12
  ENST ID: ENST00000436231
  CDS Start-End: 166-1089
ctggcgctgagagatgagccccactcaccagattcaagatcccaagcatttgagacggagttggcttatctctcaggaaatagacttacagtggatgaacaggagaaatcaatcatttgtagtgtatctccaaagcaagagctttgtgcctgggatgtgcaagagatgcatctcgccatcactatggatcggaaaaaaactatcaaagtgtggaactgtcaggacagggacgctctggctgttctccccatgccacagccctgttattgcatggaagcctatcttacaaaggatggcccattcctgatggttggcgatgctgcaggtgacatctacacatttacactgcctgggttaagagatgtttctaaagttactgcatttcaatatggtattgtacttctacactgctctcctgacaagaaatgggtatttgcatgtgggacatacagtcgtaccttgccacaggtattcctcacagagtccttactgagaccatcagaaggcagtgttcctctgtctacctttctcccacataaattatgtgccagcgcctgctggaccccaaaggtgaaaaacaggataacactgatgtcccaaagtagcactggaaaaaagacagaatttatcacctttgatctaacaaccaagaagactggaggccaaacagtcatccaagcatatgagatcgcaagtttccaggtggcagctcatctgaagtgccctatctggatgggagccagtgatggatatatgattgtctttaccagtggaccatacttgttactcttcagcatcactggcttcctgctgcaacgatttgaggaccatcaggcagccatcaacaacttctgggtggatccttgctatgtgctcaccacatccgagaactctgtgcacgtgtacatgtgggaagaaggaggccgccatccatacctcaggagctgctgtcacctggaaaacacgtggcatgatcacacaacagacagctgcatctccagtgtgatgtgtgataatgcaagcatagtacttagggtgaggaaagtaagtgactccagcattctggtgatgtattctttgaatacgtaatatggaaactaacaaaattgaccttgca

SEQ ID NO: 133514 - DNA, 1370 bp, Homo sapiens
  Payload ID: 6092
  Gene Symbol: FBXW12
  Gene Name: F-box and WD repeat domain containing 12
  Uniprot ID: Q6X9E4
  ENST ID: ENST00000415155
  CDS Start-End: 158-1342
ctggcgctgagagatgagccccactcaccagattcaagatcccaagatgggcatgggtgaaaatctttacaagtgctgcagactttggcaaagcctataaattcagagcagcccggagaggagaaaggaaagtggatgtgggttcaggccgcatgaaatggagatccgattgcctgacttagctttgaagcgaatcttctctttcctggacctgttcggcttgctgcaggtttcccaggtgaacaagcattggaataggattgcagacagtgattacctgtggaggtcactatctctgcagagatgggactgcagcaacttcaccaatcaacacctgggcacacacacatggaagcaatttttcctgcatcaaagaaggaaggagcttcggttggcattggcacagccgcataactttatctacaaagtaactaagaacatcgcatttgagacggagttggcttatctctcaggaaatagacttacagtggatgaacaggagaaatcaatcatttgtagtgtatctccaaagcaagagctttgtgcctgggatgtgcaagaggttggcgatgctgcaggtgacatctacacatttacactgcctgggttaagagatgtttctaaagttactgcatttcaatatggtattgtacttctacactgctctcctgacaagaaatgggtatttgcatgtgggacatacagtcgtaccttgccacaggtattcctcacagagtccttactgagaccatcagaaggcagtgttcctctgtctacctttctcccacataaattatgtgccagcgcctgctggaccccaaaggtgaaaaacaggataacactgatgtcccaaagtagcactggaaaaaagacagaatttatcacctttgatctaacaaccaagaagactggaggccaaacagtcatccaagcatatgagatcgcaagtttccaggtggcagctcatctgaagtgccctatctggatgggagccagtgatggatatatgattgtctttaccagtggaccatacttgttactcttcagcatcactggcttcctgctgcaacgatttgaggaccatcaggcagccatcaacaacttctgggtggatccttgctatgtgctcaccacatccgagaactctgtgcacgtgtacatgtgggaagaaggaggccgccatccatacctcaggagctgctgtcacctggaaaacacgtggcatgatcacacaacagacagctgcatctccagtgtgatgtgtgataatgcaagcatagtacttagggtgaggaaagtaagtgactccagcattctggtgatgtattctttgaatacgtaatatggaaactaacaaaattgaccttgca

SEQ ID NO: 133515 - DNA, 1079 bp, Homo sapiens
  Payload ID: 6093
  Gene Symbol: FBXW2
  Gene Name: F-box and WD repeat domain containing 2
  ENST ID: ENST00000453291
  CDS Start-End: 454-1079
cggaccgggagcagcggccgcaggtccgggcgccatggctgcggagcggacccggccgctgcaaggctctggcggtccgagcgtgcctagtagctgtgaacccggcgcgaggtcccgggccccggggcgctcgctcagaaaaatgaaactctggatcacctgattagtctgagtggggcagtccagctcaggcatctctccaataacctagagactctcctcaagcgggacttcctcaaactccttcccctggagctcagtttttatttgttaaaatggctcgatcctcagactttactcacatgctgcctcgtctctaaacagtggaataaggtgataagtgcctgtacagaggtgtggcagactgcatgtaaaaatttgggctggcagatagatgattctgttcaggacgctttgcactggaagaaggtttatttgaaggctattttgagaatgaagcaactggaggaccatgaagcctttgaaacctcgtcattaattggacacagtgccagagtgtatgcactttactacaaagatggacttctctgtacagggtcagatgacttgtctgcaaagctgtgggatgtgagcacagggcagtgcgtttatggcatccagacccacacttgtgcagcggtgaagtttgatgaacagaagcttgtgacaggctcctttgacaacactgtggcttgctgggaatggagttccggagccaggacccagcactttcgggggcacacgggggcggtatttagcgtggactacaatgatgaactggatatcttggtgagcggctctgcagacttcactgtgaaagtatgggctttatctgctgggacatgcctgaacacactcaccgggcacacggaatgggtcaccaaggtagttttgcagaagtgcaaagtcaagtctctcttgcacagtcctggagactacatcctcttaagtgcagacaaatatgagattaagatttggccaattgggagagaaatcaactgtaagtgcttaaagacattgtctgtctctgaggatagaagtatctgcctgcagccaagacttcattttgatggcaaata

SEQ ID NO: 133516 - DNA, 9138 bp, Homo sapiens
  Payload ID: 6093
  Gene Symbol: FBXW2
  Gene Name: F-box and WD repeat domain containing 2
  Uniprot ID: Q9UKT8
  ENST ID: ENST00000608872
  CDS Start-End: 189-1553
agcaccggaagccgctcccctgtgaggctgcggaccgggagcagcggccgcaggtccgggcgccatggctgcggagcggacccggccgctgcaaggctctggcggtccgagcgtgcctagtagctgtgaacccggcgcgaggtcccgggccccggggcgctcgctcaggtaaatttttccataaccttatggagagaaaggactttgagacatggcttgataacatttctgttacatttctttctctgacggacttgcagaaaaatgaaactctggatcacctgattagtctgagtggggcagtccagctcaggcatctctccaataacctagagactctcctcaagcgggacttcctcaaactccttcccctggagctcagtttttatttgttaaaatggctcgatcctcagactttactcacatgctgcctcgtctctaaacagtggaataaggtgataagtgcctgtacagaggtgtggcagactgcatgtaaaaatttgggctggcagatagatgattctgttcaggacgctttgcactggaagaaggtttatttgaaggctattttgagaatgaagcaactggaggaccatgaagcctttgaaacctcgtcattaattggacacagtgccagagtgtatgcactttactacaaagatggacttctctgtacagggtcagatgacttgtctgcaaagctgtgggatgtgagcacagggcagtgcgtttatggcatccagacccacacttgtgcagcggtgaagtttgatgaacagaagcttgtgacaggctcctttgacaacactgtggcttgctgggaatggagttccggagccaggacccagcactttcgggggcacacgggggcggtatttagcgtggactacaatgatgaactggatatcttggtgagcggctctgcagacttcactgtgaaagtatgggctttatctgctgggacatgcctgaacacactcaccgggcacacggaatgggtcaccaaggtagttttgcagaagtgcaaagtcaagtctctcttgcacagtcctggagactacatcctcttaagtgcagacaaatatgagattaagatttggccaattgggagagaaatcaactgtaagtgcttaaagacattgtctgtctctgaggatagaagtatctgcctgcagccaagacttcattttgatggcaaatacattgtctgtagttcagcacttggtctctaccagtgggactttgccagttatgatattctcagggtcatcaagactcctgagatagcaaacttggccttgcttggctttggagatatctttgccctgctgtttgacaaccgctacctgtacatcatggacttgcggacagagagcctgattagtcgctggcctctgccagagtacaggaaatcaaagagaggctcaagcttcctggcaggcgaagcatcctggctgaatggactggatgggcacaatgacacgggcttggtctttgccaccagcatgcctgaccacagtattcacctggtgttgtggaaggagcacggctgacaccatgagccaccaccgctgactgactttgggtgccggggctgcgggttttgggtgcaacctctgcggcagccgactgcatgaaccaaagttctcacctaatggtatcatcacgcagtgcacaatcatttatctatgttttgccaggggccagggctcggggtgggggagggcttgttttattgacatacaacgcagcatgctaatggggtacaccattgacttcatttgtacttagttatgttggtcagtgttagaggatgcattttgggttcatctttcttgagtggagtattggttttaagtaaagaaagttaaatgatccattaatctgctaattggttgcctatgaaatcacattgtctgttattaaagctttttaccatagcctttttttcttttgaagttgaagcaaaggtgctatgatgttgttacagcaactttcctcacacggggtttagctcttataagagccagtgttaaaacttccaccaaataccagtttataaacttccaccaaataccagtgctaaggaaagtctgtcttccagttcaaatccaattctgtaaattgaatgttagcaactcattctaaaccttatatcttggcagagtcaaggttggccatgtttaagatgtgagcgagttctgtagtttttgttgccatgtcggggaagctagtccccggcagcctggatgactgcacagcggtgccctggtatagcagaaaagagcagtgagctggaaggttagagaccgggcctcttaccctggaactctgcaccctctctgggtcccagcttccttgtctgtacagccaggtatgaagctcagtgatttctaagattctttctggtccttcacctactgaaatgtgtaaaagttgatcatgtatttttgtctgatccctgattcatggtttctttcaggtcggataatatttaaatgaaatgactgttacagagttttctataagaacatcaattatatgaaaaggatgaataaaagggaaatgtagaaaatatagctgattccacttagacagtttaagtaattggttgaagaaatgctgatagaagccatggtttaaatagggacacagtatgctatactagaaggatacctgaacccaacctaacttcctcctttgcctctaacttaatctgcagcctcaggcaagttaactttctcttctaagaccatcattttcttcatcttttaagtgagggaattgtcctagatgagggctcacaaacccaaatgcctaagggagccgtgcaggtaacataaatgagtaaaacattctggggaggattgtgctgtcccctggaaagttgatctaatagggcagttattcagctctgttttgtcattaggagaagcaagcccagggttggcaggtcttcacattgtttcaggaggagctagaaatccagatttttatttgaaatcctggatttttaaaacgttacaactgattaaagaaaatttgaaataaggtgagccaaacaaaacatgtccctgggttgccagattgtgtcctcctccctctctaaagttaggtaattttgtgattcagcagtggaaatgttagtggtcacaatcagggagagagtagagggagcaagcagtagaaaaatctcagccgctcttcagctgtctccccttgtattacaagggtggtggggagggatgtatttcattcacagaccaataggaaggtagtttgaagatgaacataagaattggaacctcagtgacagcttatgtctgggaacatgagttattccttcttgctgactccagtataaagcatatccattttacaggtgagaaaaagggttgctggcagagctgagaatgatgtgaactctagagtggggacctatctcttgcagaatctgcattagcatagagccagactctggacctctgagtgctgtgaagttgatagaaattaatggtgaatttcaaggacagatatcattaatatccatgttgaaactctgtggggtttaagcaaaagaacaatatcttcccccatcccacaaaatctgggtttaatctatctcacattgagttctgtgcatcagctctgcttagtactctagaaatagaaccggaatcacaactgaatctattttgcagaagccccaggagactttgggcaatgatgatggtaaatgactttttactttattattatttttttttttttgagacagagtttcgctcttactgcgcaggctggagtgcaatggcacgatcttggctcactgcaacctccgcctcctgggttcaagtgattctcctgcctcagcctcctaagtagctgggattacaagcatctgccatgacacccaactaatttttatatttttagtagagacagggttccaccatgttggccaggctggtcttgaactcctgacctcaggtcatccacctgccttggcctcccaaagtgctgggattacaggcgtgagccaccacgcctggccgagtttttactttttatcgagcctgaacagataactattactgatctaatgaccatccccaccctacctcactttcagatctatccaatagcttcaaagggcaagtaattataatcatttgtgggaaaagttttattaaaaagtgacaaacttgaagctgtatatagtatgttctatttcagtttttagtggtgaatacagaagtcatcaaggtggtacttggtgccgctggaattttttttttttcctaggcagtcttgctctgtcatacaggctggagtacagtggcatcatcatgcagctggattttgacagcagaacttcaggcagtaattggagtcctaatgtcagttcttccttatggaggcctttatttggcctgagattttattcaactactttatagatgctgggtttattcatactatcgccagtttttataaaaatggaaaactagctcatcctttttgcaaaagaaagcaaagtggggagtcagaatgagaagtggataggggataactaaaactattctttactctcctttcattgcctttgagagctagctcttgcacacactgactttggcttccttagcgcataggtaagggaattgcctttccctcttttgtgaatattctcatttctgaaaaattctaagtcatgagaagataagccctatcctttcttacaaggattggatttcttgggtgacactgtggtgtggtggaagccagcggcttctttcaggttcataaaggccatcataacaacttcaggcttcatggtgtggacagggatccaggagagctgagtggatgtgtgaagtttctgatagattctgtcatcattccaaaggaatgtagtttcctccagctcaatcatttgaagtaatacacattgccaaatctgactgtaacctgacattttagacctattggagaaataggaagaaagcccctccagtggaaggactggacttggaagaagttctgcaggaaggtgcatgcaattggatagctgttcatgagtgaaacgtggggaacattgctatgaaattgtaaggtttgcacttcatttttcgtagtttaaaaattgctctgttctggctgttgaaaacacttggtgtgaggtttgaatgaggattatataatcattctagtattcataggaaaatgattactgctctctatttgtaaaacaaaagaaataactttcggaaacagtattttagacatgaggaaattgtttgtattaggcattttgatctaacagaatcagctaaggatagtggatcctggctttacacatttctttgaccaaacccagctggcaacttgaagttgttactgtgtggcttccagattgcctagaggtgaatcctaccaacatcactgttttttttgttttgttttgttttttttgtatgtttttgagacagagtcttgctctatccccaggctggagtgcagtggcgtgatctcggcttactgcaacctcagcctcctgggttcaagcgattctcctgcctcagcctcctgagtagctgagactacaggcgcgtgccaccacgcccagctatttttgtatttttagtagagacgaggtttcactatgttggccaggatggtcttgatttcttgacctcgtgttctgcccgcctctacctcccaaagtgccgggattacaggcgtgagctgctgtgcccggccccagcatcacttttatagctttctgtgcctcttcctctgggccttggtgtatgaagccacttgcctttctctgttgggaagcgagcagaatcagattgctactcatgatgcagtccgggcagggcatactgtcacctttgcctgtggacacagttgtcaggataggggagaagccctttaggtccgtcttcttgacacagccctcctacctggttacgctggtgctttcgcttggtttagacaaccaagacacttgagaattatgctgtcctcagaatgtctgatgaaaagaacagattcacttttttgacacaatgcccattagccatctttggcagtgtttctgatcaaaggttccccatgcctgctctaggaaagtaaacttttttcagaataaatcctcaaatggattactgagtagtctttgcaccattcccatcagcctaatcagactgaatggtcacgctcagtgcaaaaagctgttttgctgttaggatgtttcagtgtttcttgtctttcctggaacagttcagttgtttaaatttagtaattcaatcctgaccagtgtaaacccacttaattattgcagcctaaagaattcagctacttctactcttcataaatgtgcccaagtaaatatgtgtttttaatattcaaccctggaaaattagtaattcagatgataaaagctcatgttttggtgtctttgtactcagattgtgaacaggcatatttcactgatttagacttagtatacttgatgagaatgctcaggttgaagagatagttctgtcagcaatccaacatctatagcaatgtggaaaaagtaatcaactcatatttcacgaatttgatgtatgttgtgatttagagggcatgagataaagtttatatttgaactgtgtggggtagggggaagaagaggttgcttaagcaaatagtggggtgattgtggaacaagatgtctctaagatgagaagttattttcttgcatcatagaagcactctttttacccgtgagtgattgtgttaactataaatcatttatatctgtacattaaagcagattccctcaattaggcaaatttggttagccaagcccaagttattgtttgtacttgaaagtaataaagctgcatttccttaaaaatatattctgtagttaagactttgtcttgctttccccccaaccacttcagacattttatccaaccaatgcagggacttttcaaaagtcagtgtgtttttgaaaatagaacaaccccttgagtgatctgaggtggctctgtttttttactgtttctgcatcttctagaaggtaaactcaacaatataaccatttctgaaggtgatccaaaaagcaaaacaataaaggtaaaacacaaggaaataattttggtgaatttcatgaatagttgcaaatgaagggatggggtgggtaaaagtcccattttgcttccagaccttggaatagtcttcctctcttttgcccaaggatgtgtctatccagcacatctttgcatgagttctttcttactaacttaaacttacggggcttcttgtcatttgagtaccacggccctgcacctttgatcccctgacagcatcattaagggcagattgtcattcctgttttacagatgagaaagctgtggcttggtaaagtgattcattgcctagaggagttatagtaagtggtgaggctgaagccctgattttcagcccccacacacctggattttttccatgttttcatgtttgtctgttctttctgtatttcaagtctcttcaaatcccgactgctgccttctgccttcaccacttgtgtgcactgttcaacctgtcttatgctttgcttccagggagtctccccaaccacttctttgagcacttacttgctcttgttcaatcttggtaactctccgttaccatcagggcacatctggattccttaacatcatggagccctagctaatttcttcgagcaaacagttcttgctcctctatttatttccacccttgcgctttgggtgttaatctcccatcctcgtggaaagttcttgatgttcctttccaccagtcctagggccaggctttaatcccattgatctcccactatctttaaagcctctgctgaccaccataccccactccagcctcactgagcatttttgtgtaaggttagtggtgcagttcatttagcaataaatactgttgtaccttttgcagtagacaactattaactttcatccttgattctcagttttttccaaaatacaagtgaatacctggtttccccagcaacattgtaagattgagagtaggaattcattgagattttaatgaattccatggattgtcttaagagctatctaaacttggaagaaaaataacttccagagcatctaaaattgaaaataaaagatcagaagcaaatgaaagatcaattccacacagcttttcctctcttagacgtccctcttctgccatatcctgtaaacatctgaagtgttctgagtacatttggagagaatatttaatgatcacactgtgattagacatgagtagtccctgccagtgggatgttcctgtcctttgcattttaaccacatgttctgtgctctctgtggtaaagataatctaacagtaataaaaacttatggagaaaattacccagagctcctttatcattacgatttttaatactctcttctaatccttatgcacatgtgtatggatttatgtactgcaaatcattgttttgtaatacattctcaaaaatgtgctttaggtttttacaactaccataatattttgtaattttccttcattactgtaatttgctaaaccatttctgttttggtagataattaggtagtttccagttctgctttttagaagatactacagagaacttctttgtgcatatttccttagaacaagttccagtagaagacttactcgcaaaagcagtggaattttttcttagtattttctgttacaggtacagaagagtgcatacaacacacagttttgtcgaatagttatgaagtgaacacttgtctaaccactgcccgagtcaagaaagaacatttctaaacatgtttgccaatttaatagatataaaggaagtatctcaaggttgctttaactgacatttctttaacacatgacaacatttttatgggggaggggactagagagaaaatgacatatttttatgtgtgcttatttgtatctcttgaattctgtctgcatcttttacccattacactttcaaatacttgtgaaatcattggtcgagatgaattatggctataaataaaatttcactaatctaattatcactgatttagaaataatagttcaacccaa

SEQ ID NO: 133517 - DNA, 2483 bp, Homo sapiens
  Payload ID: 6094
  Gene Symbol: FBXW4
  Gene Name: F-box and WD repeat domain containing 4
  Uniprot ID: P57775
  ENST ID: ENST00000331272
  CDS Start-End: 620-1858
aagtggctccaaggctgcaggtgtgaggggcgtgcccagggctcggcccgcgccgccccatgtgacccggtccgacatggtgtcgcctcctcccggggcggcggcggtggcggctcgggctgggctccgcgtcgggccggccccgcggccgctcatgggcagccagggccgctcggggccccccgggaacggcgggcccggcgagggcgagggcggagaggcgaggaagctgcaggaagggagggtggcgagggggaagcgaaggaaggggaaggggaagggaaaagcgagagcggggcaaggcggaagaggaagcggggcggaagggaagcccgggccgcagacggcgaaggaggcagccgggccgggggctgacgcgggagcgagggcatgcccaagggaggaagcagagggaggcagaagcgtggaggaaggggcgagaggcatcgtcaagggagtcgaggggagcgcaggggccgggaaggaggcacaaggaagagagtatgggaagaaggaggaatggagggtcagggctaggcggcgggagggcgccaggccgggaagagcacagggacgagggggtcaggcttgggccgacatcgcggggacaggggtggccatggcggcggcggccggggaggaggaggaggaggaggaggcggctcgggagtcggctgcccgcccggccgcggggcctgcgctctggcgcctgccggaggagctgctgctgctcatctgctcctacctggacatgcgggccctcggccgcctggcccaggtgtgccgctggctgcggcgcttcaccagctgcgatctgctctggcgccggatagcccgggcctcgctcaactccggcttcacgcggctcggcaccgacctgatgaccagtgtcccagtgaaggaacgagtgaaggtgtctcagaactggagactggggcgctgccgagaggggattctgctgaagtggagatgcagtcagatgccctggatgcagctagaggatgattctctgtacatatcccaggctaatttcatcctggcctaccagttccgtccagatggtgccagcttgaatcgtcggcctctgggagtctttgctgggcatgatgaggacgtttgccactttgtgctggccaactcgcatattgttagtgcaggaggggatgggaagattggcattcataagattcacagcaccttcactgtcaagtactcggctcatgaacaggaggtgaactgtgtggattgcaaagggggcatcattgtgagtggctccagggacaggacggccaaggtgtggcctttggcctcaggccggctggggcagtgcttacacaccatccagactgaagaccgagtctggtccattgctatcagcccattactcagctcttttgtgacagggacggcttgttgcgggcacttctcacccctgagaatctgggacctcaacagtgggcagctgatgacacacttgggcagtgactttcccccaggggctggggtgctggatgtcatgtatgagtcccctttcacactgctgtcctgtggctatgacacctatgttcgctactgggacctccgcaccagcgtccggaaatgtgtcatggagtgggaggagccccacgacagcaccctgtactgcctgcagacagatggcaaccacctgctggccacaggttcctcctactacggtgttgtacggctgtgggaccggcgtcaaagggcctgcctgcacgccttcccgctgacgtcgactcccctcagcagccctgtgtactgcctgcgtctcaccaccaagcatctctatgctgccctgtcttacaacctccacgtcctggattttcaaaacccatgaccgtcagggccacccctgcctctgggccagggaaaccagctactcagggacttctcttgcctggagggtgcagtgatagctcctcctcactgccccactgtgctcctgggcctgtgaccccagtgctcaggcaccttgcactagaggcttctgactcctgggactttggagcttaccagagatgcagtccctcccaggaacctgttggagaggcaggacctgctgctttagagtgcggctgaacccgggccttgcgtccctgtttggccagagcaaggatctggcctggagaggcccatcctataccccttattagagccatgacagcctacagagtgaggtgaggtgctcccaccttcccagatggttcctttctgccccttcctggaaggaaaggtgaggctgccaatagcctcctggcaccagccagacctcacccttgaccaacctctcggggctgggggttcattcctggggcactgtggcctggttttgctttgaaaccaagaaagagcaaagggaacccagcagttctgagtgagttctgagccagccctacctcaggctggctgttgagacatgctacaattttcatttttgtaaaaataaagcttgattgttcaca

SEQ ID NO: 133518 - DNA, 2274 bp, Homo sapiens
  Payload ID: 6095
  Gene Symbol: FBXW5
  Gene Name: F-box and WD repeat domain containing 5
  Uniprot ID: Q969U6
  ENST ID: ENST00000325285
  CDS Start-End: 81-1781
ggaagcgggtccgggtcgcgcagggcgggggcggcgcagcgggcggaggcggccgtgggccgcctgggcagaatgtcacgatggacgagggcggcacgcccctgctccccgacagcctggtctaccagatcttcctgagcctgggcccggccgacgtgctggccgccgggctggtgtgccgccaatggcaggccgtgtcgcgggacgagttcctgtggagggagcagttctaccgctactaccaggtggcccgcgacgtgccccgacacccagcggccatgtcctggtacgaggagttccagcggctgtatgacacggtgccctgcgtggaggtgcagacgctgcgggaacacacagaccaggtcctgcacctcagcttctcccattccgggtaccagttcgcgtcctgctccaaggactgcactgtgaagatctggagcaacgacctgaccatctcgctgctgcacagcgcggacatgcggccctacaactggagctacacccagttctcccagttcaacaaggacgactcgctactgctggcctcgggggtgttcctggggccgcacaactcctcatccggcgagattgctgtcatcagcctagactccttcgcgctgctgtcccgcgtgcggaacaagccctatgacgtgtttggctgttggctcaccgagaccagcctcatctcggggaacctgcaccgcatcggagatatcacctcctgctcggtgctgtggctcaacaatgccttccaggatgtggagtcagagaacgtcaacgtggtgaagcggctgttcaagatccagaacctcaatgccagcaccgtccgcacggtgatggtggccgactgcagccgcttcgacagccctgacctgctgctggaagccggtgacccggccacgtccccctgccgcatctttgacctgggcagcgacaacgaggaggtggtggctggcccggcccccgcccacgccaaggagggcttgcggcactttctggaccgcgtgctggaggggcgggcgcagccacagctgtcggagcgcatgctagagaccaaggtggccgagctgctggcccagggccacaccaagccacccgagcgcagtgccacaggcgccaagagcaagtacctcatcttcaccactggctgcctcacctactccccacaccagatcggcatcaagcagatcctgccacaccagatgaccacggcagggcccgtgctgggtgagggccggggctccgatgccttcttcgacgcgctggaccacgtcatagacatacacggacacatcatcggcatgggcctgtcgcccgacaacaggtacctgtacgtgaacagccgcgcctggcccaacggtgcggtggtggccgaccccatgcagccgccaccaatcgcggaggagattgacctgctggtgttcgacctcaagaccatgcgggaggtgaggcgggctctgcgtgcgcaccgcgcctacacgcccaacgacgagtgcttcttcatcttcctggacgtcagcagggacttcgtggccagcggggcggaggaccggcacggctacatctgggaccgccactacaacatctgtctggccaggctgcggcacgaggatgtggtcaactcagtggtcttcagtccccaggagcaggagctgctgctcacggccagcgacgacgccaccatcaaagcctggcgctccccacgcaccatgcgcgtcctccaggcacctcgcccacggcctcgcaccttcttctcctggcttgccagccagaggcgctgaggtgtgctgggtgcactggagccaccgggaccccttgaggacatcgccaggctctgtggctttttcccgagcgggagaggtggagatgcttatagcagttacgccttaggaaggggacaaccaggccccgccacacgctcacacacaaacctgctcacgcagctgtgatgcttggcacggggtggccagtgcagatggagcccaaggccccctcggcctcctgggcaacttggggtacacaggatactgggggtgccgctcctcactcaaccccaggctaggggtacacctgacccagctggcctcggcccggggcaccttcggctggtcctgtggggccctggacggtggcccagtggtggcaggggctgctcctggctgtggttgtgcgcccggggcttgggagcggccggtcacgctgctgtgggcccgagtgtgttgcatgtccacgcaccacccgttcagggccctgaataaacagttggcaacagca

SEQ ID NO: 133519 - DNA, 839 bp, Homo sapiens
  Payload ID: 6095
  Gene Symbol: FBXW5
  Gene Name: F-box and WD repeat domain containing 5
  ENST ID: ENST00000443788
  CDS Start-End: 452-839
gtgcaggagccccgaggccgcccgtgcgctcgtccccgccgtccgccccgagcccgccgggcagagctgctccagggccgcagggcggaggccactgcctggccgccccgagcttcctctcggcggaagcccgtccccggacggcgcctggtgtccccgtgcctcgcgtgcggcggtccgggccctggcgggctgaggggcgcccgctgccggccgcaggaggccgggggatgacgcggcggagaggggccggcccggcccgcccggagctgccgggtccttggttgggcggcggtacccgggcgtcccctgcagacacgcagccccgtggaactcccggcgggacggttggggctggaggaacaggacgcccgctctcggcctcccttcccgggcctgggctgagggcagccgttggtgggtttcagggccgcctgggcagaatgtcacgatggacgagggcggcacgcccctgctccccgacagcctggtctaccagatcttcctgagcctgggcccggccgacgtgctggccgccgggctggtgtgccgccaatggcaggccgtgtcgcgggacgagttcctgtggagggagcagttctaccgctactaccaggtggcccgcgacgtgccccgacacccagcggccatgtcctggtacgaggagttccagcggctgtatgacacggtgccctgcgtggaggtgcagacgctgcgggaacacacagaccaggtcctgcacctcagcttctcccattccgggtaccagttcgcgtcctgctccaaggactgcactgtgaagatctggagcaacgacctgaccatctcgctgctgcaca

SEQ ID NO: 133520 - DNA, 718 bp, Homo sapiens
  Payload ID: 6095
  Gene Symbol: FBXW5
  Gene Name: F-box and WD repeat domain containing 5
  ENST ID: ENST00000428398
  CDS Start-End: 118-718
gttgggcgggggcggcggtccgagcggctgcggcagcggaagcgggtccgggtcgcgcagggcgggggcggcgcagcgggcggaggcggccgtgggccgcctgggcagaatgtcacgatggacgagggcggcacgcccctgctccccgacagcctggtctaccagatcttcctgagcctgggcccggccgacgtgctggccgccgggctggtgtgccgccaatggcaggccgtgtcgcgggacgagttcctgtggagggagcagttctaccgctactaccaggtggcccgcgacgtgccccgacacccagcggccatgtcctggtacgaggagttccagcggctgtatgacacggtgccctgcgtggaggtgcagacgctgcgggaacacacagaccaggtcctgcacctcagcttctcccattccgggtaccagttcgcgtcctgctccaaggactgcactgtgaaggcgatcactacagccgcccctgccgaacagatctggagcaacgacctgaccatctcgctgctgcacagcgcggacatgcggccctacaactggagctacacccagttctcccagttcaacaaggacgactcgctactgctggcctcgggggtgttcctggggccgcacaactcctcatccggcgagattgctgtcatcagcctagactccttcgcgctgctgtcccgcgtgcggaacaagccctatgacg

SEQ ID NO: 133521 - DNA, 1932 bp, Homo sapiens
  Payload ID: 6095
  Gene Symbol: FBXW5
  Gene Name: F-box and WD repeat domain containing 5
  ENST ID: ENST00000487794
  CDS Start-End: 1-581
ggaacaagccctatgacgtgtttggctgttggctcaccgagaccagcctcatctcggggaacctgcaccgcatcggagatatcacctcctgctcggtgctgtggctcaacaatgccttccaggatgtggagtcagagaacgtcaacgtggtgaagcggctgttcaagatccagaacctcaatgccagcaccgtccgcacggtgatggtggccgactgcagccgcttcgacagccctgacctgctgctggaagccggtgacccggccacgtccccctgccgcatctttgacctgggcagcgacaacgaggaggtggtggctggcccggcccccgcccacgccaaggagggcttgcggcactttctggaccgcgtgctggaggggcgggcgcagccacagctgtcggagcgcatgctagagaccaaggtggccgagctgctggcccagggccacaccaagccacccgagcgcagtgccacaggcgccaagagcaagtacctcatcttcaccactggctgcctcacctactccccacaccagatcggtacacccctgccgccatgctgcccgcctcggtcctaggagcttgggggaggccgggcaggggtcctgaggggcagacagcaagcaagtccacaggcaaagctgggatcgttcactcgcccctggggtcacaagcccagacctggggcctgtgggatgagcagtgaaaacaaacgcaggcagggccgctggccagcaagcaaccgacgggcctgattcaggtctggggcccccggagcaggcagtgcccacggacctctgtggtgctcacagccccagagacaccactgaggcatcaagcagatcctgccacaccagatgaccacggcagggcccgtgctgggtgagggccggggctccgatgccttcttcgacgcgctggaccacgtcatagacatacacggacacatcatcggcatgggcctgtcgcccgacaacaggtacctgtacgtgaacagccgcgcctggcccaacggtgcggtggtggccgaccccatgcagccgccaccaatcgcggaggagattgacctgctggtgttcgacctcaagaccatgcgggaggtgaggcgggctctgcgtgcgcaccgcgcctacacgcccaacgacgagtgcttcttcatcttcctggacgtcagcagggacttcgtggccagcggggcggaggaccggcacggctacatctgggaccgccactacaacatctgtctggccaggctgcggcacgaggatgtggtcaactcagtggtcttcagtccccaggagcaggagctgctgctcacggccagcgacgacgccaccatcaaagcctggcgctccccacgcaccatgcgcgtcctccaggcacctcgcccacggcctcgcaccttcttctcctggcttgccagccagaggcgctgaggtgtgctgggtgcactggagccaccgggaccccttgaggacatcgccaggctctgtggctttttcccgagcgggagaggtggagatgcttatagcagttacgccttaggaaggggacaaccaggccccgccacacgctcacacacaaacctgctcacgcagctgtgatgcttggcacggggtggccagtgcagatggagcccaaggccccctcggcctcctgggcaacttggggtacacaggatactgggggtgccgctcctcactcaaccccaggctaggggtacacctgacccagctggcctcggcccggggcaccttcggctggtcctgtggggccctggacggtggcccagtggtggcaggggctgctcctggctgtggttgtgcgcccggggcttgggagcggccggtcacgctgctgtgggcccgagtgtgttgcatgtccacgcaccacccgttcagggccctgaataaacagttggcaacagca

SEQ ID NO: 133522 - DNA, 785 bp, Homo sapiens
  Payload ID: 6095
  Gene Symbol: FBXW5
  Gene Name: F-box and WD repeat domain containing 5
  ENST ID: ENST00000491246
  CDS Start-End: 51-404
gcggcgcagcgggcggaggcggccgtgggccgcctgggcagaatgtcacgatggacgagggcggcacgcccctgctccccgacagcctggtctaccagatcttcctgagcctgggcccggccgacgtgctggccgccgggctggtgtgccgccaatggcaggccgtgtcgcgggacgagttcctgtggagggagcagttctaccgctactaccaggtggcccgcgacgtgccccgacacccagcggccatgtcctggtacgaggagttccagcggctgtatgacacggtgccctgcgtggaggtgcagacgctgcgggaacacacagaccaggtcctgcacctcagcttctcccattccgggtaccagttcgcgtcctgctccaaggactgcactgtgaagtagcaggcccccgccccgcgacctggccaggcgatcactacagccgcccctgccgaacagatctggagcaacgacctgaccatctcgctgctgcacagcgcggacatgcggccctacaactggagctacacccagttctcccagttcaacaaggacgactcgctactgctggcctcgggggtgttcctggggccgcacaactcctcatccggcgagattgctgtcatcagcctagactccttcgcgctgctgtcccgcgtgcggaacaagccctatgacgtgtttggctgttggctcaccgagaccagcctcatctcggggaacctgcaccgcatcggagatatcacctcctgctcggtgctgtggctcaacaatgccttccag

SEQ ID NO: 133523 - DNA, 3743 bp, Homo sapiens
  Payload ID: 6096
  Gene Symbol: FBXW7
  Gene Name: F-box and WD repeat domain containing 7, E3 ubiquitin protein ligase
  Uniprot ID: Q969H0
  ENST ID: ENST00000263981
  CDS Start-End: 242-2125
agtgcgttgtgttcttacgggttccctggagcggatcaccatataattgatgtgcagtctgcattgctgaatcctggactgcaccattctgtgttcaagggaagatgtaatctgatccctctgctgctgagggaggaatctgttcagtcaaggctttgacagggcatagtctcctccaataatcttctccgttctctctcattattccctcgagttcttctcagtcaagctgcatgtatgtatgtgtgtcccgagaagcggtttgatactgagctgcatttgcctttactgtggagttttgttgccggttctgctccctaatcttccttttctgacgtgcctgagcatgtccacattagaatctgtgacatacctacctgaaaaaggtttatattgtcagagactgccaagcagccggacacacgggggcacagaatcactgaaggggaaaaatacagaaaatatgggtttctacggcacattaaaaatgattttttacaaaatgaaaagaaagttggaccatggttctgaggtccgctctttttctttgggaaagaaaccatgcaaagtctcagaatatacaagtaccactgggcttgtaccatgttcagcaacaccaacaacttttggggacctcagagcagccaatggccaagggcaacaacgacgccgaattacatctgtccagccacctacaggcctccaggaatggctaaaaatgtttcagagctggagtggaccagagaaattgcttgctttagatgaactcattgatagttgtgaaccaacacaagtaaaacatatgatgcaagtgatagaaccccagtttcaacgagacttcatttcattgctccctaaagagttggcactctatgtgctttcattcctggaacccaaagacctgctacaagcagctcagacatgtcgctactggagaattttggctgaagacaaccttctctggagagagaaatgcaaagaagaggggattgatgaaccattgcacatcaagagaagaaaagtaataaaaccaggtttcatacacagtccatggaaaagtgcatacatcagacagcacagaattgatactaactggaggcgaggagaactcaaatctcctaaggtgctgaaaggacatgatgatcatgtgatcacatgcttacagttttgtggtaaccgaatagttagtggttctgatgacaacactttaaaagtttggtcagcagtcacaggcaaatgtctgagaacattagtgggacatacaggtggagtatggtcatcacaaatgagagacaacatcatcattagtggatctacagatcggacactcaaagtgtggaatgcagagactggagaatgtatacacaccttatatgggcatacttccactgtgcgttgtatgcatcttcatgaaaaaagagttgttagcggttctcgagatgccactcttagggtttgggatattgagacaggccagtgtttacatgttttgatgggtcatgttgcagcagtccgctgtgttcaatatgatggcaggagggttgttagtggagcatatgattttatggtaaaggtgtgggatccagagactgaaacctgtctacacacgttgcaggggcatactaatagagtctattcattacagtttgatggtatccatgtggtgagtggatctcttgatacatcaatccgtgtttgggatgtggagacagggaattgcattcacacgttaacagggcaccagtcgttaacaagtggaatggaactcaaagacaatattcttgtctctgggaatgcagattctacagttaaaatctgggatatcaaaacaggacagtgtttacaaacattgcaaggtcccaacaagcatcagagtgctgtgacctgtttacagttcaacaagaactttgtaattaccagctcagatgatggaactgtaaaactatgggacttgaaaacgggtgaatttattcgaaacctagtcacattggagagtggggggagtgggggagttgtgtggcggatcagagcctcaaacacaaagctggtgtgtgcagttgggagtcggaatgggactgaagaaaccaagctgctggtgctggactttgatgtggacatgaagtgaagagcagaaaagatgaatttgtccaattgtgtagacgatatactccctgcccttccccctgcaaaaagaaaaaaagaaaagaaaaagaaaaaaatcccttgttctcagtggtgcaggatgttggcttggggcaacagattgaaaagacctacagactaagaaggaaaagaagaagagatgacaaaccataactgacaagagaggcgtctgctgtctcatcacataaaaggcttcacttttgactgagggcagctttgcaaaatgagactttctaaatcaaaccaggtgcaattatttctttattttcttctccagtggtcattgggcagtgttaatgctgaaacatcattacagattctgctagcctgttcttttaccactgacagctagacacctagaaaggaactgcaataatatcaaaacaagtactggttgactttctaattagagagcatctgcaacaaaaagtcatttttctggagtggaaaagcttaaaaaaattactgtgaattgtttttgtacagttatcatgaaaagcttttttttttttttttttgccaaccattgccaatgtcaatcaatcacagtattagcctctgttaatctatttactgttgcttccatatacattcttcaatgcatatgttgctcaaaggtggcaagttgtcctgggttctgtgagtcctgagatggatttaattcttgatgctggtgctagaagtaggtcttcaaatatgggattgttgtcccaaccctgtactgtactcccagtggccaaacttatttatgctgctaaatgaaagaaagaaaaaagcaaattatttttttttattttttttctgctgtgacgttttagtcccagactgaattccaaatttgctctagtttggttatggaaaaaagactttttgccactgaaacttgagccatctgtgcctctaagaggctgagaatggaagagtttcagataataaagagtgaagtttgcctgcaagtaaagaattgagagtgtgtgcaaagcttattttcttttatctgggcaaaaattaaaacacattccttggaacagagctattacttgcctgttctgtggagaaacttttctttttgagggctgtggtgaatggatgaacgtacatcgtaaaactgacaaaatattttaaaaatatataaaacacaaaattaaaataaagttgctggtcagtcttagtgttttacagtatttgggaaaacaactgttacagttttattgctctgagtaactgacaaagcagaaactattcagtttttgtagtaaaggcgtcacatgcaaacaaacaaaatgaatgaaacagtcaaatggtttgcctcattctccaagagccacaactcaagctgaactgtgaaagtggtttaacactgtatcctaggcgatcttttttcctccttctgtttatttttttgtttgttttatttatagtctgatttaaaacaatcagattcaagttggttaattttagttatgtaacaacctgacatgatggaggaaaacaacctttaaagggattgtgtctatggtttgattcacttagaaattttattttcttataacttaagtgcaataaaatgtgttttttca

SEQ ID NO: 133524 - DNA, 4976 bp, Homo sapiens
  Payload ID: 6096
  Gene Symbol: FBXW7
  Gene Name: F-box and WD repeat domain containing 7, E3 ubiquitin protein ligase
  Uniprot ID: Q969H0
  ENST ID: ENST00000281708
  CDS Start-End: 1231-3354
cccgcccctctctctggagtgaggcgagagccccgcacagagcgagggagacagcgagctgagctccgggcgctgccgctgccgctgccgccgccgccgccgctgagactgagagcgaaggagcatccgagagatccagtccccctgcactggccgccgccgagaccttcgctctcacctgggccagcgggagccgcggccgcactcctttccccccctcaccttcccggccggcagcggcggctgcacacgccggagccggagccagagccggagcccgagcctgagccggagccggcggcttggggggcagggaggcggctaccacgggccgggagtgggtagctgctccgcggtgagagaacgctgaggaggcgccagagcttctgcctcgtcccgtggggcgtggggcgagacccccaaggtgtagggaggggggtcccagccgcagcgacacatgcgggagccgggagcgggggcggcgccgagcggagccggccgggtccctcgccttgccgccgactcggccacccgcccggggccgtagcatcttgccccggagtgtatgaaccggggccccaaccaagctcggcaaccaccccccggccgggggggcggggaccccgatgtgaagcggcggctggggcggcggagagaacaggaccgacgccgccgtcctttcctcaccttccccctcccctcagccccctccgggggtcttctcccttggccagtcgccggccccccggctccttggctggactccgggaggagttcctagagcccccctcccccgccccagtcccgagggcggcggggccgggggggacccggggggccggccgcagcctccacccagaggaaactttacaaaaacaaaatccggagtctcccaaacctgactgtcccgggagaagtggccctggacgggcagaagccgcagcctgaaaagacccaggaagaggaaaagaggaggtaagcggggccgccgcctcccctcccctggcagcgcggaagagacccgggttgccgcctggtttagcgacacgagcaccgcttcttcctcagtaccgcgccggagccttccgcagctgccgcttcagtccgaaggaggaagggaaccaacccactttctcggcgccgcggctcttttctaaaagtaatgtgaaaacctttgcatcttctgatagtctagccaaggtccaagaagtagcaagctggcttttggaaatgaatcaggaactgctctctgtgggcagcaaaagacgacgaactggaggctctctgagaggtaacccttcctcaagccaggtagatgaagaacagatgaatcgtgtggtagaggaggaacagcaacagcaactcagacaacaagaggaggagcacactgcaaggaatggtgaagttgttggagtagaacctagacctggaggccaaaatgattcccagcaaggacagttggaagaaaacaataatagatttatttcggtagatgaggactcctcaggaaaccaagaagaacaagaggaagatgaagaacatgctggtgaacaagatgaggaggatgaggaggaggaggagatggaccaggagagtgacgattttgatcagtctgatgatagtagcagagaagatgaacatacacatactaacagtgtcacgaactccagtagtattgtggacctgcccgttcaccaactctcctccccattctatacaaaaacaacaaaaatgaaaagaaagttggaccatggttctgaggtccgctctttttctttgggaaagaaaccatgcaaagtctcagaatatacaagtaccactgggcttgtaccatgttcagcaacaccaacaacttttggggacctcagagcagccaatggccaagggcaacaacgacgccgaattacatctgtccagccacctacaggcctccaggaatggctaaaaatgtttcagagctggagtggaccagagaaattgcttgctttagatgaactcattgatagttgtgaaccaacacaagtaaaacatatgatgcaagtgatagaaccccagtttcaacgagacttcatttcattgctccctaaagagttggcactctatgtgctttcattcctggaacccaaagacctgctacaagcagctcagacatgtcgctactggagaattttggctgaagacaaccttctctggagagagaaatgcaaagaagaggggattgatgaaccattgcacatcaagagaagaaaagtaataaaaccaggtttcatacacagtccatggaaaagtgcatacatcagacagcacagaattgatactaactggaggcgaggagaactcaaatctcctaaggtgctgaaaggacatgatgatcatgtgatcacatgcttacagttttgtggtaaccgaatagttagtggttctgatgacaacactttaaaagtttggtcagcagtcacaggcaaatgtctgagaacattagtgggacatacaggtggagtatggtcatcacaaatgagagacaacatcatcattagtggatctacagatcggacactcaaagtgtggaatgcagagactggagaatgtatacacaccttatatgggcatacttccactgtgcgttgtatgcatcttcatgaaaaaagagttgttagcggttctcgagatgccactcttagggtttgggatattgagacaggccagtgtttacatgttttgatgggtcatgttgcagcagtccgctgtgttcaatatgatggcaggagggttgttagtggagcatatgattttatggtaaaggtgtgggatccagagactgaaacctgtctacacacgttgcaggggcatactaatagagtctattcattacagtttgatggtatccatgtggtgagtggatctcttgatacatcaatccgtgtttgggatgtggagacagggaattgcattcacacgttaacagggcaccagtcgttaacaagtggaatggaactcaaagacaatattcttgtctctgggaatgcagattctacagttaaaatctgggatatcaaaacaggacagtgtttacaaacattgcaaggtcccaacaagcatcagagtgctgtgacctgtttacagttcaacaagaactttgtaattaccagctcagatgatggaactgtaaaactatgggacttgaaaacgggtgaatttattcgaaacctagtcacattggagagtggggggagtgggggagttgtgtggcggatcagagcctcaaacacaaagctggtgtgtgcagttgggagtcggaatgggactgaagaaaccaagctgctggtgctggactttgatgtggacatgaagtgaagagcagaaaagatgaatttgtccaattgtgtagacgatatactccctgcccttccccctgcaaaaagaaaaaaagaaaagaaaaagaaaaaaatcccttgttctcagtggtgcaggatgttggcttggggcaacagattgaaaagacctacagactaagaaggaaaagaagaagagatgacaaaccataactgacaagagaggcgtctgctgtctcatcacataaaaggcttcacttttgactgagggcagctttgcaaaatgagactttctaaatcaaaccaggtgcaattatttctttattttcttctccagtggtcattgggcagtgttaatgctgaaacatcattacagattctgctagcctgttcttttaccactgacagctagacacctagaaaggaactgcaataatatcaaaacaagtactggttgactttctaattagagagcatctgcaacaaaaagtcatttttctggagtggaaaagcttaaaaaaattactgtgaattgtttttgtacagttatcatgaaaagcttttttttttttttttttgccaaccattgccaatgtcaatcaatcacagtattagcctctgttaatctatttactgttgcttccatatacattcttcaatgcatatgttgctcaaaggtggcaagttgtcctgggttctgtgagtcctgagatggatttaattcttgatgctggtgctagaagtaggtcttcaaatatgggattgttgtcccaaccctgtactgtactcccagtggccaaacttatttatgctgctaaatgaaagaaagaaaaaagcaaattatttttttttattttttttctgctgtgacgttttagtcccagactgaattccaaatttgctctagtttggttatggaaaaaagactttttgccactgaaacttgagccatctgtgcctctaagaggctgagaatggaagagtttcagataataaagagtgaagtttgcctgcaagtaaagaattgagagtgtgtgcaaagcttattttcttttatctgggcaaaaattaaaacacattccttggaacagagctattacttgcctgttctgtggagaaacttttctttttgagggctgtggtgaatggatgaacgtacatcgtaaaactgacaaaatattttaaaaatatataaaacacaaaattaaaataaagttgctggtcagtcttagtgttttacagtatttgggaaaacaactgttacagttttattgctctgagtaactgacaaagcagaaactattcagtttttgtagtaaaggcgtcacatgcaaacaaacaaaatgaatgaaacagtcaaatggtttgcctcattctccaagagccacaactcaagctgaactgtgaaagtggtttaacactgtatcctaggcgatcttttttcctccttctgtttatttttttgtttgttttatttatagtctgatttaaaacaatcagattcaagttggttaattttagttatgtaacaacctgacatgatggaggaaaacaacctttaaagggattgtgtctatggtttgattcacttagaaattttattttcttataacttaagtgcaataaaatgtgttttttcatgtt

SEQ ID NO: 133525 - DNA, 3572 bp, Homo sapiens
  Payload ID: 6096
  Gene Symbol: FBXW7
  Gene Name: F-box and WD repeat domain containing 7, E3 ubiquitin protein ligase
  Uniprot ID: Q969H0
  ENST ID: ENST00000296555
  CDS Start-End: 181-1950
ctcagacaggtcaggacatttggtaggggaaggttgaaagacaaaagcagcaggccttgggttctcagccttttaaaaactattattaaatatatatttttaaaatttagtggttagagcttttagtaatgtgcctgtattacatgtagagagtattcgtcaaccaagaggagttttaaaatgtcaaaaccgggaaaacctactctaaaccatggcttggttcctgttgatcttaaaagtgcaaaagagcctctaccacatcaaactgtgatgaagatatttagcattagcatcattgcccaaggcctccctttttgtcgaagacggatgaaaagaaagttggaccatggttctgaggtccgctctttttctttgggaaagaaaccatgcaaagtctcagaatatacaagtaccactgggcttgtaccatgttcagcaacaccaacaacttttggggacctcagagcagccaatggccaagggcaacaacgacgccgaattacatctgtccagccacctacaggcctccaggaatggctaaaaatgtttcagagctggagtggaccagagaaattgcttgctttagatgaactcattgatagttgtgaaccaacacaagtaaaacatatgatgcaagtgatagaaccccagtttcaacgagacttcatttcattgctccctaaagagttggcactctatgtgctttcattcctggaacccaaagacctgctacaagcagctcagacatgtcgctactggagaattttggctgaagacaaccttctctggagagagaaatgcaaagaagaggggattgatgaaccattgcacatcaagagaagaaaagtaataaaaccaggtttcatacacagtccatggaaaagtgcatacatcagacagcacagaattgatactaactggaggcgaggagaactcaaatctcctaaggtgctgaaaggacatgatgatcatgtgatcacatgcttacagttttgtggtaaccgaatagttagtggttctgatgacaacactttaaaagtttggtcagcagtcacaggcaaatgtctgagaacattagtgggacatacaggtggagtatggtcatcacaaatgagagacaacatcatcattagtggatctacagatcggacactcaaagtgtggaatgcagagactggagaatgtatacacaccttatatgggcatacttccactgtgcgttgtatgcatcttcatgaaaaaagagttgttagcggttctcgagatgccactcttagggtttgggatattgagacaggccagtgtttacatgttttgatgggtcatgttgcagcagtccgctgtgttcaatatgatggcaggagggttgttagtggagcatatgattttatggtaaaggtgtgggatccagagactgaaacctgtctacacacgttgcaggggcatactaatagagtctattcattacagtttgatggtatccatgtggtgagtggatctcttgatacatcaatccgtgtttgggatgtggagacagggaattgcattcacacgttaacagggcaccagtcgttaacaagtggaatggaactcaaagacaatattcttgtctctgggaatgcagattctacagttaaaatctgggatatcaaaacaggacagtgtttacaaacattgcaaggtcccaacaagcatcagagtgctgtgacctgtttacagttcaacaagaactttgtaattaccagctcagatgatggaactgtaaaactatgggacttgaaaacgggtgaatttattcgaaacctagtcacattggagagtggggggagtgggggagttgtgtggcggatcagagcctcaaacacaaagctggtgtgtgcagttgggagtcggaatgggactgaagaaaccaagctgctggtgctggactttgatgtggacatgaagtgaagagcagaaaagatgaatttgtccaattgtgtagacgatatactccctgcccttccccctgcaaaaagaaaaaaagaaaagaaaaagaaaaaaatcccttgttctcagtggtgcaggatgttggcttggggcaacagattgaaaagacctacagactaagaaggaaaagaagaagagatgacaaaccataactgacaagagaggcgtctgctgtctcatcacataaaaggcttcacttttgactgagggcagctttgcaaaatgagactttctaaatcaaaccaggtgcaattatttctttattttcttctccagtggtcattgggcagtgttaatgctgaaacatcattacagattctgctagcctgttcttttaccactgacagctagacacctagaaaggaactgcaataatatcaaaacaagtactggttgactttctaattagagagcatctgcaacaaaaagtcatttttctggagtggaaaagcttaaaaaaattactgtgaattgtttttgtacagttatcatgaaaagcttttttttttttttttttgccaaccattgccaatgtcaatcaatcacagtattagcctctgttaatctatttactgttgcttccatatacattcttcaatgcatatgttgctcaaaggtggcaagttgtcctgggttctgtgagtcctgagatggatttaattcttgatgctggtgctagaagtaggtcttcaaatatgggattgttgtcccaaccctgtactgtactcccagtggccaaacttatttatgctgctaaatgaaagaaagaaaaaagcaaattatttttttttattttttttctgctgtgacgttttagtcccagactgaattccaaatttgctctagtttggttatggaaaaaagactttttgccactgaaacttgagccatctgtgcctctaagaggctgagaatggaagagtttcagataataaagagtgaagtttgcctgcaagtaaagaattgagagtgtgtgcaaagcttattttcttttatctgggcaaaaattaaaacacattccttggaacagagctattacttgcctgttctgtggagaaacttttctttttgagggctgtggtgaatggatgaacgtacatcgtaaaactgacaaaatattttaaaaatatataaaacacaaaattaaaataaagttgctggtcagtcttagtgttttacagtatttgggaaaacaactgttacagttttattgctctgagtaactgacaaagcagaaactattcagtttttgtagtaaaggcgtcacatgcaaacaaacaaaatgaatgaaacagtcaaatggtttgcctcattctccaagagccacaactcaagctgaactgtgaaagtggtttaacactgtatcctaggcgatcttttttcctccttctgtttatttttttgtttgttttatttatagtctgatttaaaacaatcagattcaagttggttaattttagttatgtaacaacctgacatgatggaggaaaacaacctttaaagggattgtgtctatggtttgattcacttagaaattttattttcttataacttaagtgcaataaaatgtgttttttcatgtt

SEQ ID NO: 133526 - DNA, 1735 bp, Homo sapiens
  Payload ID: 6096
  Gene Symbol: FBXW7
  Gene Name: F-box and WD repeat domain containing 7, E3 ubiquitin protein ligase
  ENST ID: ENST00000393956
  CDS Start-End: 78-1673
attttgcttttcccttctagtcatgataaagtatttcttggatgagaaatttgcatttaatgttaaactaactgttaatgctattttttaaatgtatcagtcttctattaatatggctgataccaggacaaagtaccactgggcttgtaccatgttcagcaacaccaacaacttttggggacctcagagcagccaatggccaagggcaacaacgacgccgaattacatctgtccagccacctacaggcctccaggaatggctaaaaatgtttcagagctggagtggaccagagaaattgcttgctttagatgaactcattgatagttgtgaaccaacacaagtaaaacatatgatgcaagtgatagaaccccagtttcaacgagacttcatttcattgctccctaaagagttggcactctatgtgctttcattcctggaacccaaagacctgctacaagcagctcagacatgtcgctactggagaattttggctgaagacaaccttctctggagagagaaatgcaaagaagaggggattgatgaaccattgcacatcaagagaagaaaagtaataaaaccaggtttcatacacagtccatggaaaagtgcatacatcagacagcacagaattgatactaactggaggcgaggagaactcaaatctcctaaggtgctgaaaggacatgatgatcatgtgatcacatgcttacagttttgtggtaaccgaatagttagtggttctgatgacaacactttaaaagtttggtcagcagtcacaggcaaatgtctgagaacattagtgggacatacaggtggagtatggtcatcacaaatgagagacaacatcatcattagtggatctacagatcggacactcaaagtgtggaatgcagagactggagaatgtatacacaccttatatgggcatacttccactgtgcgttgtatgcatcttcatgaaaaaagagttgttagcggttctcgagatgccactcttagggtttgggatattgagacaggccagtgtttacatgttttgatgggtcatgttgcagcagtccgctgtgttcaatatgatggcaggagggttgttagtggagcatatgattttatggtaaaggtgtgggatccagagactgaaacctgtctacacacgttgcaggggcatactaatagagtctattcattacagtttgatggtatccatgtggtgagtggatctcttgatacatcaatccgtgtttgggatgtggagacagggaattgcattcacacgttaacagggcaccagtcgttaacaagtggaatggaactcaaagacaatattcttgtctctgggaatgcagattctacagttaaaatctgggatatcaaaacaggacagtgtttacaaacattgcaaggtcccaacaagcatcagagtgctgtgacctgtttacagttcaacaagaactttgtaattaccagctcagatgatggaactgtaaaactatgggacttgaaaacgggtgaatttattcgaaacctagtcacattggagagtggggggagtgggggagttgtgtggcggatcagagcctcaaacacaaagctggtgtgtgcagttgggagtcggaatgggactgaagaaaccaagctgctggtgctggactttgatgtggacatgaagtgaagagcagaaaagatgaatttgtccaattgtgtagacgatatactccctgcccttccccctgc

SEQ ID NO: 133527 - DNA, 671 bp, Homo sapiens
  Payload ID: 6096
  Gene Symbol: FBXW7
  Gene Name: F-box and WD repeat domain containing 7, E3 ubiquitin protein ligase
  ENST ID: ENST00000605042
  CDS Start-End: 197-671
tttttatctttattttttgctttcgtggataaactgcagtgagcatcctctgtataaattttttttttctgttttaggattacttccttaggatagattgccagaagtggagttactgggtcagaggaatgtgaaaacctttgcatcttctgatagtctagccaaggtccaagaagtagcaagctggcttttggaaatgaatcaggaactgctctctgtgggcagcaaaagacgacgaactggaggctctctgagaggtaacccttcctcaagccaggtagatgaagaacagatgaatcgtgtggtagaggaggaacagcaacagcaactcagacaacaagaggaggagcacactgcaaggaatggtgaagttgttggagtagaacctagacctggaggccaaaatgattcccagcaaggacagttggaagaaaacaataatagatttatttcggtagatgaggactcctcaggaaaccaagaagaacaagaggaagatgaagaacatgctggtgaacaagatgaggaggatgaggaggaggaggagatggaccaggagagtgacgattttgatcagtctgatgatagtagcagagaagatgaacatacacatactaacagtgtcacgaactccagtagtattgtggacctgcccgttcaccaactctcct

SEQ ID NO: 133528 - DNA, 2562 bp, Homo sapiens
  Payload ID: 6096
  Gene Symbol: FBXW7
  Gene Name: F-box and WD repeat domain containing 7, E3 ubiquitin protein ligase
  Uniprot ID: Q969H0
  ENST ID: ENST00000603548
  CDS Start-End: 181-2304
cagtccgaaggaggaagggaaccaacccactttctcggcgccgcggctcttttctaaaagtgattacttccttaggatagattgccagaagtggagttactgggtcagaggaatgtgaaaacctttgcatcttctgatagtctagccaaggtccaagaagtagcaagctggcttttggaaatgaatcaggaactgctctctgtgggcagcaaaagacgacgaactggaggctctctgagaggtaacccttcctcaagccaggtagatgaagaacagatgaatcgtgtggtagaggaggaacagcaacagcaactcagacaacaagaggaggagcacactgcaaggaatggtgaagttgttggagtagaacctagacctggaggccaaaatgattcccagcaaggacagttggaagaaaacaataatagatttatttcggtagatgaggactcctcaggaaaccaagaagaacaagaggaagatgaagaacatgctggtgaacaagatgaggaggatgaggaggaggaggagatggaccaggagagtgacgattttgatcagtctgatgatagtagcagagaagatgaacatacacatactaacagtgtcacgaactccagtagtattgtggacctgcccgttcaccaactctcctccccattctatacaaaaacaacaaaaatgaaaagaaagttggaccatggttctgaggtccgctctttttctttgggaaagaaaccatgcaaagtctcagaatatacaagtaccactgggcttgtaccatgttcagcaacaccaacaacttttggggacctcagagcagccaatggccaagggcaacaacgacgccgaattacatctgtccagccacctacaggcctccaggaatggctaaaaatgtttcagagctggagtggaccagagaaattgcttgctttagatgaactcattgatagttgtgaaccaacacaagtaaaacatatgatgcaagtgatagaaccccagtttcaacgagacttcatttcattgctccctaaagagttggcactctatgtgctttcattcctggaacccaaagacctgctacaagcagctcagacatgtcgctactggagaattttggctgaagacaaccttctctggagagagaaatgcaaagaagaggggattgatgaaccattgcacatcaagagaagaaaagtaataaaaccaggtttcatacacagtccatggaaaagtgcatacatcagacagcacagaattgatactaactggaggcgaggagaactcaaatctcctaaggtgctgaaaggacatgatgatcatgtgatcacatgcttacagttttgtggtaaccgaatagttagtggttctgatgacaacactttaaaagtttggtcagcagtcacaggcaaatgtctgagaacattagtgggacatacaggtggagtatggtcatcacaaatgagagacaacatcatcattagtggatctacagatcggacactcaaagtgtggaatgcagagactggagaatgtatacacaccttatatgggcatacttccactgtgcgttgtatgcatcttcatgaaaaaagagttgttagcggttctcgagatgccactcttagggtttgggatattgagacaggccagtgtttacatgttttgatgggtcatgttgcagcagtccgctgtgttcaatatgatggcaggagggttgttagtggagcatatgattttatggtaaaggtgtgggatccagagactgaaacctgtctacacacgttgcaggggcatactaatagagtctattcattacagtttgatggtatccatgtggtgagtggatctcttgatacatcaatccgtgtttgggatgtggagacagggaattgcattcacacgttaacagggcaccagtcgttaacaagtggaatggaactcaaagacaatattcttgtctctgggaatgcagattctacagttaaaatctgggatatcaaaacaggacagtgtttacaaacattgcaaggtcccaacaagcatcagagtgctgtgacctgtttacagttcaacaagaactttgtaattaccagctcagatgatggaactgtaaaactatgggacttgaaaacgggtgaatttattcgaaacctagtcacattggagagtggggggagtgggggagttgtgtggcggatcagagcctcaaacacaaagctggtgtgtgcagttgggagtcggaatgggactgaagaaaccaagctgctggtgctggactttgatgtggacatgaagtgaagagcagaaaagatgaatttgtccaattgtgtagacgatatactccctgcccttccccctgcaaaaagaaaaaaagaaaagaaaaagaaaaaaatcccttgttctcagtggtgcaggatgttggcttggggcaacagattgaaaagacctacagactaagaaggaaaagaagaagagatgacaaaccataactgacaagagaggcgtctgctgtctcatcacataaaaggcttcacttttgactgagggcagctttgc

SEQ ID NO: 133529 - DNA, 970 bp, Homo sapiens
  Payload ID: 6096
  Gene Symbol: FBXW7
  Gene Name: F-box and WD repeat domain containing 7, E3 ubiquitin protein ligase
  ENST ID: ENST00000604872
  CDS Start-End: 327-857
gaaactttacaaaaacaaaatccggagtctcccaaacctgactgtcccgggagaagtggccctggacgggcagaagccgcagcctgaaaagacccaggaagaggaaaagaggagtaccgcgccggagccttccgcagctgccgcttcagtccgaaggaggaagggaaccaacccactttctcggcgccgcggctcttttctaaaagtgattacttccttaggatagattgccagaagtggagttactgggtcagaggaatgtgaaaacctttgcatcttctgatagtctagccaaggtccaagaagtagcaagctggcttttggaaatgaatcaggaactgctctctgtgggcagcaaaagacgacgaactggaggctctctgagaggtaacccttcctcaagccaggtagatgaagaacagatgaatcgtgtggtagaggaggaacagcaacagcaactcagacaacaagaggaggagcacactgcaaggaatggtgaagttgttggagtagaacctagacctggaggccaaaatgattcccagcaaggacagttggaagaaaacaataatagatttatttcggtagatgaggactcctcaggaaaccaagaagaacaagaggaagatgaagaacatgctggtgaacaagatgaggaggatgaggaggaggaggagatggaccaggagagtgacgattttgatcagtctgatgatagtagcagagaagatgaacatacacatactaacagtgtcacgaactccagtagtattgtggacctgcccgttcaccaactctcctccccattctatacaaaaacaacaaaagtgagtatattcaatatattgttaacctgagaaactttacatatctattttaattgtaatgaaactttcctcacagtctttgtattactaaaaattaatcttaagatgtgtaataataaaatgaactagttttttgtcttaca

SEQ ID NO: 133530 - DNA, 2261 bp, Homo sapiens
  Payload ID: 6096
  Gene Symbol: FBXW7
  Gene Name: F-box and WD repeat domain containing 7, E3 ubiquitin protein ligase
  Uniprot ID: Q969H0
  ENST ID: ENST00000603841
  CDS Start-End: 76-2199
ctgcagaatgtgaaaacctttgcatcttctgatagtctagccaaggtccaagaagtagcaagctggcttttggaaatgaatcaggaactgctctctgtgggcagcaaaagacgacgaactggaggctctctgagaggtaacccttcctcaagccaggtagatgaagaacagatgaatcgtgtggtagaggaggaacagcaacagcaactcagacaacaagaggaggagcacactgcaaggaatggtgaagttgttggagtagaacctagacctggaggccaaaatgattcccagcaaggacagttggaagaaaacaataatagatttatttcggtagatgaggactcctcaggaaaccaagaagaacaagaggaagatgaagaacatgctggtgaacaagatgaggaggatgaggaggaggaggagatggaccaggagagtgacgattttgatcagtctgatgatagtagcagagaagatgaacatacacatactaacagtgtcacgaactccagtagtattgtggacctgcccgttcaccaactctcctccccattctatacaaaaacaacaaaaatgaaaagaaagttggaccatggttctgaggtccgctctttttctttgggaaagaaaccatgcaaagtctcagaatatacaagtaccactgggcttgtaccatgttcagcaacaccaacaacttttggggacctcagagcagccaatggccaagggcaacaacgacgccgaattacatctgtccagccacctacaggcctccaggaatggctaaaaatgtttcagagctggagtggaccagagaaattgcttgctttagatgaactcattgatagttgtgaaccaacacaagtaaaacatatgatgcaagtgatagaaccccagtttcaacgagacttcatttcattgctccctaaagagttggcactctatgtgctttcattcctggaacccaaagacctgctacaagcagctcagacatgtcgctactggagaattttggctgaagacaaccttctctggagagagaaatgcaaagaagaggggattgatgaaccattgcacatcaagagaagaaaagtaataaaaccaggtttcatacacagtccatggaaaagtgcatacatcagacagcacagaattgatactaactggaggcgaggagaactcaaatctcctaaggtgctgaaaggacatgatgatcatgtgatcacatgcttacagttttgtggtaaccgaatagttagtggttctgatgacaacactttaaaagtttggtcagcagtcacaggcaaatgtctgagaacattagtgggacatacaggtggagtatggtcatcacaaatgagagacaacatcatcattagtggatctacagatcggacactcaaagtgtggaatgcagagactggagaatgtatacacaccttatatgggcatacttccactgtgcgttgtatgcatcttcatgaaaaaagagttgttagcggttctcgagatgccactcttagggtttgggatattgagacaggccagtgtttacatgttttgatgggtcatgttgcagcagtccgctgtgttcaatatgatggcaggagggttgttagtggagcatatgattttatggtaaaggtgtgggatccagagactgaaacctgtctacacacgttgcaggggcatactaatagagtctattcattacagtttgatggtatccatgtggtgagtggatctcttgatacatcaatccgtgtttgggatgtggagacagggaattgcattcacacgttaacagggcaccagtcgttaacaagtggaatggaactcaaagacaatattcttgtctctgggaatgcagattctacagttaaaatctgggatatcaaaacaggacagtgtttacaaacattgcaaggtcccaacaagcatcagagtgctgtgacctgtttacagttcaacaagaactttgtaattaccagctcagatgatggaactgtaaaactatgggacttgaaaacgggtgaatttattcgaaacctagtcacattggagagtggggggagtgggggagttgtgtggcggatcagagcctcaaacacaaagctggtgtgtgcagttgggagtcggaatgggactgaagaaaccaagctgctggtgctggactttgatgtggacatgaagtgaagagcagaaaagatgaatttgtccaattgtgtagacgatatactccctgcccttccccctgc

SEQ ID NO: 133531 - DNA, 2343 bp, Homo sapiens
  Payload ID: 6097
  Gene Symbol: FBXW8
  Gene Name: F-box and WD repeat domain containing 8
  Uniprot ID: Q8N3Y1
  ENST ID: ENST00000309909
  CDS Start-End: 83-1879
gcggcggacacttccctgggcgggactgtctcgtggcacccggtggaaccgaggagaacgtggagcgccgggagcggcgaatatggacgactacagcctggatgagttccgtcggcgctggcaggaggagctggcgcaggcccaggcgccgaagaagcggcgacggcccgaggctgccgagaggcgggctcggcggccggaggtgggctccgggcgcggcgaacaggcctcgggggacccggcgctggcccagcgtctcctggagggcgcggggaggcccccggcggcgcgggcgactcgggccgaggggcaggacgtagcgagccgctcacgttctcctctggcccgcgagggcgccgggggcggggagcagctggtggaccagctcatccgcgacctgaatgaaatgaatgatgtgcctttctttgatatccaactgccttacgaattggcaatcaatatatttcagtatctggacaggaaagaactaggaagatgtgcacaggtgagcaagacgtggaaggtgattgcagaggatgaggtgctgtggtacaggctgtgccagcaggaagggcaccttccggatagcagcatctctgactattcttgctggaagctcatcttccaagagtgccgagccaaggaacacatgttacgaaccaactggaagaatcgcaaaggtgccgtgagcgagctggagcatgttcctgacacagttttgtgtgatgtgcattctcacgatggtgtggtcattgcgggatatacatcaggggatgtgagagtgtgggacacccgcacctgggactacgtagcccccttcctggaatcagaggacgaggaggatgagcctggaatgcagccaaatgtctcctttgtgaggataaacagctcgttggcagtagcagcttatgaggatgggtttcttaatatttgggatttaaggaccggaaagtaccctgttcatcgttttgagcacgatgcaagaatacaggcactagccctcagccaggacgatgcaaccgtggccacagcttctgcttttgatgtcgtgatgttatcccccaatgaggaggggtactggcagatagctgcggaatttgaagttccgaaactggttcagtaccttgaaatagttccagaaaccagaaggtaccctgtggcagtagccgctgctggagatctgatgtacctgctcaaagccgaagactccgccagaaccctcctttacgcccacggcccgcctgtcacatgtctagacgtctcggccaaccaagttgcttttggtgtacagggtctgggatgggtgtacgaaggaagcaagatcctggtgtatagcctggaagcaggacgccgcctcttgaagctgggtaacgttctccgtgacttcacgtgtgtcaacctcagcgacagccctcccaacctcatggtcagtggcaacatggacgggagggtgaggatccacgacctccgcagtggtaacatcgccctgtcgctctccgcccatcagctcagggtctctgctgtgcagatggatgactggaagatcgtcagtggaggcgaggaaggcctggtgtccgtgtgggattatcggatgaaccagaagctgtgggaggtgtattccgggcacccggtgcagcacatctcattcagcagccacagcctcatcacggccaacgtgccttaccagacggtaatgcgaaacgccgacctggacagcttcactactcacaggagacaccgggggctgatccgcgcctatgagtttgcggtggaccagctggccttccagagccctctccctgtctgccgttcatcctgtgacgccatggccactcactactacgacctcgcactggcctttccctataaccatgtttagggatgtgcctcagttgggagcaaggagaaaaatgggaagaaccagttttatccatcttaaaacgccaggcacctcttcacaggtggtaaacatttaggggaagaaagcagcccagggtgccatgcctgacagcacgcatctccctgacccctgcacttcccccagcgcctggggcaagctggcgtgtgccagggctcgagtcccacgtgctgccaactcaaacatagcctccttccccacccagctggccaccctggcctcagctccctcaggacgcctcagggatctcgctgcgcggtcctatacggtccctgcttagccagcttctgtgtgtccgccctcccagctccagccctgcaggccgtcttttccgtctccagccccttacctcttttcctccgagggcctttggatgtgcttgttcctggcctccaaggcaataacctccatgtccttttccctgt

SEQ ID NO: 133532 - DNA, 4648 bp, Homo sapiens
  Payload ID: 6097
  Gene Symbol: FBXW8
  Gene Name: F-box and WD repeat domain containing 8
  Uniprot ID: Q8N3Y1
  ENST ID: ENST00000455858
  CDS Start-End: 74-1672
acttccctgggcgggactgtctcgtggcacccggtggaaccgaggagaacgtggagcgccgggagcggcgaatatggacgactacagcctggatgagttccgtcggcgctggcaggaggagctggcgcaggcccaggcgccgaagaagcggcgacggcccgaggctgccgagaggcgggctcggcggccggagaatgaaatgaatgatgtgcctttctttgatatccaactgccttacgaattggcaatcaatatatttcagtatctggacaggaaagaactaggaagatgtgcacaggtgagcaagacgtggaaggtgattgcagaggatgaggtgctgtggtacaggctgtgccagcaggaagggcaccttccggatagcagcatctctgactattcttgctggaagctcatcttccaagagtgccgagccaaggaacacatgttacgaaccaactggaagaatcgcaaaggtgccgtgagcgagctggagcatgttcctgacacagttttgtgtgatgtgcattctcacgatggtgtggtcattgcgggatatacatcaggggatgtgagagtgtgggacacccgcacctgggactacgtagcccccttcctggaatcagaggacgaggaggatgagcctggaatgcagccaaatgtctcctttgtgaggataaacagctcgttggcagtagcagcttatgaggatgggtttcttaatatttgggatttaaggaccggaaagtaccctgttcatcgttttgagcacgatgcaagaatacaggcactagccctcagccaggacgatgcaaccgtggccacagcttctgcttttgatgtcgtgatgttatcccccaatgaggaggggtactggcagatagctgcggaatttgaagttccgaaactggttcagtaccttgaaatagttccagaaaccagaaggtaccctgtggcagtagccgctgctggagatctgatgtacctgctcaaagccgaagactccgccagaaccctcctttacgcccacggcccgcctgtcacatgtctagacgtctcggccaaccaagttgcttttggtgtacagggtctgggatgggtgtacgaaggaagcaagatcctggtgtatagcctggaagcaggacgccgcctcttgaagctgggtaacgttctccgtgacttcacgtgtgtcaacctcagcgacagccctcccaacctcatggtcagtggcaacatggacgggagggtgaggatccacgacctccgcagtggtaacatcgccctgtcgctctccgcccatcagctcagggtctctgctgtgcagatggatgactggaagatcgtcagtggaggcgaggaaggcctggtgtccgtgtgggattatcggatgaaccagaagctgtgggaggtgtattccgggcacccggtgcagcacatctcattcagcagccacagcctcatcacggccaacgtgccttaccagacggtaatgcgaaacgccgacctggacagcttcactactcacaggagacaccgggggctgatccgcgcctatgagtttgcggtggaccagctggccttccagagccctctccctgtctgccgttcatcctgtgacgccatggccactcactactacgacctcgcactggcctttccctataaccatgtttagggatgtgcctcagttgggagcaaggagaaaaatgggaagaaccagttttatccatcttaaaacgccaggcacctcttcacaggtggtaaacatttaggggaagaaagcagcccagggtgccatgcctgacagcacgcatctccctgacccctgcacttcccccagcgcctggggcaagctggcgtgtgccagggctcgagtcccacgtgctgccaactcaaacatagcctccttccccacccagctggccaccctggcctcagctccctcaggacgcctcagggatctcgctgcgcggtcctatacggtccctgcttagccagcttctgtgtgtccgccctcccagctccagccctgcaggccgtcttttccgtctccagccccttacctcttttcctccgagggcctttggatgtgcttgttcctggcctccaaggcaataacctccatgtccttttccctgtatttacttggggtgctcttctgtgacacttgccaccaccaccttccagtagcaagctggtagagctgtactttttcttcacagcttttaccatggtttataattatatacttatacagtttagtcatcaatgactattttgcttactattgtgtctatgatatgtgatacaaagcaaatattttctaaatattcattgactaaacagccatcaagatgaaacaggacaggagagaactgttcagtgtgatacagagctgccatttccaaagtattctggaagcaagccattgccttactcttgattttcaacagttctaaacagcaacagcatccacctaatataccttcagaatatcaaagcgaaaactgatagaactacaaagagaaataaaatccattctcacggcaggcaaatcagtgagaaaaatgtaaagatctggaggatttacttagtatcgctaacaagctggatccagtagatgcgtatggaatttcaaatacacatagacgatgcacaaaaaaccaccctgtacgaaggccacaaagaacagctcagatgcacaaagattcacaccatacaggccaaattatagaatcccccaaccccaagacactgcaccctatgggctataccctcaggcagggccctgcttttctaggaattgactccaatgcagaatagtgagaaatcaacaaaaagcaaaataagacaattccagacactcctgaatttacttggatttaaagaggttaataaaaacaaactataaactctctagactgggctgacagtaaaagcacagaatacaaaacccaggggatggggctgggaggggctgtgaggggctggcacctcagctcagaaaaggtagcagcaatcccaaagcagcagaaggcaggggttaaatcaggataaaaacagacatcagtggaatcgaaaaccaatagttagttaatataaagccagaaggttttgttttttttcaggtggggtctcgctctgtcacctagactagactggagtgcaatggcctgatctcggctcactgcaacctctgcctcccgagttcaagcaattctcctgcctcagcctcctgagtagctgggattacaggcgtccgctaccacaactggctaatttttacatttttagtagagacgggggatattgctatgttggccaggctggtctcaaacttctgacctcaaatgattgcctgcctcagcctcccaaagtgctgggattacaggtgtaagtcactgtacccagcccaaaagcagtttaaaaaaaaaaaagacaaaatatacaactcttgataaaacataaaggtacagtggtctatgaggaagagaaaaggtacctgaggatgcagaagtacctaccacatgggaaccgtttgtccacactcattccagagaaaaccgagtcctctcagttgcacacgtgtacgtatcagtgggaagtgcttgccattactccaaagcctagaaccttcacgtcatgaaggttctggaaggtttttcagattgcttaagatacgcagccattccatattcatctccaactacacaggggaacggagcagatagagctgcgactgggaagcgtcaccttcccgtccagagcgctttctttcagaccctgcctacctgcaggcagatggaccggagggttttctgcttcctttcaaccagataacttcctaagtggagatggcctgtaggtagcaaatgcaggattttgtttactttcatcatgtcatgtggtggtcagactgctcgctggtggcctcgctttagaaggttttcatcaagccccgccctttctctctcatagtcttaatgcgtctggaccactggggaaaatatttttcttttcaaaaagcagccccttcagtctgcgttcccagttcattttgcaggcgcattcgcccttcctagtttgcagcaattaaagataacggagtgtaaagtcattagacccagaattagagcagccagcagctggcccagtgtaaaaatgtcccaagtgtagcccctcccaccgcagagcctgtttctaacgtacctgccattcgtggaagtcgcctgggttttgtaaaggagaattttttggactcaagctgtcatcttcaagcacgccaacttcaggcagtgttttctactgcaaacctccacatcctggaatcaatcacactgacagggaaaggataaatgctcctttataagccaacatgtatccaaattaagcccccttacctttatccagaccctttcacaaacaagttctgagtttttagccaattgatcctctactttccttctttagtccctctcagggacgcctccatccccggctcccctaaaggtagaagatactcgagcatgctgccaggggagctggatggtgaaacacctgaagatctcatatcgcctctcaaaacactgtcggacttgctttctgctttatgatgtccgtagttgttctaatattaaatgctttgaatttc

SEQ ID NO: 133533 - DNA, 1738 bp, Homo sapiens
  Payload ID: 6098
  Gene Symbol: FBXW9
  Gene Name: F-box and WD repeat domain containing 9
  Uniprot ID: Q5XUX1
  ENST ID: ENST00000393261
  CDS Start-End: 63-1439
ggaagtgccctcgtgctgcctaggagacaagacgcgaggccggcagcgcccacccggtcgcaatggagcttcccctagggcggtgcgatgattcccgcacctgggacgatgactcggacccagagtcagagacagacccagacgcgcaggccaaggcctacgtggcccgcgttctcagtccgccaaaatccgggctggcgttctcgcgcccctcgcagctatccacacccgccgcgtccccgagcgcttcggagcctcgggccgcgtccagggtttcggccgtaagtgagccgggccttctgagccttcccccggagctgctgctcgagatctgctcctacctggacgcccgcctcgtgctccacgtcctgtcgcgggtgtgccacgcgctccgcgacctcgtgtctgaccatgtcacctggaggctacgcgcgctacgccgcgtacgcgcgccctacccagtggtggaagagaagaactttgactggccggcagcctgcattgcgctggagcagcacctgtcccgctgggcagaggatgggcgctgggtcgaatacttctgcctggccgaaggccacgtggcttccgttgactcagtgctgctgctccagggtgggtcactctgtctgtcgggctcccgagatcgcaacgtcaacttgtgggacctgcggcagctggggacggagtccaaccaggttctgatcaagaccttaggcactaagcgaaatagtacccatgagggctgggtgtggtcactggcagcgcaggaccaccgcgtgtgctccggctcctgggacagcacagtgaagctctgggacatggcagcggatgggcagcagttcggcgagataaaggccagctcagccgtgctgtgcctctcctacctgcctgacatcctggtgactggcacctatgacaagaaggtgaccatctacgaccccagagccggcccagccctgttgaagcaccagcaactacactccagacccgtgctgaccctgctggcggatgaccggcacatcatctcaggcagcgaggaccacaccctggtggtggtggaccgccgagccaacagcgtcctgcagcgtctgcagctggactcctacctgctctgcatgtcctaccaggaaccccagctctgggctggtgacaaccagggcctgctgcacgtcttcgccaaccgcaacggctgcttccagcttatccggtcctttgatgtgggccacagctttcccatcactgggatccagtactccgtgggagccttgtacaccacatccactgacaagaccatccgggtgcacgtgcccacagacccaccaaggaccatttgcacccgaaggcatgacaatgggctcaatagggtctgtgctgagggcaacctggtggtggccggctctggagacctgtcgctagaggtctggaggctgcaggcctgagcaggtgggcgtggatgtggatactgcctgccggaggctgggcttcctcctctgttcttgggggaccatccccaatgttggtgctgcctccgccccgtgggcctagggcacaaggagtcccagccacattcgggtgagcgtcctggcctgggccctatgcccgggggaagggtgaaattggggttcaggcccacccagggggccgcttcccactcttgggccctggttttgttatgatttggatgccccgctctcagttgagagcgaaggagaaataaacctgacatgttggtgcttgg

SEQ ID NO: 133534 - DNA, 1437 bp, Homo sapiens
  Payload ID: 6098
  Gene Symbol: FBXW9
  Gene Name: F-box and WD repeat domain containing 9
  Uniprot ID: Q5XUX1
  ENST ID: ENST00000587955
  CDS Start-End: 1-1437
atggagcttcccctagggcggtgcgatgattcccgcacctgggacgatgactcggacccagagtcagagacagacccagacgcgcaggccaaggcctacgtggcccgcgttctcagtccgccaaaatccgggctggcgttctcgcgcccctcgcagctatccacacccgccgcgtccccgagcgcttcggagcctcgggccgcgtccagggtttcggccgtaagtgagccgggccttctgagccttcccccggagctgctgctcgagatctgctcctacctggacgcccgcctcgtgctccacgtcctgtcgcgggtgtgccacgcgctccgcgacctcgtgtctgaccatgtcacctggaggctacgcgcgctacgccgcaagaactttgactggccggcagcctgcattgcgctggagcagcacctgtcccgctgggcagaggatgggcgctgggtcgaatacttctgcctggccgaaggccacgtggcttccgttgactcagtgctgctgctccagggtgggtcactctgtctgtcgggctcccgagatcgcaacgtcaacttgtgggacctgcggcagctggggacggagtccaaccaggttctgatcaagaccttaggcactaagcgaaatagtacccatgagggctgggtgtggtcactggcagcgcaggaccaccgcgtgtgctccggctcctgggacagcacagtgaagctctgggacatggcagcggatgggcagcagttcggcgagataaaggccagctcagccgtgctgtgcctctcctacctgcctgacatcctggtgactggcacctatgacaagaaggtgaccatctacgaccccagagacaggatggagacccgggatgctctcatgggctggggggggccttcgaggggctctgatatccctcctcaccggcccatcacccatgaagccggcccagccctgttgaagcaccagcaactacactccagacccgtgctgaccctgctggcggatgaccggcacatcatctcaggcagcgaggaccacaccctggtggtggtggaccgccgagccaacagcgtcctgcagcgtctgcagctggactcctacctgctctgcatgtcctaccaggaaccccagctctgggctggtgacaaccagggcctgctgcacgtcttcgccaaccgcaacggctgcttccagcttatccggtcctttgatgtgggccacagctttcccatcactgggatccagtactccgtgggagccttgtacaccacatccactgacaagaccatccgggtgcacgtgcccacagacccaccaaggaccatttgcacccgaaggcatgacaatgggctcaatagggtctgtgctgagggcaacctggtggtggccggctctggagacctgtcgctagaggtctggaggctgcaggcctga

SEQ ID NO: 133535 - DNA, 1581 bp, Homo sapiens
  Payload ID: 6098
  Gene Symbol: FBXW9
  Gene Name: F-box and WD repeat domain containing 9
  ENST ID: ENST00000587296
  CDS Start-End: 39-557
agacaagacgcgaggccggcagcgcccacccggtcgcaatggagcttcccctagggcggtgcgatgattcccgcacctgggacgatgactcggacccagagtcagagacagacccagacgcgcaggccaaggcctacgtggcccgcgttctcagtccgccaaaatccgggctggcgttctcgcgcccctcgcagctatccacacccgccgcgtccccgagcgcttcggagcctcgggccgcgtccagggtttcggccgtaagtgagccgggccttctgagccttcccccggagctgctgctcgagatctgctcctacctggacgcccgcctcgtgctccacgtcctgtcgcgggtgtgccacgcgctccgcgacctcgtgtctgaccatgtcacctggaggctacgcgcgctacgccgcgtacgcgcgccctacccagtggtggaagggtgggtcactctgtctgtcgggctcccgagatcgcaacgtcaacttgtgggacctgcggcagctggggacggagtccaaccaggttctgatcaagaccttaggcactaagcgaaatagtacccatgagggccagctcagccgtgctgtgcctctcctacctgcctgacatcctggtgactggcacctatgacaagaaggtgaccatctacgaccccagagccggcccagccctgttgaagcaccagcaactacactccagacccgtgctgaccctgctggcggatgaccggcacatcatctcaggcagcgaggaccacaccctggtggtggtggaccgccgagccaacagcgtcctgcagcgtctgcagctggactcctacctgctctgcatgtcctaccaggaaccccagctctgggctggtgacaaccagggcctgctgcacgtcttcgccaaccgcaacggctgcttccagcttatccggtcctttgatgtgggccacagctttcccatcactgggatccagtactccgtgggagccttgtacaccacatccactgacaagaccatccgggtgcacgtgcccacagacccaccaaggaccatttgcacccgaaggcatgacaatgggctcaatagggtctgtgctgagggcaacctggtggtggccggctctggagacctgtcgctagaggtctggaggctgcaggcctgagcaggtgggcgtggatgtggatactgcctgccggaggctgggcttcctcctctgttcttgggggaccatccccaatgttggtgctgcctccgccccgtgggcctagggcacaaggagtcccagccacattcgggagttggtggcggccgggatgcccacaaggaaggggtcattcttggcctgctccgtgcagaacttcagcagatcggcggccatctttggacacctgcagaccaactggttcagccagaccagacccaggcatgcacctgtcccctggcccatgtgttcccacctcttcccgcctcctgcactggccccgaccctcaccttcacttggtcgatgcctgcctccatctggagctgctccactgcccagagggcctgcccaatgtcactgttgatggccaccttgctgg

SEQ ID NO: 133536 - DNA, 3654 bp, Homo sapiens
  Payload ID: 6099
  Gene Symbol: FBXO10
  Gene Name: F-box protein 10
  ENST ID: ENST00000276960
  CDS Start-End: 120-1841
tggccgcacgccgcaatcctaccggctgctgcggctccagcgggggcggcgggtggcttccagggcaccggcggccgcggcccggactccgcggtgggcgagcgccctgtgaggtgaccatggaggctggtggcctccccttggagctgtggcgcatgatcttagcctacttgcaccttcccgacctgggccgctgcagcctggtatgcagggcctggtatgaactgatcctcagtctcgacagcacccgctggcggcagctgtgtctgggttgcaccgagtgccgccatcccaattggcccaaccagccagatgtggagcctgagtcttggagagaagccttcaagcagcattaccttgcatccaagacatggaccaagaatgccttggacttggagtcttccatctgcttttctctattccgccggaggagggaacgacgtaccctgagtgttgggccaggccgtgagtttgacagcctgggcagtgccttggccatggccagcctgtatgaccgaattgtgctcttcccaggtgtgtacgaagagcaaggtgaaatcatcttgaaggtgcctgtggagattgtagggcaggggaagttgggtgaagtggccctgctggccagcattgatcagcactgctcaaccacacgcctgtgcaacctcgtcttcacgccagcctggttctcacccatcatgtataagacaacatcaggtcacgtccagtttgacaactgcaactttgagaacgggcacatccaggtccatggcccgggtacttgccaagtgaagttctgtaccttcaaaaacacccatatcttcctgcacaacgtgcccctgtgtgtcctggaaaactgtgaatttgtgggcagtgaaaacaactctgtgactgttgagggtcacccatctgcagataagaactgggcctacaagtatctactagggcttatcaagtcctcacccacttttctccccacagaggactctgactttttaatgtccctggacctagagagccgggaccaggcctggagcccaaagacctgtgacattgttatcgagggcagccagagccctaccagcccagcctctagctccccaaagccaggctccaaggctggctcacaggaggcagaggtgggtagtgatggtgaaagggtggcccagaccccggacagcagcgatggaggcctgagtcccagcggtgaggatgaagatgaggaccagctgatgtacagactatcctaccaagtgcagggcccacgccctgtattggggggctcatttctgggcccacctctaccaggagcatccattcagctgcccagctgcctagtgctgaactcactgcagcaggagctgcagaaggataaggaggccatggcactggccaactccgtgcagggctgcctcatccgcaagtgcctcttccgggacgggaagggaggcgtcttcgtctgctcccacggcagagccaagatggaaggaaacatcttccggaacctgacttacgcagtgcggtgtatacataatagcaagatcatcatgctcaggaacgacatttaccgctgccgagcgtcaggcatctttcttcgcttggagggcggtggcttgattgccggcaacaacatttaccacaatgcagaggctggtgtagacatccggaaaaagtccaacccactcatactgtgtaaccagatccaccatggccttcgctctggcattgtcgtccttggcaatgggaaaggcatcatccggaacaatcaaatcttttccaataaggaggctggcatttacatcctgtaccacggaaaccccgttgtgagaaaatgtcatccgtgagaatcagtggggaggtgtggacatccgccgtggagggatccccgttctcaggagtaacctcatctgctttggctattcagatggtgtggttgtgggagacgaaggcaaaggcctcatagaaggaaataccatctacgctaacaagggctgtggtgtgtggatgatgtcgtccagcctcccccatgtcaccagcaaccacgtcagctacaatggcctgtatggagtggcagtatttagccagaaggatggctccagcgagttacctcgaggccacagggctcaagagaacttcagcgaggatggggacgccatcctctgggagacagagctggagaaggaggacgacccactgcgccggcccatcaccatagctcttgttgagtctaacagtattaatcacaatggagcctcaggactctatgtccagagcagcgaggcactgcatgtcatcaccaatgtgatccacgcgaatggggacagaggcattactgtggcccagagcagccaacccacccgagtggccaacaacagcatctcctgcaaccggcaaagtggggtcaaggttgaggcccagtgcaaagtggagctccggggcaatggtatctatgacaacagaggccacggcattatcaccaagggcgacagcaccatcgtcattgaaaacgatatcattggcaaccggggcagcgggctgcagctgctgcccaggtccgacactaaagtaataaagaaccggatccactcgttccgggcctacggcatcgccgtgcggggccgtgccaaggccctggtgcaggaaaacatcatcttccagggcaaaaccagtaagaccatctttcagcagatctcaaacaaccgagaatgcatcatgcaaaacaacaagttcctggtcttcaagaaaaagtgagtgcttggggttgcctgaacgagtcctctagagccacagtaagctccctgaagaagccaggcccacacccagggattgtggctgcccgggctccctgcaaccctgccagctgtcgactccagtcagaaaaaggcctgtgcctggctctatgtcaggcccgggctgaggactccccaggagggaacaagctttttaagagtcaggggtatgtggtttcagatctcagctctgcaggttactggctgtgtgaccttgggcaacttacttcacatcttcgagccttagtaaaatccatttaataagatcacactatctggctgaatctctgaggggctgtaaaaatgttagttgatgctgctgctgtcctttagtcactctgcctcaatgtatcacaattgccgccacccatcttcctcaaacctgtctgtcctttcacgttctccatttcagcgacatcaccatccactcagtgttctgacaacaaaacttctgctgcctttttctccctaatccgaagatgtccagtcagtcagtcaccaggtcttgttgattctgcttctaaaatgttcctttttccagcacctcctcttccccaactgcccccatcctaattcaggtctcagcaccgctcaccctaacctgtaccgcctgtgttactgcaatgcacagctgttccagttgcttctgcttgggctgtgttctgattggtccgtgctttcgctttcacattctggttgtaaaatcatactgatatttgctgtagttggtatcactcctgcaccgccaatgtcacctgtccccctgcagcagcctcctgccagtctccctgcccgtggccaccccctgctccactctggaggttgtcccatgcatcctgccaggttaatctttctaagtgagagctct

SEQ ID NO: 133537 - DNA, 4575 bp, Homo sapiens
  Payload ID: 6099
  Gene Symbol: FBXO10
  Gene Name: F-box protein 10
  Uniprot ID: Q9UK96
  ENST ID: ENST00000432825
  CDS Start-End: 50-2920
gcggccgcggcccggactccgcggtgggcgagcgccctgtgaggtgaccatggaggctggtggcctccccttggagctgtggcgcatgatcttagcctacttgcaccttcccgacctgggccgctgcagcctggtatgcagggcctggtatgaactgatcctcagtctcgacagcacccgctggcggcagctgtgtctgggttgcaccgagtgccgccatcccaattggcccaaccagccagatgtggagcctgagtcttggagagaagccttcaagcagcattaccttgcatccaagacatggaccaagaatgccttggacttggagtcttccatctgcttttctctattccgccggaggagggaacgacgtaccctgagtgttgggccaggccgtgagtttgacagcctgggcagtgccttggccatggccagcctgtatgaccgaattgtgctcttcccaggtgtgtacgaagagcaaggtgaaatcatcttgaaggtgcctgtggagattgtagggcaggggaagttgggtgaagtggccctgctggccagcattgatcagcactgctcaaccacacgcctgtgcaacctcgtcttcacgccagcctggttctcacccatcatgtataagacaacatcaggtcacgtccagtttgacaactgcaactttgagaacgggcacatccaggtccatggcccgggtacttgccaagtgaagttctgtaccttcaaaaacacccatatcttcctgcacaacgtgcccctgtgtgtcctggaaaactgtgaatttgtgggcagtgaaaacaactctgtgactgttgagggtcacccatctgcagataagaactgggcctacaagtatctactagggcttatcaagtcctcacccacttttctccccacagaggactctgactttttaatgtccctggacctagagagccgggaccaggcctggagcccaaagacctgtgacattgttatcgagggcagccagagccctaccagcccagcctctagctccccaaagccaggctccaaggctggctcacaggaggcagaggtgggtagtgatggtgaaagggtggcccagaccccggacagcagcgatggaggcctgagtcccagcggtgaggatgaagatgaggaccagctgatgtacagactatcctaccaagtgcagggcccacgccctgtattggggggctcatttctgggcccacctctaccaggagcatccattcagctgcccagctgcctagtgctgaactcactgcagcaggagctgcagaaggataaggaggccatggcactggccaactccgtgcagggctgcctcatccgcaagtgcctcttccgggacgggaagggaggcgtcttcgtctgctcccacggcagagccaagatggaaggaaacatcttccggaacctgacttacgcagtgcggtgtatacataatagcaagatcatcatgctcaggaacgacatttaccgctgccgagcgtcaggcatctttcttcgcttggagggcggtggcttgattgccggcaacaacatttaccacaatgcagaggctggtgtagacatccggaaaaagtccaacccactcatactgtgtaaccagatccaccatggccttcgctctggcattgtcgtccttggcaatgggaaaggcatcatccggaacaatcaaatcttttccaataaggaggctggcatttacatcctgtaccacggaaaccccgttgtgagcgggaaccacatcttcaagggccgtgctgccggcatagcagtgaatgagaacggcaaaggcctcatcacagaaaatgtcatccgtgagaatcagtggggaggtgtggacatccgccgtggagggatccccgttctcaggagtaacctcatctgctttggctattcagatggtgtggttgtgggagacgaaggcaaaggcctcatagaaggaaataccatctacgctaacaagggctgtggtgtgtggatgatgtcgtccagcctcccccatgtcaccagcaaccacgtcagctacaatggcctgtatggagtggcagtatttagccagaaggatggctccagcgagttacctcgaggccacagggctcaagagaacttcagcgaggatggggacgccatcctctgggagacagagctggagaaggaggacgacccactgcgccggcccatcaccatagctcttgttgagtctaacagtattaatcacaatggagcctcaggactctatgtccagagcagcgaggcactgcatgtcatcaccaatgtgatccacgcgaatggggacagaggcattactgtggcccagagcagccaacccacccgagtggccaacaacagcatctcctgcaaccggcaaagtggggtcaaggttgaggcccagtgcaaagtggagctccggggcaatggtatctatgacaacagaggccacggcattatcaccaagggcgacagcaccatcgtcattgaaaacgatatcattggcaaccggggcagcgggctgcagctgctgcccaggtccgacactaaagtaataaagaaccggatccactcgttccgggcctacggcatcgccgtgcggggccgtgccaaggccctggtgcaggaaaacatcatcttccagggcaaaaccagtaagaccatctttcagcagatctcaaacaaccgagaatgcatcatgcaaaacaacaagttcctggtcttcaagaaaaagtctgatacgtggcgcctggtgaacccaccagcacggccccaccttgaaaattctctcagacgtccctcggcagcccacaatgggcagaaggtgacagccatggcaacgaggatcacagcccgggtggaaggtggttaccacagcaaccgcagtgtcttctgcaccatcctgtgaggacacagacctgcttcagggccaagcctggatgggtgctcagaggagctaaggtggaaatactgcctgaaaagactccgcccctccccctccccctcgaacaaatgggtcccgggcctccaaaacacggtacctccagaacacttcagctccacagcccatagcaagaagaaagtgggcaatgtttttcagggagaagggatagaagctggtgggtttccagtcactcgaagtctataaagattgtgaagagcgggggaagctcaaatgctgaagcttttggtcaggattttctctgagttctaaggaactgtgttttacacacaccaaacccagactcttctcaggaaagagcagatttacttctgatggcgggaagtgattctagtgaggtggagagagacaactgctccagaattttcccctttgctagagctgtctccctctcaatccctccagggaccccaccacaccctcccagctgtctctggaggctggaggagttgagtttggttgacttgaggacttggacatggacctgggaggaaggaaggacctgggagcaacaggagaccccatggaaaggctgccccagggatgacaagagggacatgctgaaacaggtggggctgcagcgtgcaggcagatgctaggctgggtgggcagggatgcacaaggctctactccatccccagagagctcccaaatgcagaaggattcaaaccccatgtgagcgtgcccacaccagccgcccctcctgagcatcagcctgttcagatgagggtacctgggcctctcgttcgcatctgtgttctcatggatgagcgctggtctttactgaccctcccaagcctccccactctgtgccttggctcatgctctttcctcctcccggcatgcccttctcccccatctccgtgtcctcgttcctcaaggtttagccgagacactgccacctccacatagctctccctgccctctttccccctctgggcctcagtggcctttctctgctccctctcagggtactgagcactttctgccttgtcctggagctatctgggtccattgcctgaccccccactcacctgtgtgctccccgtaggtagggccacttctgactgtgtgtccccagatccagcctggggttggggtaggattagtggcctgagtgaggagaggaaggccagctcccagaggactttactgaaccgtactgtgaatatgtccaagtcccaaagccaggtgaggtcagaccccactgcctgaggaagagggctggatgcagggccagctcaacctgaacaatcccctcccactcggcctttcctgtggggccttcaccagcctgctggggtcactgtcgtgcacttggctgcgtggctggttctattggccctaggtgctgctctgttgggtgggatgggagggggtagagggagccaggagcactgggttctccctgagaacactgggcacaagagtactggcctcttctatccctggcactgtcctttgcacttgtttggtggccccaatgtgagtcgctgtaaaaaatgctgccgttactattttctaagaaatgacttttctgtgaaccaacagtaacaaaaacctcagtaaccaaaataaagttctatattttaaaaaaggca

SEQ ID NO: 133538 - DNA, 498 bp, Homo sapiens
  Payload ID: 6099
  Gene Symbol: FBXO10
  Gene Name: F-box protein 10
  ENST ID: ENST00000541607
  CDS Start-End: 286-498
ggcagctgtccgcccccgggcggggctggccgcacgccgcaatcctaccggctgctgcggctccagcgggggcggcgggtggcttccagggcaccggcggccgcggcccggactccgcggtgggcgagcgccctgtgaggactacagtgaagaacagaggggaaagtcatttgaggagccagaactctggagtcagttagctctggttcagatcacagttctgccacttactggctttgtgaccttcagccagattgattcctcatctgtgaaaaggaggtgaccatggaggctggtggcctccccttggagctgtggcgcatgatcttagcctacttgcaccttcccgacctgggccgctgcagcctggtatgcagggcctggtatgaactgatcctcagtctcgacagcacccgctggcggcagctgtgtctgggttgcaccgagtgccgccatcccaattggcccaaccagccagatgtggagcctgagtcttgg

SEQ ID NO: 133539 - DNA, 2223 bp, Homo sapiens
  Payload ID: 6100
  Gene Symbol: FBXO11
  Gene Name: F-box protein 11
  ENST ID: ENST00000316377
  CDS Start-End: 90-1865
gccgcagcagcagcagcagcagcagcctccgccgccgccaccgccgcctccgccgctgcctcaggagcggaacaacgtcggcgagcgggatgatgatgtgcctgcagatatggttgcagaagaatcaggtcctggtgcacaaaatagtccataccaacttcgtagaaaaactcttttgccgaaaagaacagcgtgtcccacaaagaacagtatggagggcgcctcaacttcaactacagaaaactttggtcatcgtgcaaaacgtgcaagagtgtctggaatcacaagatctatcagcagcacctgctgaacagtatcttcaggagaaactgccagatgaagtggttctaaaaatcttctcttacttgctggaacaggatctttgtagagcagcttgtgtatgtaaacgcttcagtgaacttgctaatgatccaattttgtggaaacgattatatatggaagtatttgaatatactcgccctatgatgcatcctgaacctggaaaattctaccagattaatccagaagagtatgaacatccaaatccctggaaagagagtttccagcagttgtataaaggtgcacatgtaaagccaggatttgctgaacatttctacagtaaccctgcaagatataaaggaagagaaaatatgttgtattatgatactattgaagatgcccttggtggggtacaagaggctcattttgatggacttatctttgttcattctggaatatatactgatgaatggatatatattgaatctccaatcaccatgattggtgcagcacctgggaaagtggcagacaaagttataattgaaaacactagagattcaaccttcgtttttatggaaggctctgaagatgcttatgttggatatatgacaataaggtttaaccctgatgacaaatctgcacaacaccacaatgcacaccactgcttagagattacagtaaattgtagccctattattgatcactgtatcatccgaagtacatgtacagttggttctgcagtatgtgttagtggtcaaggagcatgtcccaccatcaagcactgtaacatcagtgactgtgaaaatgttggactatatataacagatcatgcacagggaatatatgaggataatgaaatttccaataatgcgttagctgggatttgggttaaaaatcatggaaacccaattattagacggaatcatattcatcatggacgtgatgttggtgtgttcacatttgatcatggcatgggttactttgaaagttgcaatatacacagaaataggatagcaggctttgaagtaaaagcctatgctaaccctacagtggttcgatgtgaaattcaccatgggcagactggaggaatatatgtccatgaaaaaggaagaggacaattcatagagaataaaatctatgcaaacaactttgcaggtgtatggattacctcaaatagtgacccaacaataaggggaaattctatatttaatggaaatcaaggaggagtttacatctttggtgatggacgaggccttattgaaggaaatgacatttatggcaatgcattagcaggaattcaaattaggacaaacagttgtccaattgttcggcataacaaaattcatgatggccagcatggtgggatttatgtgcatgaaaagggacaaggagtaatagaagagaatgaagtttatagtaacactctagctggagtctgggtgacaactggcagcactccagtactgagaagaaaccggatacacagtggcaagcaggttggtgtttatttttatgacaatggacatggagtgctagaagacaatgatatctataatcatatgtattcaggggttcagataaggtaaatgttttcatatttggctatcttttgggagggagttaggagtatgtggggtgtgtaaaagaaatttgcttattgtttaatgcccaatctttatccccctattgtatatatattcacattcttaaaataatcttgacttaaattgtcagaatgtagctttccttggtctaggtgaggacagaagccactggcacatgtgccataagagctcacttccaccgttctgctttccactatgagagtcacatcagctgccaatatgatccttcatacttggagagtggaagtctgtgttaaaatacttgtgcattatgcctggcatatcattggcactcaataaaatgaagcttctgttttat

SEQ ID NO: 133540 - DNA, 4055 bp, Homo sapiens
  Payload ID: 6100
  Gene Symbol: FBXO11
  Gene Name: F-box protein 11
  Uniprot ID: Q86XK2
  ENST ID: ENST00000403359
  CDS Start-End: 74-2857
ctcctgccccgaagctcgctgtgcgtgtgcgtgtgtgtgtccctccgccaacgccgccacctcagcccggcaaatgaactccgtccgagccgccaaccggagacccaggcgagtgtcgcggccgcgcccggtgcagcaacagcagcagcagcccccgcagcagccgccgccgcagccgccccagcagcagccgccccagcagcagcctccgccgccgccgcagcagcagcagcagcagcagcctccgccgccgccaccgccgcctccgccgctgcctcaggagcggaacaacgtcggcgagcgggatgatgatgtgcctgcagatatggttgcagaagaatcaggtcctggtgcacaaaatagtccataccaacttcgtagaaaaactcttttgccgaaaagaacagcgtgtcccacaaagaacagtatggagggcgcctcaacttcaactacagaaaactttggtcatcgtgcaaaacgtgcaagagtgtctggaaaatcacaagatctatcagcagcacctgctgaacagtatcttcaggagaaactgccagatgaagtggttctaaaaatcttctcttacttgctggaacaggatctttgtagagcagcttgtgtatgtaaacgcttcagtgaacttgctaatgatccaattttgtggaaacgattatatatggaagtatttgaatatactcgccctatgatgcatcctgaacctggaaaattctaccagattaatccagaagagtatgaacatccaaatccctggaaagagagtttccagcagttgtataaaggtgcacatgtaaagccaggatttgctgaacatttctacagtaaccctgcaagatataaaggaagagaaaatatgttgtattatgatactattgaagatgcccttggtggggtacaagaggctcattttgatggacttatctttgttcattctggaatatatactgatgaatggatatatattgaatctccaatcaccatgattggtgcagcacctgggaaagtggcagacaaagttataattgaaaacactagagattcaaccttcgtttttatggaaggctctgaagatgcttatgttggatatatgacaataaggtttaaccctgatgacaaatctgcacaacaccacaatgcacaccactgcttagagattacagtaaattgtagccctattattgatcactgtatcatccgaagtacatgtacagttggttctgcagtatgtgttagtggtcaaggagcatgtcccaccatcaagcactgtaacatcagtgactgtgaaaatgttggactatatataacagatcatgcacagggaatatatgaggataatgaaatttccaataatgcgttagctgggatttgggttaaaaatcatggaaacccaattattagacggaatcatattcatcatggacgtgatgttggtgtgttcacatttgatcatggcatgggttactttgaaagttgcaatatacacagaaataggatagcaggctttgaagtaaaagcctatgctaaccctacagtggttcgatgtgaaattcaccatgggcagactggaggaatatatgtccatgaaaaaggaagaggacaattcatagagaataaaatctatgcaaacaactttgcaggtgtatggattacctcaaatagtgacccaacaataaggggaaattctatatttaatggaaatcaaggaggagtttacatctttggtgatggacgaggccttattgaaggaaatgacatttatggcaatgcattagcaggaattcaaattaggacaaacagttgtccaattgttcggcataacaaaattcatgatggccagcatggtgggatttatgtgcatgaaaagggacaaggagtaatagaagagaatgaagtttatagtaacactctagctggagtctgggtgacaactggcagcactccagtactgagaagaaaccggatacacagtggcaagcaggttggtgtttatttttatgacaatggacatggagtgctagaagacaatgatatctataatcatatgtattcaggggttcagataaggactggaagcaaccccaaaattagacgcaacaaaatctggggaggacagaatggtggaattctagtttataattctggtctaggctgtatagaagacaatgaaatatttgacaatgcaatggctggagtctggattaagacagatagtaatcctacactaagaagaaataaaatccatgatggaagagatggtggcatctgtatatttaatgggggtcgaggtctccttgaagaaaatgatattttcaggaatgctcaagcaggtgttctcatcagcactaatagtcatccaatcttaaggaaaaacagaatatttgatggatttgccgcaggtattgaaattacaaatcacgcaactgcaacactagaaggcaatcagatttttaacaaccggtttggaggcttatttttagcatctggtgttaatgtgacaatgaaagataacaaaataatgaacaatcaagatgccatagaaaaggctgttagtagaggccaatgtttatataaaatatcaagttataccagctatcccatgcatgatttctacagatgtcatacttgtaacaccacagatcgaaatgccatatgtgtgaactgcattaagaagtgccatcagggacatgatgtagagtttattagacatgataggtttttctgtgactgtggtgctggaacactgtctaatccttgtacattagctggtgagcctacacatgatacagatacactatatgactctgctccacctatagaatctaatacattgcagcacaactgaattccttccctaaagaaaaagtcctgccattgtaacatcataacttaaaacacttttttggaagaagatttaaaatatttgcccatgctacaggaagagactgtattaaaaatggatacacaaggtcagttgacactatgaagctcaagctaccaaaaagaaagtggcaatatattgactcaggatctcaaagctgggtgttttagcattactgtgtaaagacttgaagggacagaagtgaagaaaataagctgcaattttgtacagataccaacttctgaaaagctggtgtttttacaactagcattgaatgcagtccaatttgcagtagtaatcttcaatagacaagcagctttgttgctgcctttatggacatgggtaccaattgcttttgtaatatggtaaaaatgtgagctagcacttctgcgttccttttgattttttttttttaacatgtattcagattgagaaatatgattttaatgctttaatctcatgtagtttgtttttaatttcaagcaaaatcttactgtacttgaatgtgccctgttttgttagcacacctagacttgctgtaactgtactcatgtcccagtatgtacgttctttctatgaaagagaaaacactaatcttaaattatatccagcaatgtttctggtatcctttaagaaaagttaagactattatttccttcccttccctgtgcagcattcaaaatcacccctagaaaaagtgagtgttttaatgagacttcctaggaagggatgcactgtaaaacaaaagtattcttgtaactcagttttgtgaaaggtaaaaaactactatgttttaagtacactttagaaagtctcttcaaaacaaacagtcctgtatttgaactctgttcatagtttttttttgaacagtttagacaaaactgctggaaattaaaccaatttcctgcattaagctgagacaagtatatatacagccctatacagtttcatagcttttcctcccccatttatgtgtattggtgacagtgggtataaaacagcctgaaagtgtatgcatgtaccataacatctagacttaatatattgtggagtattcaataaccattatgtagaaggtagataagaattaaaagggtttaatttcctagaaagaaaatggaaaaatggtcatttttaaaaaataaagtttattagatcataa

SEQ ID NO: 133541 - DNA, 299 bp, Homo sapiens
  Payload ID: 6100
  Gene Symbol: FBXO11
  Gene Name: F-box protein 11
  ENST ID: ENST00000405808
  CDS Start-End: 12-185
ccagctatcccatgcatgatttctacagatgtcatacttgtaacaccacagatcgaaatgccatatgtgtgaactgcattaagaagtgccatcagggacatgatgtagagtttattagacatgataggtttttctgtgactgtggtgctggaacactgtctaatccttgtacattagctggataaatgtgcatcctcactaggaaaaaaaagtttgtgtgaaaagctggatccaaccattatcagttttgaaataaattcctttctgaaataaaatattagaaacataagcatttaaac

SEQ ID NO: 133542 - DNA, 3844 bp, Homo sapiens
  Payload ID: 6100
  Gene Symbol: FBXO11
  Gene Name: F-box protein 11
  Uniprot ID: Q86XK2
  ENST ID: ENST00000402508
  CDS Start-End: 115-2646
atcatagcaataagatttgtaaaacattgcaatggctgaaaaactgtctaacaggaaattttaagtgttattccaaagaagaacaagcctaaaaatgatgatgtgcctgcagatatggttgcagaagaatcaggtcctggtgcacaaaatagtccataccaacttcgtagaaaaactcttttgccgaaaagaacagcgtgtcccacaaagaacagtatggagggcgcctcaacttcaactacagaaaactttggtcatcgtgcaaaacgtgcaagagtgtctggaaaatcacaagatctatcagcagcacctgctgaacagtatcttcaggagaaactgccagatgaagtggttctaaaaatcttctcttacttgctggaacaggatctttgtagagcagcttgtgtatgtaaacgcttcagtgaacttgctaatgatccaattttgtggaaacgattatatatggaagtatttgaatatactcgccctatgatgcatcctgaacctggaaaattctaccagattaatccagaagagtatgaacatccaaatccctggaaagagagtttccagcagttgtataaaggtgcacatgtaaagccaggatttgctgaacatttctacagtaaccctgcaagatataaaggaagagaaaatatgttgtattatgatactattgaagatgcccttggtggggtacaagaggctcattttgatggacttatctttgttcattctggaatatatactgatgaatggatatatattgaatctccaatcaccatgattggtgcagcacctgggaaagtggcagacaaagttataattgaaaacactagagattcaaccttcgtttttatggaaggctctgaagatgcttatgttggatatatgacaataaggtttaaccctgatgacaaatctgcacaacaccacaatgcacaccactgcttagagattacagtaaattgtagccctattattgatcactgtatcatccgaagtacatgtacagttggttctgcagtatgtgttagtggtcaaggagcatgtcccaccatcaagcactgtaacatcagtgactgtgaaaatgttggactatatataacagatcatgcacagggaatatatgaggataatgaaatttccaataatgcgttagctgggatttgggttaaaaatcatggaaacccaattattagacggaatcatattcatcatggacgtgatgttggtgtgttcacatttgatcatggcatgggttactttgaaagttgcaatatacacagaaataggatagcaggctttgaagtaaaagcctatgctaaccctacagtggttcgatgtgaaattcaccatgggcagactggaggaatatatgtccatgaaaaaggaagaggacaattcatagagaataaaatctatgcaaacaactttgcaggtgtatggattacctcaaatagtgacccaacaataaggggaaattctatatttaatggaaatcaaggaggagtttacatctttggtgatggacgaggccttattgaaggaaatgacatttatggcaatgcattagcaggaattcaaattaggacaaacagttgtccaattgttcggcataacaaaattcatgatggccagcatggtgggatttatgtgcatgaaaagggacaaggagtaatagaagagaatgaagtttatagtaacactctagctggagtctgggtgacaactggcagcactccagtactgagaagaaaccggatacacagtggcaagcaggttggtgtttatttttatgacaatggacatggagtgctagaagacaatgatatctataatcatatgtattcaggggttcagataaggactggaagcaaccccaaaattagacgcaacaaaatctggggaggacagaatggtggaattctagtttataattctggtctaggctgtatagaagacaatgaaatatttgacaatgcaatggctggagtctggattaagacagatagtaatcctacactaagaagaaataaaatccatgatggaagagatggtggcatctgtatatttaatgggggtcgaggtctccttgaagaaaatgatattttcaggaatgctcaagcaggtgttctcatcagcactaatagtcatccaatcttaaggaaaaacagaatatttgatggatttgccgcaggtattgaaattacaaatcacgcaactgcaacactagaaggcaatcagatttttaacaaccggtttggaggcttatttttagcatctggtgttaatgtgacaatgaaagataacaaaataatgaacaatcaagatgccatagaaaaggctgttagtagaggccaatgtttatataaaatatcaagttataccagctatcccatgcatgatttctacagatgtcatacttgtaacaccacagatcgaaatgccatatgtgtgaactgcattaagaagtgccatcagggacatgatgtagagtttattagacatgataggtttttctgtgactgtggtgctggaacactgtctaatccttgtacattagctggtgagcctacacatgatacagatacactatatgactctgctccacctatagaatctaatacattgcagcacaactgaattccttccctaaagaaaaagtcctgccattgtaacatcataacttaaaacacttttttggaagaagatttaaaatatttgcccatgctacaggaagagactgtattaaaaatggatacacaaggtcagttgacactatgaagctcaagctaccaaaaagaaagtggcaatatattgactcaggatctcaaagctgggtgttttagcattactgtgtaaagacttgaagggacagaagtgaagaaaataagctgcaattttgtacagataccaacttctgaaaagctggtgtttttacaactagcattgaatgcagtccaatttgcagtagtaatcttcaatagacaagcagctttgttgctgcctttatggacatgggtaccaattgcttttgtaatatggtaaaaatgtgagctagcacttctgcgttccttttgattttttttttttaacatgtattcagattgagaaatatgattttaatgctttaatctcatgtagtttgtttttaatttcaagcaaaatcttactgtacttgaatgtgccctgttttgttagcacacctagacttgctgtaactgtactcatgtcccagtatgtacgttctttctatgaaagagaaaacactaatcttaaattatatccagcaatgtttctggtatcctttaagaaaagttaagactattatttccttcccttccctgtgcagcattcaaaatcacccctagaaaaagtgagtgttttaatgagacttcctaggaagggatgcactgtaaaacaaaagtattcttgtaactcagttttgtgaaaggtaaaaaactactatgttttaagtacactttagaaagtctcttcaaaacaaacagtcctgtatttgaactctgttcatagtttttttttgaacagtttagacaaaactgctggaaattaaaccaatttcctgcattaagctgagacaagtatatatacagccctatacagtttcatagcttttcctcccccatttatgtgtattggtgacagtgggtataaaacagcctgaaagtgtatgcatgtaccataacatctagacttaatatattgtggagtattcaataaccattatgtagaaggtagataagaattaaaagggtttaatttcctagaaagaaaatggaaaaatggtcatttttaaaaaataaagtttattagatcataa

SEQ ID NO: 133543 - DNA, 560 bp, Homo sapiens
  Payload ID: 6100
  Gene Symbol: FBXO11
  Gene Name: F-box protein 11
  ENST ID: ENST00000424163
  CDS Start-End: 139-560
ggcttctccgctcgctcacagaccccgcgggagtctgttggtggccggggggaaggcgagcggcgtgatttctcccttttctgccgccttccatggtttagtctgcctctttctagtgatgatgatgtgcctgcagatatggttgcagaagaatcaggtcctggtgcacaaaatagtccataccaacttcgtagaaaaactcttttgccgaaaagaacagcgtgtcccacaaagaacagtatggagggcgcctcaacttcaactacagaaaactttggtcatcgtgcaaaacgtgcaagagtgtctggaaaatcacaagatctatcagcagcacctgctgaacagtatcttcaggagaaactgccagatgaagtggttctaaaaatcttctcttacttgctggaacaggatctttgtagagcagcttgtgtatgtaaacgcttcagtgaacttgctaatgatccaattttgtggaaacgattatatatggaagtatttgaatatactcgccctatgatgcatcctgaacctggaaaattctaccagattaatccagaaga

SEQ ID NO: 133544 - DNA, 572 bp, Homo sapiens
  Payload ID: 6100
  Gene Symbol: FBXO11
  Gene Name: F-box protein 11
  ENST ID: ENST00000434234
  CDS Start-End: 78-323
acaatcaagatgccatagaaaaggctgttagtagaggccaatgtttatataaaatatcaagttataccagctatcccatgcatgatttctacagatgtcatacttgtaacaccacagatcgaaatgccatatgtgtgaactgcattaagaagtgccatcagggacatgatgtagagtttattagacatgataggtttttctgtgactgtggtgctggaacactgtctaatccttgtacattagctggtgagcctacacatgatacagatacactatatgactctgctccacctatagaatctaatacattgcagcacaactgaattccttccctaaagaaaaagtcctgccattgtaacatcataacttaaaacacttttttggaagaagatttaaaatatttgcccatgctacaggaagagactgtattaaaaatggatacacaaggataaatgtgcatcctcactaggaaaaaaaagtttgtgtgaaaagctggatccaaccattatcagttttgaaataaattcctttctgaaataaaatattagaaacataagcatttaaacaaaaaa

SEQ ID NO: 133545 - DNA, 1986 bp, Homo sapiens
  Payload ID: 6100
  Gene Symbol: FBXO11
  Gene Name: F-box protein 11
  ENST ID: ENST00000493962
  CDS Start-End: 1-1687
tatgatgcatcctgaacctggaaaattctaccagattaatccagaagagtatgaacatccaaatccctggaaagagagtttccagcagttgtataaaggtgcacatgtaaagccaggatttgctgaacatttctacagtaaccctgcaagatataaaggaagagaaaatatgttgtattatgatactattgaagatgcccttggtggggtacaagaggctcattttgatggacttatctttgttcattctggaatatatactgatgaatggatatatattgaatctccaatcaccatgattggtgcagcacctgggaaagtggcagacaaagttataattgaaaacactagagattcaaccttcgtttttatggaaggctctgaagatgcttatgttggatatatgacaataaggtttaaccctgatgacaaatctgcacaacaccacaatgcacaccactgcttagagattacagtaaattgtagccctattattgatcactgtatcatccgaagtacatgtacagttggttctgcagtatgtgttagtggtcaaggagcatgtcccaccatcaagcactgtaacatcagtgactgtgaaaatgttggactatatataacagatcatgcacagggaatatatgaggataatgaaatttccaataatgcgttagctgggatttgggttaaaaatcatggaaacccaattattagacggaatcatattcatcatggacgtgatgttggtgtgttcacatttgatcatggcatgggttactttgaaagttgcaatatacacagaaataggatagcaggctttgaagtaaaagcctatgctaaccctacagtggttcgatgtgaaattcaccatgggcagactggaggaatatatgtccatgaaaaaggaagaggacaattcatagagaataaaatctatgcaaacaactttgcaggtgtatggattacctcaaatagtgacccaacaataaggggaaattctatatttaatggaaatcaaggaggagtttacatctttggtgatggacgaggccttattgaaggaaatgacatttatggcaatgcattagcaggaattcaaattaggacaaacagttgtccaattgttcggcataacaaaattcatgatggccagcatggtgggatttatgtgcatgaaaagggacaaggagtaatagaagagaatgaagtttatagtaacactctagctggagtctgggtgacaactggcagcactccagtactgagaagaaaccggatacacagtggcaagcaggttggtgtttatttttatgacaatggacatggagtgctagaagacaatgatatctataatcatatgtattcaggggttcagataaggactggaagcaaccccaaaattagacgcaacaaaatctggggaggacagaatggtggaattctagtttataattctggtctaggctgtatagaagacaatgaaatatttgacaatgcaatggctggagtctggattaagacagatagtaatcctacactaagaagaaataaaatccatgatggaagagatggtggcatctgtatatttaatgggggtcgaggtattgttgttaattttgcattagtgaaaaatccagttttccattattcttccatatctttaatgatcaatgacattgctaactaagttataaatgagtgaatctcaagtctttttccttatcaagttgaactggtttaggagattagtgcctagagttaagagacaaatgtttacaatacttttccttttgtagccactttgagtctgcagttgtcagtaagcctttttaaagatagaatttgtttacattctctggaccttttaaaattcagaatagtaatatgattataataaacttcaaagtcaagttatagaaatagatgtgagaaattgatctgtaaatatctgaaaatgtctttagtaaacgggtattgcttttgtaa

SEQ ID NO: 133546 - DNA, 1708 bp, Homo sapiens
  Payload ID: 6101
  Gene Symbol: FBXO15
  Gene Name: F-box protein 15
  Uniprot ID: Q8NCQ5
  ENST ID: ENST00000419743
  CDS Start-End: 81-1613
ggcgacgtgcgggcgtgggggcggtgcgtgcactcttcgtttcagccctggcgcggtcctgtggtgaactccttgtctctatggcgactggacgcggtcggatcttgcagcagcactggctcggcctccagacgctgcgcgggcccagcaggggcggtggcgcggcccgggggcgcgccagggcctttgggtgcagaaaggggccaggggtcaagctttctgcaggctctgctgccctgaggtgccatgccggaggtggacagcactgggagagctctttctcctgctgttctgggttcctggatggaatgccttcagaaatcttgctgaagatattttcctacttggatgctgtgagccttctgtgtactggatgtgtgagcaggcgcttttatcatctagccaatgacaattttatttggatcggaatctactcaactgctttttcacctgcaagatcaaattggaaatttaattcagtagagaagatagctatgtctatgagctttctgtcagttcaggataaagaagctggttattggaagaaagaatatatcacaaaacaaatagcatctgtaaaagccgcactagctgacattctcaaacctgtcaacccttacacaggccttccagttaagaccaaagaggccctcagaatatttggtttaggttgggcaattatactgaaagaaaaaggtggaaaagaatatatcatggagcatgttgatctttccataaatgacacatcagttactgttatatggtatggcaaaaaatggccatgcctagcatcattgtcaaccttagatttatgtggcatgacaccagtttttaccgactggtataaaactcccaccaaacatagactccgatggcattctttaattgcaaagtacaatctgagtcatttgaccatatctaccatgattggctgtgacagactcattcggatcttctgcctgcaccctggcctcctggtgggagtgtggaagaaggaggaagaactggcttttgttatggcaaatcttcattttcatcaccttgtggagaggagcacattaggctcggctactatcccctatgaactgcctccacatagcccctttttggatgatagccccgagtatggactgcacggctaccaactccatgttgatctgcacagcggtggggttttctacctatgtggtacatttcgcaatctcttcaccaagagaggaaatattgaaaatggacatgtgaagctcattgttatacatttaaaaaataacagagaacacctacctcttattggaaaagttggcctctcgtggaaaactgatatttttgatggctgtataaagagttgttccatgatggacgtaactcttttggatgaacatgggaaacccttttggtgtttcagttccccggtgtgcctgagatcgcctgccacaccctctgacagctctagcttcttgggacagacatacaacgtggactacgttgatgcggaaggaagagtgcacgtggagctggtgtggatcagagagaccgaagaataccttattgtcaacctggtcctttatcttagtatcgcaaaaatcaaccattggtttgggactgaatattagcagtaggtggcaaattattgttgttatttagttgtttatttttgactggctttgttcttggtgttgaaaattaaaataaagcaaatctgcagagt

SEQ ID NO: 133547 - DNA, 493 bp, Homo sapiens
  Payload ID: 6101
  Gene Symbol: FBXO15
  Gene Name: F-box protein 15
  ENST ID: ENST00000580088
  CDS Start-End: 1-307
cccctatgaactgcctccacatagcccctttttggatgatagccccgagtatggactgcacggctaccaactccatgttgatctgcacagcggtggggttttctacctatgtggtacatttcgcaatctcttcaccaagagaggaaatattgaaaatggacatgtgaagctcattgttatacatttaaaaaataacagagaacacctacctcttattggaaaagttggcctctcgtggaaaactgatatttttgatggctgtataaagttccccggtgtgcctgagatcgcctgccacaccctctgacagctctagcttcttgggacagacatacaacgtggactacgttgatgcggaaggaagagtgcacgtggagctggtgtggatcagagagaccgaagaataccttattgtcaacctggtcctttatcttagtatcgcaaaaatcaaccattggtttgggactgaatattagcagtaggtggcaaatta

SEQ ID NO: 133548 - DNA, 1590 bp, Homo sapiens
  Payload ID: 6101
  Gene Symbol: FBXO15
  Gene Name: F-box protein 15
  ENST ID: ENST00000581214
  CDS Start-End: 1-47
gctcatctgctttccagaagcatcttcagcgtgaagaagtaaaatgagccagtgcatcagaagtatcagcatgcataatgaaaggggccaggggtcaagctttctgcaggctctgctgccctgaggtgccatgccggaggtggacagcactgggagagctctttctcctgctgttctgggttcctggatggaatgccttcagaaatcttgctgaagatattttcctacttggatgctgtgagccttctgtgtactggatgtgtgagcaggcgcttttatcatctagccaatgacaattttatttggatcggaatctactcaactgctttttcacctgcaagatcaaattggaaatttaattcagtagagaagatagctatgtctatgagctttctgtcagttcaggataaagaagctggttattggaagaaagaatatatcacaaaacaaatagcatctgtaaaagccgcactagctgacattctcaaacctgtcaacccttacacaggccttccagttaagaccaaagaggccctcagaatatttggtttaggttgggcaattatactgaaagaaaaaggtggaaaagaatatatcatggagcatgttgatctttccataaatgacacatcagttactgttatatggtatggcaaaaaatggccatgcctagcatcattgtcaaccttagatttatgtggcatgacaccagtttttaccgactggtataaaactcccaccaaacatagactccgatggcattctttaattgcaaagtacaatctgagtcatttgaccatatctaccatgattggctgtgacagactcattcggatcttctgcctgcaccctggcctcctggtgggagtgtggaagaaggaggaagaactggcttttgttatggcaaatcttcattttcatcaccttgtggagaggagcacattaggctcggctactatcccctatgaactgcctccacatagcccctttttggatgatagccccgagtatggactgcacggctaccaactccatgttgatctgcacagcggtggggttttctacctatgtggtacatttcgcaatctcttcaccaagagaggaaatattgaaaatggacatgtgaagctcattgttatacatttaaaaaataacagagaacacctacctcttattggaaaagttggcctctcgtggaaaactgatatttttgatggctgtataaagagttgttccatgatggacgtaactcttttggatgaacatgggaaacccttttggtgtttcagttccccggtgtgcctgagatcgcctgccacaccctctgacagctctagcttcttgggacagacatacaacgtggactacgttgatgcggaaggaagagtgcacgtggagctggtgtggatcagagagaccgaagaataccttattgtcaacctggtcctttatcttagtatcgcaaaaatcaaccattggtttgggactgaatattagcagtaggtggcaaattattgttgttatttagttgtttatttttgactggctttgttcttggtgttgaaaattaaaataaagcaaatctgcaga

SEQ ID NO: 133549 - DNA, 827 bp, Homo sapiens
  Payload ID: 6101
  Gene Symbol: FBXO15
  Gene Name: F-box protein 15
  ENST ID: ENST00000578399
  CDS Start-End: 1-109
aatgccttcagaaatcttgctgaagatattttcctacttggatgctgtgagccttctgtgtactggatgtgtgagcaggcgcttttatcatctagccaatgacaaatgaacgttcaactgtaaatattcagcttggcttattcatggaattggattatttgaaaatatgcatctctaatttgatatattatgactaagaaggaggaagaactggcttttgttatggcaaatcttcattttcatcaccttgtggagaggagcacattaggctcggctactatcccctatgaactgcctccacatagcccctttttggatgatagccccgagtatggactgcacggctaccaactccatgttgatctgcacagcggtggggttttctacctatgtggtacatttcgcaatctcttcaccaagagaggaaatattgaaaatggacatgtgaagctcattgttatacatttaaaaaataacagagaacacctacctcttattggaaaagttggcctctcgtggaaaactgatatttttgatggctgtataaagagttgttccatgatggacgtaactcttttggatgaacatgggaaacccttttggtgtttcagttccccggtgtgcctgagatcgcctgccacaccctctgacagctctagcttcttgggacagacatacaacgtggactacgttgatgcggaaggaagagtgcacgtggagctggtgtggatcagagagaccgaagaataccttattgtcaacctggtcctttatcttagtatcgcaaaaatcaaccattggtttgggactgaatattagcagtaggt

SEQ ID NO: 133550 - DNA, 564 bp, Homo sapiens
  Payload ID: 6101
  Gene Symbol: FBXO15
  Gene Name: F-box protein 15
  ENST ID: ENST00000580552
  CDS Start-End: 1-168
atggcgactggacgcggtcggatcttgcagcagcactggctcggcctccagacgctgcgcgggcccagcaggggcggtggcgcggcccgggggcgcgccagggcctttgggtgcaggtcttgctcatctgctttccagaagcatcttcagcgtgaagaagtaaaatgagccagtgcatcagaagtatcagcatgcataatgcctacagtgagagtgtatatttctaaacctttgggtgaaagcacatcagaaaaggggccaggggtcaagctttctgcaggctctgctgccctgaggtgccatgccggaggtggacagcactgggagagctctttctcctgctgttctgggttcctggatggaatgccttcagaaatcttgctgaagatattttcctacttggatgctgtgagccttctgtgtactggatgtgtgagcaggcgcttttatcatctagccaatgacaattttatttggatcggaatctactcaactgctttttcacctgcaagatcaaattggaaatttaattcagtagagaagatagctatgtctatgagcttt

SEQ ID NO: 133551 - DNA, 1129 bp, Homo sapiens
  Payload ID: 6101
  Gene Symbol: FBXO15
  Gene Name: F-box protein 15
  ENST ID: ENST00000579517
  CDS Start-End: 1-367
actccgatggcattctttaattgcaaagtacaatctgagtcatttgaccatatctaccatgattggctgtgacagactcattcggatcttctgcctgcaccctggcctcctggtgggagtgtggaagaaggaggaagaactggcttttgttatggcaaatcttcattttcatcaccttgtggagaggagcacattaggctcggctactatcccctatgaactgcctccacatagcccctttttggatgatagccccgagtatggactgcacggctaccaactccatgttgatctgcacagcggtggggttttctacctatgtggtacatttcgcaatctcttcaccaagagaggtgaaattgattgagtttttatttcattatgaaattaaaggttgaggtgagggaaccaattttgatgtccgagttaagaattgccctcactggtcactttataatcttttggcaccagtatcctcccagacccgtgtgtcatcccagggcttgtgaaagtcctcactggaccgagtctcttcagaactggctctgtctccttcaccaccatcactctcaatgccaccttctgggggtagcccctactcatcttctctactgatgcttccttattatttttccatgctctctgctttccccagacttcttcccttctttcttaaaggaatgtggtaaatttgccagcagggcccgtgccgctccaggatgagagtaaagagaaaccagcctttctcctctacgtactgcatcactgtttgccacacctaccaaagccaggacagaggctggggcagacagaggaaaggagggagcttacgccaagcaggaaaaacgagggagtggagaatgccccattctcacttatctgattatttccttttggtttcattctactgtagcctgtaaacttggagtttcatgtaaggacttgcttagattcaagtttaacatttctggtaaaaatattttaaaagggaagttatgtacttcattttgcattatattgagaggtatataatgtcaggttgtcccattattagtaatgcctggttttatcatctggttaagatggtgaccactagatatcttcattattaaaagtattcttttccaaa

SEQ ID NO: 133552 - DNA, 773 bp, Homo sapiens
  Payload ID: 6101
  Gene Symbol: FBXO15
  Gene Name: F-box protein 15
  ENST ID: ENST00000585174
  CDS Start-End: 1-237
actggctcggcctccagacgctgcgcgggcccagcaggggcggtggcgcggcccgggggcgcgccagggcctttgggtgcaggtgactgtagggcctgcgggtggggtcccctggcgggaagcccgtcactgcgcggccccgctctcttcaccgtgtattttattcgtccagcttggcgcaaggcccgtggccgtcttcaacgtgagaaggcctacagtgagagtgtatatttctaaacctttgggtgaaagcacatcagaaaaggggccaggggtcaagctttctgcaggctctgctgccctgaggtgccatgccggaggtggacagcactgggagagctctttctcctgctgttctgggttcctggatggaatgccttcagaaatcttgctgaagatattttcctacttggatgctgtgagccttctgtgtactggatgtgtgagcaggcgcttttatcatctagccaatgacaattttatttggatcggaatctactcaactgctttttcacctgcaagatcaaattggaaatttaattcagtagagaagatagctatgtctatgagctttctgtcagttcaggataaagaagctggttattggaagaaagaatatatcacaaaacaaatagcatctgtaaaagccgcactagctgacattctcaaacctgtcaacccttacacaggccttccagttaagaccaaagaggccctcagaatatttggtttaggttgggcaattatactgaaagaaaaaggtggaaaagaat

SEQ ID NO: 133553 - DNA, 468 bp, Homo sapiens
  Payload ID: 6101
  Gene Symbol: FBXO15
  Gene Name: F-box protein 15
  ENST ID: ENST00000582526
  CDS Start-End: 59-468
ggtgcgtgcactcttcgtttcagccctggcgcggtcctgtggtgaactccttgtctctatggcgactggacgcggtcggatcttgcagcagcactggctcggcctccagacgctgcgcgggcccagcaggggcggtggcgcggcccgggggcgcgccagggcctttgggtgcagaatgccttcagaaatcttgctgaagatattttcctacttggatgctgtgagccttctgtgtactggatgtgtgagcaggcgcttttatcatctagccaatgacaattttatttggatcggaatctactcaactgctttttcacctgcaagatcaaattggaaatttaattcagtagagaagatagctatgtctatgagctttctgtcagttcaggataaagaagctggttattggaagaaagaatatatcacaaaacaaatagcatctgtaaaagccgcactagctgacattct

SEQ ID NO: 133554 - DNA, 1816 bp, Homo sapiens
  Payload ID: 6101
  Gene Symbol: FBXO15
  Gene Name: F-box protein 15
  ENST ID: ENST00000583443
  CDS Start-End: 47-166
cttcgtttcagccctggcgcggtcctgtggtgaactccttgtctctatggcgactggacgcggtcggatcttgcagcagcactggctcggcctccagacgctgcgcgggcccagcaggggcggtggcgcggcccgggggcgcgccagggcctttgggtgcaggtgactgtagggcctgcgggtggggtcccctggcgggaagcccgtcactgcgcggccccgctctcttcaccgtgtattttattcgtccagcttggcgcaaggcccgtggccgtcttcaacgtgagaaggaaaggggccaggggtcaagctttctgcaggctctgctgccctgaggtgccatgccggaggtggacagcactgggagagctctttctcctgctgttctgggttcctggatggaatgccttcagaaatcttgctgaagatattttcctacttggatgctgtgagccttctgtgtactggatgtgtgagcaggcgcttttatcatctagccaatgacaattttatttggatcggaatctactcaactgctttttcacctgcaagatcaaattggaaatttaattcagtagagaagatagctatgtctatgagctttctgtcagttcaggataaagaagctggttattggaagaaagaatatatcacaaaacaaatagcatctgtaaaagccgcactagctgacattctcaaacctgtcaacccttacacaggccttccagttaagaccaaagaggccctcagaatatttggtttaggttgggcaattatactgaaagaaaaaggtggaaaagaatatatcatggagcatgttgatctttccataaatgacacatcagttactgttatatggtatggcaaaaaatggccatgcctagcatcattgtcaaccttagatttatgtggcatgacaccagtttttaccgactggtataaaactcccaccaaacatagactccgatggcattctttaattgcaaagtacaatctgagtcatttgaccatatctaccatgattggctgtgacagactcattcggatcttctgcctgcaccctggcctcctggtgggagtgtggaagaaggaggaagaactggcttttgttatggcaaatcttcattttcatcaccttgtggagaggagcacattaggctcggctactatcccctatgaactgcctccacatagcccctttttggatgatagccccgagtatggactgcacggctaccaactccatgttgatctgcacagcggtggggttttctacctatgtggtacatttcgcaatctcttcaccaagagaggaaatattgaaaatggacatgtgaagctcattgttatacatttaaaaaataacagagaacacctacctcttattggaaaagttggcctctcgtggaaaactgatatttttgatggctgtataaagagttgttccatgatggacgtaactcttttggatgaacatgggaaacccttttggtgtttcagttccccggtgtgcctgagatcgcctgccacaccctctgacagctctagcttcttgggacagacatacaacgtggactacgttgatgcggaaggaagagtgcacgtggagctggtgtggatcagagagaccgaagaataccttattgtcaacctggtcctttatcttagtatcgcaaaaatcaaccattggtttgggactgaatattagcagtaggtggcaaattattgttgttatttagttgtttatttttgactggctttgttcttggtgttgaaaattaaaataaagcaaatctgcagagtgctgtgcaatgcc

SEQ ID NO: 133555 - DNA, 1205 bp, Homo sapiens
  Payload ID: 6102
  Gene Symbol: FBXO16
  Gene Name: F-box protein 16
  ENST ID: ENST00000346498
  CDS Start-End: 110-1060
gagggactggagggagtcggagaaaaagctgacctaatgaaactgtggcaacgtcagcgcttgaggcttgaagagggagacaagctaaaagaggatatccagttgtttcatgatggcatttgcacctccaaaaaacacagatggtcccaaaatgcagacaaagatgagcacctggacacccctaaaccatcagctattgaatgaccggtttgacaaatggacagactctcaaagaagaagaatcctcacaggcctgttggagcgctgctcgctgtcccagcaaaagttctgctgtcgaaagcttcaagagaaaattccagcagaagccctggactttacaaccaagcttccaagggtgttatctttatacatcttttctttcctggaccctcggagcctttgtcgttgtgcacaggtgtgctggcattggaagaaccttgctgagctggaccagctctggatgctgaaatgtttacggtttaactggtacatcaatttctctccaactccctttgagcaggggatctggaagaagcactatattcaaatggtgaaagaacttcatattaccaagcctaagacacccccaaaggatggatttgtaatcgctgacgttcaactagttacaagcaattctccagaggaaaaacagtcccctttatcagcttttcggtcctcttcctctttaagaaagaagaataactcaggggagaaagcacttccaccctggcgatcttctgataagcacccaacagatatcattcgttttaattacctagacaaccgtgaccccatggagactgtccagcaaggaagaagaaaaagaaaccaaatgaccccagacttcagccgacagtcacatgataagaaaaataaattgcaggacagaactaggctaagaaaagcacaatcaatgatgtccctaagtgccagctctcccctaaaagttccagctcatctcgcctggcctccccctgagtcagtgggactcccagacactgccaccacagctgaaattctcatgcagcatcctcacaggcaccctgggccccaagcatgactcatccaggttccagagccaaagtggactgaacatggaaagacttttattatagaaatgacaagatgctttgcacagtggagagctgaatttacttggctcccattagaaactctttcagcttaagtacttattgtggtagtga

SEQ ID NO: 133556 - DNA, 1343 bp, Homo sapiens
  Payload ID: 6102
  Gene Symbol: FBXO16
  Gene Name: F-box protein 16
  Uniprot ID: Q8IX29
  ENST ID: ENST00000380254
  CDS Start-End: 150-1028
tttatagacggtgattgggctgctggaagctgggaggggtgagggactggagggagtcggagaaaaagctgacctaatgaaactgtggcaacgtcagcgcttgaggcttgaagagggagacaagctaaaagaggatatccagttgtttcatgatggcatttgcacctccaaaaaacacagatggtcccaaaatgcagacaaagatgagcacctggacacccctaaaccatcagctattgaatgaccgggtatttgaagaaagaagagccctgcttggcaaatggtttgacaaatggacagactctcaaagaagaagaatcctcacaggcctgttggagcgctgctcgctgtcccagcaaaagttctgctgtcgaaagcttcaagagaaaattccagcagaagccctggactttacaaccaagcttccaagggtgttatctttatacatcttttctttcctggaccctcggagcctttgtcgttgtgcacaggtgtgctggcattggaagaaccttgctgagctggaccagctctggatgctgaaatgtttacggtttaactggtacatcaatttctctccaactccctttgagcaggggatctggaagaagcactatattcaaatggtgaaagaacttcatattaccaagcctaagacacccccaaaggatggatttgtaatcgctgacgttcaactagttacaagcaattctccagaggaaaaacagtcccctttatcagcttttcggtcctcttcctctttaagaaagaagaataactcaggggagaaagcacttccaccctggcgatcttctgataagcacccaacagatatcattcgttttaattacctagacaaccgtgaccccatggagactgtccagcaaggaagaagaaaaagaaaccaaatgaccccagacttcagccgacagtcacatgataagaaaaataaattgcaggacagaactaggctaagaaaagcacaatcaatgatgtcgaggagaaatcccttcccactatgtccctaagtgccagctctcccctaaaagttccagctcatctcgcctggcctccccctgagtcagtgggactcccagacactgccaccacagctgaaattctcatgcagcatcctcacaggcaccctgggccccaagcatgactcatccaggttccagagccaaagtggactgaacatggaaagacttttattatagaaatgacaagatgctttgcacagtggagagctgaatttacttggctcccattagaaactctttcagcttaagtacttattgtggtagtgagtcctacggtatttcagtaaaaaggaattcatggca

SEQ ID NO: 133557 - DNA, 398 bp, Homo sapiens
  Payload ID: 6102
  Gene Symbol: FBXO16
  Gene Name: F-box protein 16
  ENST ID: ENST00000519471
  CDS Start-End: 17-226
gatatccagttgtttcatgatggcatttgcacctccaaaaaacacagatggtcccaaaatgcagacaaagatgagcacctggacacccctaaaccatcagctattgaatgaccgggtatttgaagaaagaagagccctgcttggcaaatggatggggtgttgctcgggctggtttcaaattcctgggctcaagagattctcctgcctctgcctcccaaagtgctgagattacagacatgagccaccacacggggcctatttctcctttcttcaacacatttctgcccctgaagccaaccaacctcctctgctcagctctgaggagctcttatctgttcttttgatgggatgctacctgattcatgaatcgctaataaaagccaattagatctttaaac

SEQ ID NO: 133558 - DNA, 2983 bp, Homo sapiens
  Payload ID: 6102
  Gene Symbol: FBXO16
  Gene Name: F-box protein 16
  ENST ID: ENST00000521548
  CDS Start-End: 109-1158
aaaaagctgacctaatgaaactgtggcaacgtcagcgcttgaggcttgaagagggagacaagctaaaagaggtgttgtttttcttatggaaggatatccagttgtttcatgatggcatttgcacctccaaaaaacacagatggtcccaaaatgcagacaaagatgagcacctggacacccctaaaccatcagctattgaatgaccgggtatttgaagaaagaagagccctgcttggcaaatggtttgacaaatggacagactctcaaagaagaagaatcctcacaggcctgttggagcgctgctcgctgtcccagcaaaagttctgctgtcgaaagcttcaagagaaaattccagcagaagccctggactttacaaccaagcttccaagggtgttatctttatacatcttttctttcctggaccctcggagcctttgtcgttgtgcacaggtgtgctggcattggaagaaccttgctgagctggaccagctctggatgctgaaatgtttacggtttaactggtacatcaatttctctccaactccctttgagcaggggatctggaagaagcactatattcaaatggtgaaagaacttcatattaccaagcctaagacacccccaaaggatggatttgtaatcgctgacgttcaactagttacaagcaattctccagaggaaaaacagtcccctttatcagcttttcggtcctcttcctctttaagaaagaagaataactcaggggagaaagcacttccaccctggcgatcttctgataagcacccaacagatatcattcgttttaattacctagacaaccgtgaccccatggagactgtccagcaaggaagaagaaaaagaaaccaaatgaccccagacttcagccgacagtcacatgataagaaaaataaattgcaggacagaactaggctaagaaaagcacaatcaatggtgatgggcagaggcttcagtgtccccttcgcctccgcaggagaggagaggcagcagcatggcgagtgtcctgtcccgacgccttggaaagcggtccctcctgggagcccgggtgttgggacccagtgcctcggaggggccctcggctgccccaccctcggagccactgctagaaggggccgctccccagcctttcaccacctctgatgacaccccctgccaggagcagcccaaggaagtccttaaggctcccagcacctcgggccttcagcaggtggcctttcagcctgggcagaaggtttatgtgtggtacgggggtcaagagtgcacaggactggtggagcagcacagctggatggagggtcaggtgaccgtctggctgctggagcagaagctgcaggtctgctgcagggtggaggaggtgtggctggcagagctgcagggcccctgtccccaggcaccacccctggagcccggagcccaggccctggcctacaggcccgtctccaggaacatcgatgtcccaaagaggaagtcggacgcagtggaaatggatgagatgatggcggccatggtgctgacgtccctgtcctgcagccctgttgtacagagtcctcccgggaccgaggccaacttctctgcttcccgtgcggcctgcgacccatggaaggagagtggtgacatctcggacagcggcagcagcactaccagcggtcactggagtgggagcagtggtgtctccaccccctcgcccccccacccccaggccagccccaagtatttgggggatgcttttggttctccccaaactgatcatggctttgagaccgatcctgaccctttcctgctggacgaaccagctccacgaaaaagaaagaactctgtgaaggtgatgtacaagtgcctgtggccaaactgtggcaaagttctgcgctccattgtgggcatcaaacgacacgtcaaagccctccatctgggggacacagtggactctgatcagttcaagcgggaggaggatttctactacacagaggtgcagctgaaggaggaatctgctgctgctgctgctgctgctgccgcaggcaccccagtccctgggactcccacctccgagccagctcccacccccagcatgactggcctgcctctgtctgctcttccaccacctctgcacaaagcccagtcctccggcccagaacatcctggcccggagtcctccctgccctcaggggctctcagcaagtcagctcctgggtccttctggcacattcaggcagatcatgcataccaggctctgccatccttccagatcccagtctcaccacacatctacaccagtgtcagctgggctgctgccccctccgccgcctgctctctctctccggtccggagccggtcgctaagcttcagcgagccccagcagccagcacctgcgatgaaatctcatctgatcgtcacttctccaccccgggcccagagtggtgccaggaaagcccgaggggaggctaagaagtgccgcaaggtgtatggcatcgagcaccgggaccagtggtgcacggcctgccggtggaagaaggcctgccagcgctttctggactgagctgtgctgcaggttctactctgttcctggccctgccggcagccactgacaagaggccagtgtgtcaccagccctcagcagaaaccgaaagagaaagaacggaaacacggagtttgggctctgttggctaaggtgtaacacttaaagcaattttctcccattgtgcgaacattttattttttaaaaaaaagaaacaaaaatatttttccccctaaaataggagagagccaaaactgaccaaggctattcagcagtgaaccagtgaccaaagaattaattaccctccgtttcccacatccccactctctaggggattagcttgtgcgtgtcaaaagaaggaacagctcgttctgcttcctgctgagtcggtgaattctttgctttctaaactcttccagaaaggactgtgagcaagatgaatttacttttctt

SEQ ID NO: 133559 - DNA, 607 bp, Homo sapiens
  Payload ID: 6102
  Gene Symbol: FBXO16
  Gene Name: F-box protein 16
  ENST ID: ENST00000517673
  CDS Start-End: 56-607
cagcgcttgaggcttgaagagggagacaagctaaaagaggatatccagttgtttcatgatggcatttgcacctccaaaaaacacagatggtcccaaaatgcagacaaagatgagcacctggacacccctaaaccatcagctattgaatgaccgggtatttgaagaaagaagagccctgcttggcaaatggtttgacaaatggacagactctcaaagaagaagaatcctcacaggcctgttggagcgctgctcgctgtcccagcaaaagttctgctgtcgaaagcttcaagagaaaattccagcagaagccctggactttacaaccaagcttccaagggtgttatctttatacatcttttctttcctggaccctcggagcctttgtcgttgtgcacagacacccccaaaggatggatttgtaatcgctgacgttcaactagttacaagcaattctccagaggaaaaacagtcccctttatcagcttttcggtcctcttcctctttaagaaagaagaataactcaggggagaaagcacttccaccctggcgatcttctgataagcacccaacagatatcattcgttttaattacctagacaaccgtgac

SEQ ID NO: 133560 - DNA, 995 bp, Homo sapiens
  Payload ID: 6102
  Gene Symbol: FBXO16
  Gene Name: F-box protein 16
  Uniprot ID: Q8IX29
  ENST ID: ENST00000518734
  CDS Start-End: 69-911
actgtggcaacgtcagcgcttgaggcttgaagagggagacaagctaaaagaggatatccagttgtttcatgatggcatttgcacctccaaaaaacacagatggtcccaaaatgcagacaaagatgagcacctggacacccctaaaccatcagctattgaatgaccggtttgacaaatggacagactctcaaagaagaagaatcctcacaggcctgttggagcgctgctcgctgtcccagcaaaagttctgctgtcgaaagcttcaagagaaaattccagcagaagccctggactttacaaccaagcttccaagggtgttatctttatacatcttttctttcctggaccctcggagcctttgtcgttgtgcacaggtgtgctggcattggaagaaccttgctgagctggaccagctctggatgctgaaatgtttacggtttaactggtacatcaatttctctccaactccctttgagcaggggatctggaagaagcactatattcaaatggtgaaagaacttcatattaccaagcctaagacacccccaaaggatggatttgtaatcgctgacgttcaactagttacaagcaattctccagaggaaaaacagtcccctttatcagcttttcggtcctcttcctctttaagaaagaagaataactcaggggagaaagcacttccaccctggcgatcttctgataagcacccaacagatatcattcgttttaattacctagacaaccgtgaccccatggagactgtccagcaaggaagaagaaaaagaaaccaaatgaccccagacttcagccgacagtcacatgataagaaaaataaattgcaggacagaactaggctaagaaaagcacaatcaatgatgtcgaggagaaatcccttcccactatgtccctaagtgccagctctcccctaaaagttccagctcatctcgcctggcctccccctgagtcagtgggactcccagacactgccaccacag

SEQ ID NO: 133561 - DNA, 603 bp, Homo sapiens
  Payload ID: 6102
  Gene Symbol: FBXO16
  Gene Name: F-box protein 16
  ENST ID: ENST00000518248
  CDS Start-End: 1-284
atattcaaatggtgaaagaacttcatattaccaagcctaagacacccccaaaggatggatttgtaatcgctgacgttcaactagttacaagcaattctccagaggaaaaacagtcccctttatcagcttttcggtcctcttcctctttaagaaagaagaataactcaggggagaaagcacttccaccctggcgatcttctgataagcacccaacagatatcattcgttttaattacctagacaaccgtgaccccatggagactgtccagcaaggatgtccctaagtgccagctctcccctaaaagttccagctcatctcgcctggcctccccctgagtcagtgggactcccagacactgccaccacagctgaaattctcatgcagcatcctcacaggcaccctgggccccaagcatgactcatccaggttccagagccaaagtggactgaacatggaaagacttttattatagaaatgacaagatgctttgcacagtggagagctgaatttacttggctcccattagaaactctttcagcttaagtacttattgtggtagtgagtcctacggtatttcagtaaaaaggaattcatggcataaa

SEQ ID NO: 133562 - DNA, 2386 bp, Homo sapiens
  Payload ID: 6103
  Gene Symbol: FBXO17
  Gene Name: F-box protein 17
  Uniprot ID: Q96EF6
  ENST ID: ENST00000292852
  CDS Start-End: 343-1179
ccgctccccgctggcctcgcggcaactgggcctccccctcgctgcacgcagccctccaagctcccccgcccgcccgccctcgctcccgctgggccccgcagccggaggaggggcggcctcccgcccccgcccgctggatctcagagtcgccgcccccggcgccgggctgcagccgccacgccccgggagaggaccgaccgcccagaccgccggtcccggggccccctgggccacgccgatcacggggagcccctcgactgcctcccagaacaaagtgggaaagggaagcttagcccgccgctgccgcctccgagcagcccgccaggactctggctactggagatgggcgcccggctatcgcggcgacggctgccggcggacccatccctggccctggacgcgctgcccccggagctgctggtgcaggtgctgagccacgtgccgccacgctccttggtcacgcgatgccgcccagtgtgccgcgcctggcgcgacatagtggacgggcccactgtgtggctgctgcagctggcccgcgaccgcagcgccgagggccgcgcactctacgcagtggctcaacgctgcctgcccagcaacgaagacaaggaggagttcccgctgtgcgccctggcgcgctactgtctgcgcgcgcccttcggccgcaatctcatcttcaactcctgcggagagcagggcttcagaggctgggaggtggagcatggcgggaacggctgggccatagaaaagaacctaacaccggtgcctggggctccttcgcagacctgcttcgtgacctctttcgaatggtgctccaagaggcagcttgtggacctggtgatggaaggggtgtggcaggagctgctggacagcgcccagattgagatctgtgtggctgactggtggggcgctcgagagaactgcggctgcgtctaccagctccgggtccgccttctggatgtgtatgaaaaggaagtggtcaagttctcagcctcacctgacccggtccttcagtggactgagaggggctgccgacaggtctcccacgtcttcaccaactttggcaagggcatccgctacgtatcttttgagcagtacgggagagacgtgagttcctgggtggggcactatggcgcccttgtgacccactccagtgtgagggtcaggatccgtctgtcctagcgactggactactgcctgacgttgtcagtcaagaccagccttgcagccaggtgcagtggctcacacctgtggaatcccagcacttcaggaggccgaggtgggaggatcactggagctcgggagttcaagaccagcctgggcaacatagtgaaaccgtctccacaaataatttttaaaaaattagccaggcatggtggtgccgcctgtagtcccagctactcaggaggcttgggtgggaggattgcctgagaccaggaggttgaggctgcagtgagccgtgatttcaccaccactccagcctgggtgagaaagcaagaccctatatcaatgaaaaaaaaaaaaaaaaagaccagctttgcagccagaagccagaggatacccagggacagtagggctcccaggtggctggttctcagcacaccttccatgaatctgcttgctgctgcttcagtgtggtggccatcatgctgtgtgacaaaccaggctgttcacagcttcctcagccccccagaaggggagtgtcaggaagagacatttagttcatttgcctgcaaattttcttctcctgcaaggatctcggtggactcagtcacaaaacaaaggctaaaccaggatttataagagagggcttataaatccctctgccgacgcagggagcagagacttgccggcatgttttgggggtaatgatcgtgggcagggagcagaggtccgctgaggcagtctgtccttgagactaacaaagtcatctgctgtttggggaaatctctggtgttgggaacaggcccccaaatctggccataaactggccccaaaactggccataaacaaaatatctgcagcactgtgacatgtttgtgatggccatgacccccaccctgaaggttgtgggtttactggaacgagggcgaggaacacctggcccacccagggcggaaaaccgcttaaaggggttcctgaaccacaaaccatagcataagtgatctgtgccttaacgacatgttcctgctgcagataactagccagacccatccctttatttcagcccatccctttatttcctgtaagaaatgtttttagttaatctataatctatagaaataatgcttatcactggcttgctgtcaataaatatgtgggtaaatctctgttcaaggctctcagctctgaaggccgtgagacccctgatttcccactccacacccta

SEQ ID NO: 133563 - DNA, 2366 bp, Homo sapiens
  Payload ID: 6103
  Gene Symbol: FBXO17
  Gene Name: F-box protein 17
  ENST ID: ENST00000601394
  CDS Start-End: 1-330
atagtggacgggcccactgtgtggctgctgcagctggcccgcgaccgcagcgccgagggccgcgcactctacgcagtggctcaacgctgcctgcccagcaacgaagacaaggaggagttcccgctgtgcgccctggcgcgctactgtctgcgcgcgcccttcggccgcaatctcatcttcaactcctgcggagagcagggcttcagaggctgggaggtggagcatggcgggaacggctgggccatagaaaagaacctaacaccggtgcctggggctccttcgcagacctgcttcgtgacctctttcgaagaagaggtttcaccatattgaccaggctcgtctctaactcccgacctccggtgatccgcctgcctcgggctctcaaagtgctgggattacaggtctaagccaccgcgctcagccggttcctggcactttgttctattccattgctcaacttacccatccttccaccaatactgcacaatttatgttattatggcacattctagtttgaggagaaggactgtttacaaagttgtaggcaggagcccctgagctagtaacagttaggaaaggaacgttaccacccctagactgctagaggtgaggggaggaaacagttactggaaaatgaggagagagtgccatggagatttgctttttccttgggggacaaggcagtcccttgagaaggacctaagaggataaataccctgattttagtcacctctttcacttccatcccctgccggagcatcccattggctgatccaacaggaagcaatgggtgacagagacaaggctgtccagctttagacccggggccctcacactttaggaggccacagagctccccgctcacatgtctagtatgtggccttcatttgtagtcatgtcctgtcccacaaagatgagggtcaggctttcatagaggtcagctgcctggagcccgcagcagggtggagaatggcaaagggactccaagaggccaaggagagatgtatagcccatcatgcatcttcaggtctgctagagcaaaccctgagggctgctttagagagggttatcaagggagacttcttggaggaggtggcttctgactgtgacttgaatgccaggactgtttgccctgccccctgccatctctccttcccagatggtgctccaagaggcagcttgtggacctggtgatggaaggggtgtggcaggagctgctggacagcgcccagattgagatctgtgtggctgactggtgagtgaggagcggcaccctgccccagagcagcagcaggcttggcagcggctctgcaacaggggctcatttcccgccccatcaaccccacgggtagcggctgtcactgtgcaccctttgtgatgaggctgagaggggaagtgatgcagagccggggaaggtagagctttggagaagccagagcccccactctgcactcctgcccaccctcatcccagcaggctggggtggtccacagggggccactgactggcttgatacccctctgaaacgagacacctcccctgaccaccttgtggatgcccagggtctctgaaggggtgggagcatggtgccctgtgagctgaggctcagggagcatagttgggacaggactggcttcagagcctacaggcttaggatgaatgccttcttcccaaaacacccaggttctgccccaaagcattccagctcctccttcaggctgtggctcttccatagaaaatctggtctcttccctggggctctggctcttccctgaagtcatcaggcacctgccctgcattgtggttcttccccagagcatcctttcccgtcccccaactacctacccaaaagcctccagaatcaaccgcaggaccacccaggctcctcccccaggaccacccaggctcctcccctgctctggctccaccccaggaccacccagactcctcccccaggctctggctccaccccagggctctggctccaccccaggaccacccaggctcctcccccaggctctggctcctccccaggaccacccaggctcctccgccaggctctggttccaccccagaaccaccaaggctcctcccctagaggttcccaggccaggacgtctccaaatgtggtccagatgtgcaggaccttcatcaagatggagccagccctcagcctcccgccccgaaacccagagagctggctgggtgacgggggcatagaggctgactgctgcctggcaggtggggcgctcgagagaactgcggctgcgtctaccagctccgggtccgccttctggatgtgtatgaaaaggaagtggtcaagttctcagcctcacctgacccggtccttcagtggactgagaggg

SEQ ID NO: 133564 - DNA, 935 bp, Homo sapiens
  Payload ID: 6103
  Gene Symbol: FBXO17
  Gene Name: F-box protein 17
  ENST ID: ENST00000596025
  CDS Start-End: 135-668
gccggtcccggggccccctgggccacgccgatcacggggagcccctcgactgcctcccagaacaaagtgggaaagggaagcttagcccgccgctgccgcctccgagcagcccgccaggactctggctactggagatgggcgcccggctatcgcggcgacggctgccggcggacccatccctggccctggacgcgctgcccccggagctgctggtgcaggtgctgagccacgtgccgccacgctccttggtcacgcgatgccgcccagtgtgccgcgcctggcgcgacatagtggacgggcccactgtgtggctgctgcagctggcccgcgaccgcagcgccgagggccgcgcactctacgcagtggctcaacgctgcctgcccagcaacgaagacaaggaggagttcccgctgtgcgccctggcgcgctactgtctgcgcgcgcccttcggccgcaatctcatcttcaactcctgcggagagcagggcttcagaggctgggaggtggagcatggcgggaacggctgggccatagaaaagaacctaacaccggtgcctggggctccttcgcagacctgcttcgtgacctctttcgagactgtttgccctgccccctgccatctctccttcccagatggtgctccaagaggcagcttgtggacctggtgatggaaggggtgtggcaggagctgctggacagcgcccagattgagatctgtgtggctgactggtggggcgctcgagagaactgcggctgcgtctaccagctccgggtccgccttctggatgtgtatgaaaaggaagtggtcaagttctcagcctcacctgacccggtccttcagtggactgagaggggctgccgacaggtctcccacgtcttcaccaactttggcaagggcatccgctacgtatcttttgagcagtacgggagagacg

SEQ ID NO: 133565 - DNA, 1299 bp, Homo sapiens
  Payload ID: 6103
  Gene Symbol: FBXO17
  Gene Name: F-box protein 17
  Uniprot ID: Q96EF6
  ENST ID: ENST00000595329
  CDS Start-End: 133-969
atagaaatcactgagaatgatgctaagagcagcgggagcggccgtgagcccagagctaaaattagggagaagagaggagtcatgatctgggtcagcagatgacgcatgaagcaaggactctggctactggagatgggcgcccggctatcgcggcgacggctgccggcggacccatccctggccctggacgcgctgcccccggagctgctggtgcaggtgctgagccacgtgccgccacgctccttggtcacgcgatgccgcccagtgtgccgcgcctggcgcgacatagtggacgggcccactgtgtggctgctgcagctggcccgcgaccgcagcgccgagggccgcgcactctacgcagtggctcaacgctgcctgcccagcaacgaagacaaggaggagttcccgctgtgcgccctggcgcgctactgtctgcgcgcgcccttcggccgcaatctcatcttcaactcctgcggagagcagggcttcagaggctgggaggtggagcatggcgggaacggctgggccatagaaaagaacctaacaccggtgcctggggctccttcgcagacctgcttcgtgacctctttcgaatggtgctccaagaggcagcttgtggacctggtgatggaaggggtgtggcaggagctgctggacagcgcccagattgagatctgtgtggctgactggtggggcgctcgagagaactgcggctgcgtctaccagctccgggtccgccttctggatgtgtatgaaaaggaagtggtcaagttctcagcctcacctgacccggtccttcagtggactgagaggggctgccgacaggtctcccacgtcttcaccaactttggcaagggcatccgctacgtatcttttgagcagtacgggagagacgtgagttcctgggtggggcactatggcgcccttgtgacccactccagtgtgagggtcaggatccgtctgtcctagcgactggactactgcctgacgttgtcagtcaagaccagccttgcagccaggtgcagtggctcacacctgtggaatcccagcacttcaggaggccgaggtgggaggatcactggagctcgggagttcaagaccagcctgggcaacatagtgaaaccgtctccacaaataatttttaaaaaattagccaggcatggtggtgccgcctgtagtcccagctactcaggaggcttgggtgggaggattgcctgagaccaggaggttgaggctgcagtgagccgtgatttcaccaccactccagcctgggtgagaaagcaagaccctatatcaatg

SEQ ID NO: 133566 - DNA, 510 bp, Homo sapiens
  Payload ID: 6103
  Gene Symbol: FBXO17
  Gene Name: F-box protein 17
  ENST ID: ENST00000599598
  CDS Start-End: 1-284
gggctccttcgcagacctgcttcgtgacctctttcgaatggtgctccaagaggcagcttgtggacctggtgatggaaggggtgtggcaggagctgctggacagcgcccagattgagatctgtgtggctgactggtggggcgctcgagagaactgcggctgcgtctaccagctccgggtccgccttctggatgtgtatgaaaaggaagtggtcaagttctcagcctcacctgacccggtccttcagtggactgagaggggctgccgacaggtgggtccagactagcttccagctccccccgacccgctaaaggcacacacgcccagcctctcgtctgctcggtttcccttctgtcactcctggatatctataatcataacagctaagaagtatcgagcccttcttacatcccaagccctgtgtcaagacgcttacatatcgattcatttcattagcaaaaccccttaatgttcaacaaacactgattgagcacctactgtgtgctgggcac

SEQ ID NO: 133567 - DNA, 2386 bp, Homo sapiens; identical to SEQ ID NO: 133562
  Payload ID: 6103
  Gene Symbol: FBXO17
  Gene Name: F-box protein 17
  ENST ID: ENST00000634982
  CDS Start-End: 343-1179

SEQ ID NO: 133568 - DNA, 510 bp, Homo sapiens; identical to SEQ ID NO: 133566
  Payload ID: 6103
  Gene Symbol: FBXO17
  Gene Name: F-box protein 17
  ENST ID: ENST00000634917
  CDS Start-End: 1-284

SEQ ID NO: 133569 - DNA, 935 bp, Homo sapiens; identical to SEQ ID NO: 133564
  Payload ID: 6103
  Gene Symbol: FBXO17
  Gene Name: F-box protein 17
  ENST ID: ENST00000634720
  CDS Start-End: 135-668

SEQ ID NO: 133570 - DNA, 2366 bp, Homo sapiens; identical to SEQ ID NO: 133563
  Payload ID: 6103
  Gene Symbol: FBXO17
  Gene Name: F-box protein 17
  ENST ID: ENST00000635016
  CDS Start-End: 1-330

SEQ ID NO: 133571 - DNA, 1299 bp, Homo sapiens; identical to SEQ ID NO: 133565
  Payload ID: 6103
  Gene Symbol: FBXO17
  Gene Name: F-box protein 17
  ENST ID: ENST00000635115
  CDS Start-End: 133-969

SEQ ID NO: 133572 - DNA, 1560 bp, Homo sapiens
  Payload ID: 6104
  Gene Symbol: FBXO2
  Gene Name: F-box protein 2
  Uniprot ID: Q9UK22
  ENST ID: ENST00000354287
  CDS Start-End: 343-1233
gtgcctcccctagccgcctcctcccagcagtcccccaggagcgagctgcgagatgccccaaatcggacccctccccagttggaaaaaaaacgactcctgacctttcccagcctcctcggtccgctgaggaacccgcagccccgggcctcgagcagactgctgggactgcggggcggccgggcgcggggccagaggcggggcggggcgggtcgggtcgggggcctttaagaggcgcggtcgccgggaccgacacagacgcggacagcgccgggactcgccgccccgggactcgcgcagcccgcagcgctccggctcctcctctcgcgaccgccctccgcagcgatggacggagacggtgacccagagagcgtgggccagcccgaggaggcaagcccggaggagcagccagaggaggcgagtgctgaggaggagcggccggaggaccagcaggaggaggaggcggcggccgccgccgcgtacctggacgagctgcccgagccgctgctgctgcgcgtgctggccgcactgccggccgccgagctggtgcaggcctgccgcctggtgtgcctgcgctggaaggagctggtggacggcgccccgctgtggctgctcaagtgccagcaggaggggctggtgcccgagggcggcgtggaggaggagcgcgaccactggcagcagttctacttcctgagcaagcggcgccgcaaccttctgcgtaacccgtgtggggaagaggacttggaaggctggtgtgacgtggagcatggtggggacggctggagggtggaggagctgcctggagacagtggggtggagttcacccacgatgagagcgtcaagaagtacttcgcctcctcctttgagtggtgtcgcaaagcacaggtcattgacctgcaggctgagggctactgggaggagctgctggacacgactcagccggccatcgtggtgaaggactggtactcgggccgcagcgacgctggttgcctctacgagctcaccgttaagctactgtccgagcacgagaacgtgctggctgagttcagcagcgggcaggtggcagtgccccaagacagtgacggcgggggctggatggagatctcccacaccttcaccgactacgggccgggcgtccgcttcgtccgcttcgagcacggggggcaggactccgtctactggaagggctggttcggggcccgggtgaccaacagcagcgtgtgggtagaaccctgagcgaccctgcctccactctcccccagctgcctggaggggcaaaggtcgagggtagataggccttaacttagtccatagcgtcctcaccttccccaagccacacatcctcctcccatcccttgctccgatcccagcccctgagcagggagagagaagttttgttggcataggtttgcttaggtagccggcttctagaatgtagatccgtgagggcgtgagcttggactggacccactgctgattccctgcacctagcacagtgcttgccacaaagtgggctctcaataaatattatttgtccaaggaaggaatgaatgaaaaaatgga

SEQ ID NO: 133573 - DNA, 434 bp, Homo sapiens
  Payload ID: 6104
  Gene Symbol: FBXO2
  Gene Name: F-box protein 2
  ENST ID: ENST00000465901
  CDS Start-End: 74-434
aggcctcatccctgctctgccatttatctcgggagagcatggtgcctctcccagcctgtttccttctctgtaaatggatgccttacctccaggggtcactggggcggtccaaggagcttgggacacatcaggtactttaataaaagagagcgtgggccagcccgaggaggcaagcccggaggagcagccagaggaggcgagtgctgaggaggagcggccggaggaccagcaggaggaggaggcggcggccgccgccgcgtacctggacgagctgcccgagccgctgctgctgcgcgtgctggccgcactgccggccgccgagctggtgcaggcctgccgcctggtgtgcctgcgctggaaggagctggtggacggcgccccgctgtggctgctcaagtgccagcaggaggggctggtgcccgagggcggcgtgg

SEQ ID NO: 133574 - DNA, 2906 bp, Homo sapiens
  Payload ID: 6105
  Gene Symbol: FBXO21
  Gene Name: F-box protein 21
  Uniprot ID: O94952
  ENST ID: ENST00000330622
  CDS Start-End: 1-1887
atggcggcggcagcagtcgacagcgcgatggaggtggtgccggcgctggcggaggaggccgcgccggaggtagcgggcctcagctgcctcgtcaacctgccgggtgaggtgctggagtacatcctgtgctgcggctcgctgacggccgccgacatcggccgtgtctccagcacctgccggcggctgcgcgagctgtgccagagcagcgggaaggtgtggaaggagcagttccgggtgaggtggccttcccttatgaaacactacagccccaccgactacgtcaattggttggaagagtataaagttcggcaaaaagctgggttagaagcgcggaagattgtagcctcgttctcaaagaggttcttttcagagcacgttccttgtaatggcttcagtgacattgagaaccttgaaggaccagagattttttttgaggatgaactggtgtgtatcctaaatatggaaggaagaaaagctttgacctggaaatactacgcaaaaaaaattctttactacctgcggcaacagaagatcttaaataatcttaaggcctttcttcagcagccagatgactatgagtcgtatcttgaaggtgctgtatatattgaccagtactgcaatcctctctccgacatcagcctcaaagacatccaggcccaaattgacagcatcgtggagcttgtttgcaaaacccttcggggcataaacagtcgccaccccagcttggccttcaaggcaggtgaatcatccatgataatggaaatagaactccagagccaggtgctggatgccatgaactatgtcctttacgaccaactgaagttcaaggggaatcgaatggattactataatgccctcaacttatatatgcatcaggttttgattcgcagaacaggaatcccaatcagcatgtctctgctctatttgacaattgctcggcagttgggagtcccactggagcctgtcaacttcccaagtcacttcttattaaggtggtgccaaggcgcagaaggggcgaccctggacatctttgactacatctacatagatgcttttgggaaaggcaagcagctgacagtgaaagaatgcgagtacttgatcggccagcacgtgactgcagcactgtatggggtggtcaatgtcaagaaggtgttacagagaatggtgggaaacctgttaagcctggggaagcgggaaggcatcgaccagtcataccagctcctgagagactcgctggatctctatctggcaatgtacccggaccaggtgcagcttctcctcctccaagccaggctttacttccacctgggaatctggccagagaagtctttctgtcttgttttgaaggtgcttgacatcctccagcacatccaaaccctagacccggggcagcacggggcggtgggctacctggtgcagcacactctagagcacattgagcgcaaaaaggaggaggtgggcgtagaggtgaagctgcgctccgatgagaagcacagagatgtctgctactccatcgggctcattatgaagcataagaggtatggctataactgtgtgatctacggctgggaccccacctgcatgatgggacacgagtggatccggaacatgaacgtccacagcctgccgcacggccaccaccagcctttctataacgtgctggtggaggacggctcctgtcgatacgcagcccaagaaaacttggaatataacgtggagcctcaagaaatctcacaccctgacgtgggacgctatttctcagagtttactggcactcactacatcccaaacgcagagctggagatccggtatccagaagatctggagtttgtctatgaaacggtgcagaatatttacagtgcaaagaaagagaacatagatgagtaaagtctagagaggacattgcacctttgctgctgctgctatcttccaagagaacgggactccggaagaagacgtctccacggagccctcgggacctgctgcaccaggaaagccactccaccagtagtgctggttgcctcctactaagtttaaataccgtgtgctcttccccagctgcaaagacaatgttgctctccgcctacactagtgaattaatctgaaaggcactgtgtcagtggcatggcttgtatgcttgtcctgtggtgacagtttgtgacattctgtcttcatgaggtctcacagtcgacgctcctgtaatcattctttgtattcactccattcccctgtctgtctgcatttgtctcagaacatttccttggctggacagatggggttatgcatttgcaataatttccttctgatttctctgtggaacgtgttcggtcccgagtgaggactgtgtgtctttttaccctgaagttagttgcatattcagaggtaaagttgtgtgctatcttggcagcatcttagagatggagacattaacaagctaatggtaattagaatcatttgaatttatttttttctaatatgtgaaacacagatttcaagtgttttatcttttttttttaaatttaaatgggaatataacacagttttcccttccatattcctctcttgagtttatgcacatctctataaatcattagttttctattttattacataaaattcttttagaaaatgcaaatagtgaactttgtgaatggatttttccatactcatctacaattcctccattttaaatgactacttttattttttaatttaaaaaatctacttcagtatcatgagtaggtcttacatcagtgatgggttctttttgtagtgagacatacaaatctgatgttaatgtttgctcttagaagtcatactccatggtcttcaaagaccaaaaaatgaggttttgcttttgtaatcaggaaaaaaaaaaattaatgaaccttaaaaaaaaaaaaaaa

SEQ ID NO: 133575 - DNA, 4138 bp, Homo sapiens
  Payload ID: 6105
  Gene Symbol: FBXO21
  Gene Name: F-box protein 21
  ENST ID: ENST00000427718
  CDS Start-End: 219-1832
aggtacgcggacaagatggcggcggcagcagtcgacagcgcgatggaggtggtgccggcgctggcggaggaggccgcgccggaggtagcgggcctcagctgcctcgtcaacctgccgggtgaggtgctggagtacatcctgtgctgcggctgcgcgagctgtgccagagcagcgggaaggtgtggaaggagcagttccgggtgaggtggccttcccttatgaaacactacagccccaccgactacgtcaattggttggaagagtataaagttcggcaaaaagctgggttagaagcgcggaagattgtagcctcgttctcaaagaggttcttttcagagcacgttccttgtaatggcttcagtgacattgagaaccttgaaggaccagagattttttttgaggatgaactggtgtgtatcctaaatatggaaggaagaaaagctttgacctggaaatactacgcaaaaaaaattctttactacctgcggcaacagaagatcttaaataatcttaaggcctttcttcagcagccagatgactatgagtcgtatcttgaaggtgctgtatatattgaccagtactgcaatcctctctccgacatcagcctcaaagacatccaggcccaaattgacagcatcgtggagcttgtttgcaaaacccttcggggcataaacagtcgccaccccagcttggccttcaaggcaggtgaatcatccatgataatggaaatagaactccagagccaggtgctggatgccatgaactatgtcctttacgaccaactgaagttcaaggggaatcgaatggattactataatgccctcaacttatatatgcatcaggttttgattcgcagaacaggaatcccaatcagcatgtctctgctctatttgacaattgctcggcagttgggagtcccactggagcctgtcaacttcccaagtcacttcttattaaggtggtgccaaggcgcagaaggggcgaccctggacatctttgactacatctacatagatgcttttgggaaaggcaagcagctgacagtgaaagaatgcgagtacttgatcggccagcacgtgactgcagcactgtatggggtggtcaatgtcaagaaggtgttacagagaatggtgggaaacctgttaagcctggggaagcgggaaggcatcgaccagtcataccagctcctgagagactcgctggatctctatctggcaatgtacccggaccaggtgcagcttctcctcctccaagccaggctttacttccacctgggaatctggccagagaaggtgcttgacatcctccagcacatccaaaccctagacccggggcagcacggggcggtgggctacctggtgcagcacactctagagcacattgagcgcaaaaaggaggaggtgggcgtagaggtgaagctgcgctccgatgagaagcacagagatgtctgctactccatcgggctcattatgaagcataagaggtatggctataactgtgtgatctacggctgggaccccacctgcatgatgggacacgagtggatccggaacatgaacgtccacagcctgccgcacggccaccaccagcctttctataacgtgctggtggaggacggctcctgtcgatacgcagcccaagaaaacttggaatataacgtggagcctcaagaaatctcacaccctgacgtgggacgctatttctcagagtttactggcactcactacatcccaaacgcagagctggagatccggtatccagaagatctggagtttgtctatgaaacggtgcagaatatttacagtgcaaagaaagagaacatagatgagtaaagtctagagaggacattgcacctttgctgctgctgctatcttccaagagaacgggactccggaagaagacgtctccacggagccctcgggacctgctgcaccaggaaagccactccaccagtagtgctggttgcctcctactaagtttaaataccgtgtgctcttccccagctgcaaagacaatgttgctctccgcctacactagtgaattaatctgaaaggcactgtgtcagtggcatggcttgtatgcttgtcctgtggtgacagtttgtgacattctgtcttcatgaggtctcacagtcgacgctcctgtaatcattctttgtattcactccattcccctgtctgtctgcatttgtctcagaacatttccttggctggacagatggggttatgcatttgcaataatttccttctgatttctctgtggaacgtgttcggtcccgagtgaggactgtgtgtctttttaccctgaagttagttgcatattcagaggtaaagttgtgtgctatcttggcagcatcttagagatggagacattaacaagctaatggtaattagaatcatttgaatttatttttttctaatatgtgaaacacagatttcaagtgttttatcttttttttttaaatttaaatgggaatataacacagttttcccttccatattcctctcttgagtttatgcacatctctataaatcattagttttctattttattacataaaattcttttagaaaatgcaaatagtgaactttgtgaatggatttttccatactcatctacaattcctccattttaaatgactacttttattttttaatttaaaaaatctacttcagtatcatgagtaggtcttacatcagtgatgggttctttttgtagtgagacatacaaatctgatgttaatgtttgctcttagaagtcatactccatggtcttcaaagaccaaaaaatgaggttttgcttttgtaatcaggaaaaaaaaaaattaatgaaccttaaaaaaaaaaaaaaaggttttgaagggaaaaaaagtggtttcacacctcttgttattccttagagtcacttcaaggcctgtttgaatgtggcaggttagaaagagagagaatgtctttcatttgaagagtgttggacttgtgtgaaaggagatgtgcgtgttggaatctgcttttccaagccgccagggtcctgacggcagcaggacgaagcctgttgtggcgtcttctgggaaagcctgaccgtgtgttcggacggcactggctcctttccgaagttctcagtaactgagcccagagtaactgcacgcctttgtgcagctctggagctccaccaactctcggcctgccagttctcaagcgagctaatcttgtcattaatcgatagaagctaacttccgaagttaggacctagttactttgctctcaacatttaaaataatgcagttgctctagtgaatggggcgttaggggcctgtctctgcacctgtctgtccatctgcatgcagtattctcacccatgttgaatgcctgctgcttgtttaccctttggaaaccctggggtgaccaaggtttggaaagccacctgagaccacttcatagcaagggaaggctttaagcagttactagaaagagatggggatttggcccctggctcctccagcctgaatgagctatttaatccactgtccatgttcctcatcagtcaaatccaaagtcaaaggatttgaacctgcatctggaaacgtaaccactcacagcacctggcccgccaaggttgggaggattgtacactactttcatttaaaggggaaagtttgataatacggaattaattaatatgaatgagatgcattaataagaacctgagcatgctgagagttgcaattgttggttttctggtttgattgatttccttttttcttagacacatcaaagtcaagaaagatggttttacctttactgacccagctgtacatatgtatctagactgtttttaaatgtctttcttcatgaatgcttcatggggctccaggaagcctgtatcacctgtgtaagttggtatttgggcactttatatttttctaaaaacgtgttttggatcctgtactctaataaatcataagtttctttttaaaaattttccaaaacttttctccattttaaaaagccctgttataaacgttgaactttcacaatgttaaaatgttaaatatttggatatagcaacttcttttctcttcaaatgaatgccaagatttttttgtacaatgattaataaatggaacttatccagagaaacc

SEQ ID NO: 133576 - DNA, 1214 bp, Homo sapiens
  Payload ID: 6105
  Gene Symbol: FBXO21
  Gene Name: F-box protein 21
  ENST ID: ENST00000548840
  CDS Start-End: 1-678
atagatgcttttgggaaaggcaagcagctgacagtgaaagaatgcgagtacttgatcggccagcacgtgactgcagcactgtatggggtggtcaatgtcaagaaggtgttacagagaatggtgggaaacctgttaagcctggggaagcgggaaggcatcgaccagtcataccagctcctgagagactcgctggatctctatctggcaatgtacccggaccaggtgcagcttctcctcctccaagccaggctttacttccacctgggaatctggccagagaagtctttctgtcttgttttgaaggtgcttgacatcctccagcacatccaaaccctagacccggggcagcacggggcggtgggctacctggtgcagcacactctagagcacattgagcgcaaaaaggaggaggtgggcgtagaggtgaagctgcgctccgatgagaagcacagagatgtctgctactccatcgggctcattatgaagcataagaggtatggctataactgtgtgatctacggctgggaccccacctgcatgatgggacacgagtggatccggaacatgaacgtccacagcctgccgcacggccaccaccagcctttctataacgtgctggtggaggacggctcctgtcgatacgcagcccaaggtgccgccctggcgaggggtcagtagtcatacccgccctcccccagggcctccgctcccacagcccggacatctgattggccactgtctatgccaatcaaattcctgtaagtcctgcctcctggaccctgccctcggctcctcccagactagaagggaaccggatgaacacctgggggccccctagtgctccctggcctcccaaggctgtggctgccggctgacgccggagatgccctcgtgtggccacctgtgggaactgcagcccactgcgccggccctgggagcacctgagagcccgcaagtgtacagtaaggttgggtaggcgtctgggccactgccgccccggcaggtgccagcccagggcaaggctgaggtggagactgacagagcctgtggaagctggtaagagacaagaatgccttcagtgtgagtctcccttctctttgttcctgttgaatttcacctctacttaataggatgaattcagtgtatgtctgtcaaagcattcacattgattaattaataattcacatttattaataaaaatgaatgtgaatgct

SEQ ID NO: 133577 - DNA, 2554 bp, Homo sapiens
  Payload ID: 6105
  Gene Symbol: FBXO21
  Gene Name: F-box protein 21
  ENST ID: ENST00000550180
  CDS Start-End: 1-1516
cacctgccggcggctgcgcgagctgtgccagagcagcgggaaggtgtggaaggagcagttccgggtgaggtggccttcccttatgaaacactacagccccaccgactacgtcaattggttggaagagtataaagttcggcaaaaagctgggttagaagcgcggaagattgtagcctcgttctcaaagaggttcttttcagagcacgttccttgtaatggcttcagtgacattgagaaccttgaaggaccagagattttttttgaggatgaactggtgtgtatcctaaatatggaaggaagaaaagctttgacctggaaatactacgcaaaaaaaattctttactacctgcggcaacagaagatcttaaataatcttaaggcctttcttcagcagccagatgactatgagtcgtatcttgaaggtgctgtatatattgaccagtactgcaatcctctctccgacatcagcctcaaagacatccaggcccaaattgacagcatcgtggagcttgtttgcaaaacccttcggggcataaacagtcgccaccccagcttggccttcaaggcaggtgaatcatccatgataatggaaatagaactccagagccaggtgctggatgccatgaactatgtcctttacgaccaactgaagttcaaggggaatcgaatggattactataatgccctcaacttatatatgcatcaggttttgattcgcagaacaggaatcccaatcagcatgtctctgctctatttgacaattgctcggcagttgggagtcccactggagcctgtcaacttcccaagtcacttcttattaaggtggtgccaaggcgcagaaggggaaggcatcgaccagtcataccagctcctgagagactcgctggatctctatctggcaatgtacccggaccaggtgcagcttctcctcctccaagccaggctttacttccacctgggaatctggccagagaaggtgcttgacatcctccagcacatccaaaccctagacccggggcagcacggggcggtgggctacctggtgcagcacactctagagcacattgagcgcaaaaaggaggaggtgggcgtagaggtgaagctgcgctccgatgagaagcacagagatgtctgctactccatcgggctcattatgaagcataagaggtatggctataactgtgtgatctacggctgggaccccacctgcatgatgggacacgagtggatccggaacatgaacgtccacagcctgccgcacggccaccaccagcctttctataacgtgctggtggaggacggctcctgtcgatacgcagcccaagaaaacttggaatataacgtggagcctcaagaaatctcacaccctgacgtgggacgctatttctcagagtttactggcactcactacatcccaaacgcagagctggagatccggtatccagaagatctggagtttgtctatgaaacggtgcagaatatttacagtgcaaagaaagagaacatagatgagtaaagtctagagaggacattgcacctttgctgctgctgctatcttccaagagaacgggactccggaagaagacgtctccacggagccctcgggacctgctgcaccaggaaagccactccaccagtagtgctggttgcctcctactaagtttaaataccgtgtgctcttccccagctgcaaagacaatgttgctctccgcctacactagtgaattaatctgaaaggcactgtgtcagtggcatggcttgtatgcttgtcctgtggtgacagtttgtgacattctgtcttcatgaggtctcacagtcgacgctcctgtaatcattctttgtattcactccattcccctgtctgtctgcatttgtctcagaacatttccttggctggacagatggggttatgcatttgcaataatttccttctgatttctctgtggaacgtgttcggtcccgagtgaggactgtgtgtctttttaccctgaagttagttgcatattcagaggtaaagttgtgtgctatcttggcagcatcttagagatggagacattaacaagctaatggtaattagaatcatttgaatttatttttttctaatatgtgaaacacagatttcaagtgttttatcttttttttttaaatttaaatgggaatataacacagttttcccttccatattcctctcttgagtttatgcacatctctataaatcattagttttctattttattacataaaattcttttagaaaatgcaaatagtgaactttgtgaatggatttttccatactcatctacaattcctccattttaaatgactacttttattttttaatttaaaaaatctacttcagtatcatgagtaggtcttacatcagtgatgggttctttttgtagtgagacatacaaatctgatgttaatgtttgctcttagaagtcatactccatggtcttcaaagaccaaaaaatgaggttttgcttttgtaatcaggaaaaaaaaaaattaatgaaccttaaaaaaaaaaaaaaaggttttgaagggaaaaaaa

SEQ ID NO: 133578 - DNA, 6040 bp, Homo sapiens
  Payload ID: 6105
  Gene Symbol: FBXO21
  Gene Name: F-box protein 21
  Uniprot ID: O94952
  ENST ID: ENST00000622495
  CDS Start-End: 76-1941
cagtaggcggggccaggcggggcgcccgggcactctcgcacgcgcgcgcgcggcggccccaggtacgcggacaagatggcggcggcagcagtcgacagcgcgatggaggtggtgccggcgctggcggaggaggccgcgccggaggtagcgggcctcagctgcctcgtcaacctgccgggtgaggtgctggagtacatcctgtgctgcggctcgctgacggccgccgacatcggccgtgtctccagcacctgccggcggctgcgcgagctgtgccagagcagcgggaaggtgtggaaggagcagttccgggtgaggtggccttcccttatgaaacactacagccccaccgactacgtcaattggttggaagagtataaagttcggcaaaaagctgggttagaagcgcggaagattgtagcctcgttctcaaagaggttcttttcagagcacgttccttgtaatggcttcagtgacattgagaaccttgaaggaccagagattttttttgaggatgaactggtgtgtatcctaaatatggaaggaagaaaagctttgacctggaaatactacgcaaaaaaaattctttactacctgcggcaacagaagatcttaaataatcttaaggcctttcttcagcagccagatgactatgagtcgtatcttgaaggtgctgtatatattgaccagtactgcaatcctctctccgacatcagcctcaaagacatccaggcccaaattgacagcatcgtggagcttgtttgcaaaacccttcggggcataaacagtcgccaccccagcttggccttcaaggcaggtgaatcatccatgataatggaaatagaactccagagccaggtgctggatgccatgaactatgtcctttacgaccaactgaagttcaaggggaatcgaatggattactataatgccctcaacttatatatgcatcaggttttgattcgcagaacaggaatcccaatcagcatgtctctgctctatttgacaattgctcggcagttgggagtcccactggagcctgtcaacttcccaagtcacttcttattaaggtggtgccaaggcgcagaaggggcgaccctggacatctttgactacatctacatagatgcttttgggaaaggcaagcagctgacagtgaaagaatgcgagtacttgatcggccagcacgtgactgcagcactgtatggggtggtcaatgtcaagaaggtgttacagagaatggtgggaaacctgttaagcctggggaagcgggaaggcatcgaccagtcataccagctcctgagagactcgctggatctctatctggcaatgtacccggaccaggtgcagcttctcctcctccaagccaggctttacttccacctgggaatctggccagagaaggtgcttgacatcctccagcacatccaaaccctagacccggggcagcacggggcggtgggctacctggtgcagcacactctagagcacattgagcgcaaaaaggaggaggtgggcgtagaggtgaagctgcgctccgatgagaagcacagagatgtctgctactccatcgggctcattatgaagcataagaggtatggctataactgtgtgatctacggctgggaccccacctgcatgatgggacacgagtggatccggaacatgaacgtccacagcctgccgcacggccaccaccagcctttctataacgtgctggtggaggacggctcctgtcgatacgcagcccaagaaaacttggaatataacgtggagcctcaagaaatctcacaccctgacgtgggacgctatttctcagagtttactggcactcactacatcccaaacgcagagctggagatccggtatccagaagatctggagtttgtctatgaaacggtgcagaatatttacagtgcaaagaaagagaacatagatgagtaaagtctagagaggacattgcacctttgctgctgctgctatcttccaagagaacgggactccggaagaagacgtctccacggagccctcgggacctgctgcaccaggaaagccactccaccagtagtgctggttgcctcctactaagtttaaataccgtgtgctcttccccagctgcaaagacaatgttgctctccgcctacactagtgaattaatctgaaaggcactgtgtcagtggcatggcttgtatgcttgtcctgtggtgacagtttgtgacattctgtcttcatgaggtctcacagtcgacgctcctgtaatcattctttgtattcactccattcccctgtctgtctgcatttgtctcagaacatttccttggctggacagatggggttatgcatttgcaataatttccttctgatttctctgtggaacgtgttcggtcccgagtgaggactgtgtgtctttttaccctgaagttagttgcatattcagaggtaaagttgtgtgctatcttggcagcatcttagagatggagacattaacaagctaatggtaattagaatcatttgaatttatttttttctaatatgtgaaacacagatttcaagtgttttatcttttttttttaaatttaaatgggaatataacacagttttcccttccatattcctctcttgagtttatgcacatctctataaatcattagttttctattttattacataaaattcttttagaaaatgcaaatagtgaactttgtgaatggatttttccatactcatctacaattcctccattttaaatgactacttttattttttaatttaaaaaatctacttcagtatcatgagtaggtcttacatcagtgatgggttctttttgtagtgagacatacaaatctgatgttaatgtttgctcttagaagtcatactccatggtcttcaaagaccaaaaaatgaggttttgcttttgtaatcaggaaaaaaaaaaattaatgaaccttaaaaaaaaaaaaaaaggttttgaagggaaaaaaagtggtttcacacctcttgttattccttagagtcacttcaaggcctgtttgaatgtggcaggttagaaagagagagaatgtctttcatttgaagagtgttggacttgtgtgaaaggagatgtgcgtgttggaatctgcttttccaagccgccagggtcctgacggcagcaggacgaagcctgttgtggcgtcttctgggaaagcctgaccgtgtgttcggacggcactggctcctttccgaagttctcagtaactgagcccagagtaactgcacgcctttgtgcagctctggagctccaccaactctcggcctgccagttctcaagcgagctaatcttgtcattaatcgatagaagctaacttccgaagttaggacctagttactttgctctcaacatttaaaataatgcagttgctctagtgaatggggcgttaggggcctgtctctgcacctgtctgtccatctgcatgcagtattctcacccatgttgaatgcctgctgcttgtttaccctttggaaaccctggggtgaccaaggtttggaaagccacctgagaccacttcatagcaagggaaggctttaagcagttactagaaagagatggggatttggcccctggctcctccagcctgaatgagctatttaatccactgtccatgttcctcatcagtcaaatccaaagtcaaaggatttgaacctgcatctggaaacgtaaccactcacagcacctggcccgccaaggttgggaggattgtacactactttcatttaaaggggaaagtttgataatacggaattaattaatatgaatgagatgcattaataagaacctgagcatgctgagagttgcaattgttggttttctggtttgattgatttccttttttcttagacacatcaaagtcaagaaagatggttttacctttactgacccagctgtacatatgtatctagactgtttttaaatgtctttcttcatgaatgcttcatggggctccaggaagcctgtatcacctgtgtaagttggtatttgggcactttatatttttctaaaaacgtgttttggatcctgtactctaataaatcataagtttctttttaaaaattttccaaaacttttctccattttaaaaagccctgttataaacgttgaactttcacaatgttaaaatgttaaatatttggatatagcaacttcttttctcttcaaatgaatgccaagatttttttgtacaatgattaataaatggaacttatccagagaaaccacgcaaatggcctgcccaatttcgtttgaggacagaaagcccagccatgacttgagtagaatgtctctcacctctcttcggatctaaatatgaaaagtatgttctgctgaatttttctgagcattggtgagcggacagcctacctgtaaaccatgacctccttgccaaacgttaattttatcagctcactagtaacctttgagaattatctggttgtcatgcaaagattgcactttctgaattatgttaaaacacatgttgtaaaatgagaactgctcatgctttgaaagaaaaccaggttcttcgtgcgttctgttgccgttgatttgaatggctgtgctgtatacgatgtgtccagaatgtcttcagagcactgtttccgtgtgatgttactacctactatgtgggaggaaaaaaggttataggttaaacaaagtcaattgactctatggtggtgtttctcaatacctgtgacgcacagtactgtgcgtcgtgactttctaagagaagtgtgcagcgggtgtgtcatcttgatatatgaaaccctggaatttccctcccctacacgcacgcaccgtccccgggggtccggtgtttgcagacatgctttgaaaagctgtctcagtgagacatcagttatgtccaaaatgagtttaccttagaatcagaccggttttgccaggcgtcatgtttgcaaacattatccacctaatcagattttgaaaggccggctttcatgtcgcctgcctgagactcataacagatccccattataagcgcgtttacacagcaaaatgattttattgagaaaaccagcattaagtactgttgccggctcagttttccattgcatactatctacttaaagtcccgttctcatttgtaagtgttccgatctttccccacggagaaaactgagcagagctgccgtgtcgcaggctttctgctgctgatgtcgcatctctttgctttcccctccttagtccatactccaagtaagtgaactcagactaccagcaactttttaactgaaaagtatctgtccatgatgatcaagatgcagctcttcgtgtttttattttgtcttttttttttttttttttttttggagggaaggagagacatcaactggacaaaatgcaaaatttggatgtgggacaattgctttttggagacgtgaatagctgtactgtacgtattattttgtgtggcatgctaactttgagccgggcactggcctaataaagtctttgtaatcctcccagcaatcctataaagcagacgcagatagtaaagattttaggctttgcaggccacgtacagactgtcacatgttctctgtttttaaaagtgtcaacaacattcttagctcaaaaacaggctgcaggtgggatggtgcccacaggccatagttggctgaccccggctagggtgtaggcacttagcattccactgtataaaggggaaacccaggtcatactgcgtgtgcgtgggtgggaagccggatgtggaatacaggtggtccctgagtctccaggaaccactgagctccagctgttcacacccacactctgcggcgcaagcaactacctcgccacggtttagccttggtctagcagcgactttaaccttgaatgttgcatttctgaaaaatttagaatcttgaaagtaaaggacgtccctccggtgaataaaattaggcgcaattatagaatacatgtattatggccacgtagcaatgactgtattagggctctgctagttctgtaataaatagacccgaaaagcaacaa

SEQ ID NO: 133579 - DNA, 10725 bp, Homo sapiens
  Payload ID: 6106
  Gene Symbol: FBXO22
  Gene Name: F-box protein 22
  Uniprot ID: Q8NEZ5
  ENST ID: ENST00000308275
  CDS Start-End: 106-1317
gtggcgcggacgcctgctcagtgcgcgccggccgggcaaccctatgctggcgtaatcgggttcctccgagccgccgtaggactggttccggcgggctggtgaggaatggagccggtaggctgctgcggcgagtgccgcggctcctccgtagacccgcggagcaccttcgtgttgagtaacctggcggaggtggtggagcgtgtgctcaccttcctgcccgccaaggcgttgctgcgggtggcctgcgtgtgccgcttatggagggagtgtgtgcgcagagtattgcggacccatcggagcgtaacctggatctccgcaggcctggcggaggccggccacctggaggggcattgcttggttcgcgtggtagcagaggagcttgagaatgttcgcatcttaccacatacagttctttacatggctgattcagaaactttcattagtctggaagagtgtcgtggccataagagagcaaggaaaagaactagtatggaaacagcacttgcccttgagaagctattccccaaacaatgccaagtccttgggattgtgaccccaggaattgtagtgactccaatgggatcaggtagcaatcgacctcaggaaatagaaattggagaatctggttttgctttattattccctcaaattgaaggaataaaaatacaaccctttcattttattaaggatccaaagaatttaacattagaaagacatcaactcactgaagtaggtcttttagataaccctgaacttcgtgtggtccttgtctttggttataattgctgtaaggtgggagccagtaattatctgcagcaagtagtcagcactttcagtgatatgaatatcatcttggctggaggccaggtggacaacctgtcatcactgacttctgaaaagaaccctctggatattgatgcctcgggtgtggttggactgtcatttagtggacaccgaatccagagtgccactgtgctcctcaacgaggacgtcagtgatgagaagactgctgaggctgcgatgcagcgcctcaaagcggccaacattccagagcataacaccattggcttcatgtttgcatgcgttggcaggggctttcagtattacagagccaaggggaatgttgaggctgatgcatttagaaagttttttcctagtgttcccttattcggcttctttggaaatggagaaattggatgtgatcggatagtcactgggaactttatattgaggaaatgtaatgaggtaaaagatgatgatctgtttcatagctatacaacaataatggcactcatacatctggggtcatctaaataataattaaagtggctttcataatatgtaacttttgggttctgcctttttcagaaaatggaaacttgggccatgtgtatttcaaacaaaaataactttagatatatcttttttgtagctttgattgatgctctaagatcacatgagggtagtatttaatatattagatgaaggacaactttggacataacactgactaggagttgagagcttttgcatcaggcagaagcaaactgattatagttgtgttgcaccagatcatgtagctgctgtgtaacatgaccttaaatagtcttcctgcataggaagagcaaaagggtattcatcaataggatatagatttaagacattccctgactaccccttgcgttgttaggtgatgtcttttagcagaatcatgaagaccttttttctcccttaataaaggagaaaaatatactgatggctggagaaatttttctctgcctttcagttttatgaattttttcagaagtaacaatattattattgactttttacttatttgataaaaattaaagaactatttttgttttggtcagataaattgacaagactaatcagtattttattataagtaaaagatttttcttctttccttaaaaatatttttttttcacctaggtctaaatagctaactaactggtagaccagagtattacatcatcttattttggttttataccaataaaacatagcgtggaactcattcaggtaatgttttgcatttcattgcttttggatgaacaaaggaagtaaactaatcctttataaatgaaaacccagaatagttggtatgtcagctagtcattcctgtcatattcccagtagaatgattttcaagtttgaatttctgtacaaatatctaaataagagatgtgcagagagcaccaattttccttcaatatccattctttacttttcacataatgatagaacctttgatttttcaagtgggtatgcctcctagaataaagactacatttcccagtctcctgtgcaggtatgactgtgttctggacaatggaatgtgaggggaaacgattttttgtgtccttaaaatggcatgaccatttatttgcccctttctccatcctgttgcttggaatgtggatctggtagtgagccatcttggaccctgaagaggaggcaacacaccattgtagaagaaaaacaacagaaggatcctggtccctgtacgacctcattgaagaaacaccataagtggcgtggactatctacctccagactgttttacaagagagaaattagcatattccatctaatacagtatgatgtaactaatgttacttttgtaacagtcagtggtttgttctaacaggacagtagaacacttgcaaggtaagtaaaaccaaatgtattagcattattcctgcttttccttttttgtcacttttatcctttttttaaaactgaaaatatttttctcttgctatttatatatatatgataaaaatgcttggaagagtcctttaatttatggttattctaaatcctagttcctgaggcaagtccaaagaaaaatttgtcaaaacttttcatctatgaatatttatatttagctcttgctatttagctattatcaaaatacctcaaaattttagtccttgaatgtgctcatatagcccataaggcaaatattttttaaactttattgtccctgatattaaccagaattggttgaatagtagaggaaaagggatttttaaaactgaaaatatgaacaaaatgagccttagaattgaatggattattttaaacaaattaatactcatataaaatgttttgctgcttctcaaagagtctgatacagggtaatttcatacaatatttgatgttgttaaagcattcctttttatagctgagcctttggagcttgttatgaacagtaaaatcatttagtcacatggttgtaaccttagtgcaaagtaaaaagggaaaagttgacctaatagaaacaatagtagtattgataagaacaaaagtcatcctccctgcctctcagaggccctgaagtcctgtgaggaagggaaatagtaatttaaccaaagttaaatctgtgtaactcatttattacaattttgaaaggcttgtcttagaagcattaaaggagtattagctaaaaacaaactaaattcctagagatgacaatcattgtagtcctctgtgaaactgaaaatgatcacatgaaaaaaatgtgagcataaaaaagagaagtaaaggtgtaccattagcctacatactgagctgacgatcagatcatagaatactttatttaatcaagacatttaaaaatacttatttcatctacatactttcaaagcaaaataatttctggggctagtttcctttgtataaggcttaagcaaggaatatatttccatgccctttgatccaagtaaaatctaaggaagagggaaagtaaaccttgaaattaagacctagaaatagatccacccttgcagactgataaaagtgggcaatctagtaggccagttcacattacagttatctcagttttgcttaaagcaaaccctaaccctcaacctacgaggccagatagcaaaagacgtgcaactggtttatattgcaaatttaacaaagtgaacatgcaaagaattacaatagaaataaacttttacaaatctgagaactttctttttttttgagacggagtcccgctctttagcccaggccggattgcaatggcacaatcttggctcactgcaagctccgcctcccaggttcacgccattctcctgcctcagcctcccgagtagctgggactacaggcgcccgccaccgcgcccggctaattttttgtatttttagtagagacggggtttcaccgtgttagccaagatggtctcgatctcctgaccttgtgatccgcccgcctcggcctcccaaagtgctgggattacaggcatgagccactgcgcccagccacaaatctgagaactttctatgcaatctgcagaaatttttaagaatataaatatgcttttgtcattttatacccagtctggcccaggtttgcactgccataaattcagttttaatgggaacagaagactccagatcctcttgatgggaagaaatcatgaaattttagatgattgacttggttttcatttgtagaaactgggtatgagttggcttaatgaaaatcctaaaataataaaataagcattagtaataatatccttgttaaatgaacaaagtgaatacgatataaagaatgtgataccagaaagttactttaatattgaccctatatagggaagaataatcaaatatttgcaaaatatgttatttttgttttatatatttaacttctaccctatgccacaactgaagacaggttacaagaacatgtgctactacaaagtaggaaactggcagaagccaataagtatcacttaatattttggtatggaaacttttttttttttgagagagttttgctcttgttgcccaggctggagtataatggcacaatctcgactcattgcaacctccacctcctgggttcaagtgattctgctgcctcagcctccctagtagctgggattacaggcatgcgccaccatgcctggctaattttgtatttttagtagagatggggtttctctgtgttggtcaggctggcctcagactccaacctcaggtgatctgcctgcctcagcctcccaaagtgctgggattacaggcgtgagccaccgtgcccagctggaaactttcatttcttaaaacagatttataaaagtttttgctatatagtgactgttagccagtaaaaacagggaagattgattaatttagaagaaattgaaagaaaatatatttattaatgttgcttttaaatgcaaattatcagattgaggagaattttgagaccattgacatttttctaattatgactaaaatttaatcactatacttaataaacatactctattcaaggtcttgtaataaaattatagggaggaataaaacataattgaccccagcgacatcagcaaaaatgggtggactaggaagctgcaagcttttgtttgcctatcaaaacattaaaaaaaaaaaagaggccgggcgtggtggctcacgcctgtaattccagcactttgggaggccgagatgggcagatcacgaggtcaggagatcgagaccatcctggctaacacagtgaaaccccatctctactgaaagtacacaaaattagctgggcatggtggcgggcacctgtagtcctagctacttgggaggctgaggcaggagaatggtgtgaacctgggaggtggagcttgcagtgagccgagatcgtgccactgcactccagcctgggcaatggagcaagactctgtctcaaaaaaaaaaaaaaaaaaaaaaaagcaactgtctgaacgaaccttgttagagctttggaaaacagtcaaaggtttacagcaaccaaaagaatgcccaatcatctgcagaatggtaggaaaatattgtgactttttagtggctcttgcccgagcctctccctacattgtggcagtcttaaagcagcagaagcccagtcccctcccttgaactggagaaaacatgctagaccttttttgcaaattactgtgtacatttttttctaacctgtctgcggatacttgaaggactgacacaaggtcacatgtttgttttgcctaactggtagggtgggcactgcttacaaaagctgcaaagaaccacaggtgcatggggcaagaggttatgggtgtaaacataaaatagaacaactaaggcccagaggagaatctggggtaagactttgggaaattaagaacagttacatatacaggggggatttaaaatgcgacatgcatgcccagggaaaacacttgcccggaaagttctaagacccaagctttcaccttggtctggtccctaagcccaaaagcaggccaaagtaagtattgaaggattacctgggacaaagctgatttgtaaaatctaggattgctcctagcattcaagggaatttatgtcaaaatagctgaacgtgacataaaaggaagagagacttcagtgatcacacacagaaggaatagtcttttataaaaataatttggaaaactctcaaaacaaatggatgacagcttttaaaaataaaaaaacaatgaaccagaaaaccgtggggaaaggaaagaatctcatacctagagttaccatattataatagtgaatatccaactctcaaggaaaaaaatcacaaaccatacaaaggaacaggaaaataatgcgcattcaaaagatcaaaattaattgaccttgtcctaatgaaggacattaaactagacatatactttaactcaaatatgcccaaagaactaaaggaaaacatgaacaaagaattaaagaaatcaggaaaatgataaatgaacaaaatcagaatatcaacagataggcattataaaaaaattctggcagagaaaagtataataaatgaaattttcactacaggggttcagcagcagatataagcaggtagaagaaagaatcagcaaacttgagatgggatcactgaaagcagaaacaacaaatcaagcctacatagttttaaaagatacatatcacacacaaagaagtgaagaagatatggtgcatttttgaaccacaacaggatgtagttagaaatcagtaacaaaaggaaaattggaaaattcacaaacttgtggaaattaaacaaaacactcaaccaatgggtcaaagaagaaatcacaagggaaattaaaaagagaaaaatgcaacataccaaaatttataggatgcagtgaaagcactgctaaaagggaaatttgtagacataaatgcttacattaaaaaacaaaaaagacctcatgtcaacaacctgactttgcagcttgagggggaaaaacatactaaatccaaagctagcagatggaaggaaataataaagattagaacagatataataaattgaataaagattagaaacactagagaaaaatcagtgaaactacaagttctttaaaagaccataaagttggaaagcctatgcgtagatagactaagaaaaaaaggaagactcaattgctaaaataaatgaaaatgggaacagcactctagattctagaaaaatgaaaagggttatagaagaataccttcgacaatctagatgaaatgctcaaagtcctagaaatgcaaaacgtactactgctgaactatgaaaaaaatttaaaaatctcaatagaactataaccagtaaggtaattgaattagtaatcaaaattctcctggaaaaaaagcactggacctgatggttttcatttgtgaattctaccaaataagaagaaataaccccaatcccttctaacttttcccaaaaattgaagaggaaggacgctgcctaattcattctgatgctgaagccagacaaagatactacaagaaaagattacagaccagttattccttatgatcgctgattcaacaattgtcaatactaggaaactgaatttagcagcatattaaaaggattgtacaccacgaccaaatggaatgaattcctggaatgcaaggattgttcaacatacaaaaatcaatataatatactacattaacagaacgaagcgagaaccagatgatcatctcaattgatgcagacaaagcatttgacaaaatccagcagcctcttgtgattaaaaacactcaacaaatgagggataagaggaaactacctgaacataataaaagccagacatgaaaagcccacggtagacaccatacttagtggtgaaagcttttcctctaagatcaagacaatgctcatttcaccattcctattcaacacagtactaggagttctagcctgagctagaaaaagaaaagacatctaagttggaaagtaagaagtaaaatcctatatgttcacaaatgatatgatctttagacaacccgaaagattccacaccaaaaaaaaaaaataactgttaattcagtaaggtagcaggatacaaagtcaacccacaaaagtcagttgcattcctatacactaacaatgaacaacctgagaaggaaattacaagaacagtcccatttaccatagcgtcaaaaagaataaaatgcacagaaattagcttacccaaggtggtaaatggcttgtacaatgaaaactacaaaacattgcttcaataaagataaaaataaacggaaatacatctcatgttcatggattggaaaatctaatgttaatatgtcagtactactcaaagtgatgtgcagattcactacagtctctatcagaatcctaggatttttttttttttttttgcagaaatagaaaaacccatcctgaatttcatgtggaatctgaagggatcccaaatagccaagtcagtcttgagaaagaagaacaaattggaggacttaaacctgcagagtttaaaacttactataatgctacagtaatcaaaacaatgtgattctggcataaaggcagacggatagaccaatgggatagactggagaacctagaaataaaccctctcatatgtaggtaaatgatttttgacaagggtgccaaggctattccaaggatagttttttcaacaaataatgatgggaaagctggataaccacatggctaactaacaaagttgcaacctcactcatttgcaaaaattaactcaaaatggaccaaagacctaaatgtgagagctaaaaccataaaactcttaggatgtggcagtggtttcttggatatgacaccaaattcacagacaacgaaagaaaaaataggcaaattatacttcattaaaattttgtgcatcaaagaacactatcaacagagtaaaaagattacctatggagtgggaggaaataatatgcagttcacgtacctaataaggattaaacatccagaatacatacaaaactcccaaaatgcaacaacagtgtaaaaacctgatttaaaaaatggcaaaggatttggatagatctccagagaggacatgcagatagccagtgagcacaggaaaaaatgcttagcatcactaaacagtaaggaaatgcaaatcaaaaccacattgagataccacttcatacccactgggatagctcttattaaaattaaaaaaacacacaagtgttggcaaggatgtggagaaattggaactcttattactgatggaaatatagtggtatgcagctgctgtagaaaacagtatggtgattttccaattaaatatagaattgtcatttgattcagcaattgcatttctgggtatatacacaaaataattgaaagcggaggcttgagggtatatttgtataccagtgttcactgcagcattattcaccgtagtcaaaaggtagaaacaacccaaatacccaacagatgaatggatagacaaaatgtgttatatccatacaatggaatattattcagccataaaaaggaaatccttctacatactacatcatggatgaacctttcagacattaagtaaatcacaaaaggacaatactatatgaatccactgatgtgaggtacctagactagtgagattcatagagacaaagtagaacaaagattacgttttgtcacagggagcaggagggaatgggaatttattgtttaaggggcacagagattagtgtgggatcatgaaaaagttccggaggtgcatagtggtgactggtacatacaacgaatgtatttaatgcctttaaactgtaacttcaaaatggttaaaatttaaatcttacgtacattttgccacagtaaatttttaaaccaccaaaaaaaaaaaaaaaaaaaaatatggcctagcttttttttttttttttaaaaagggcagggggtggggtatttagtcacaagacatagaggaactttaagtgtatattgctaagtgaaagaagttagtctgaaaggctacatactacatgatttcaaatatatgacattctggagaaagcaaagttagtaaagactggttgccagaggttcagtgggagagagggaggggtaaatacatggagtagagatttttagggtggtgaaactactgtatacaatactataatagtggatacatgacattatatattggtcaaaatccataaagacatacaacaaaaagaggacccttcatgtaaattacaggcttcagctagcctggatgacagagtgagactttgtctcaaaaagtaaagtaaaaatgtgtcaatattggttaaacaaatataccacactagtgcaagatgttaataataaaggcctggggtggggggaagcataggggaactctatactatctgctcagtttttctgaaaatctaaaacttctaataaagtctattaaaatt

SEQ ID NO: 133580 - DNA, 1486 bp, Homo sapiens
  Payload ID: 6106
  Gene Symbol: FBXO22
  Gene Name: F-box protein 22
  Uniprot ID: Q8NEZ5
  ENST ID: ENST00000453211
  CDS Start-End: 87-917
agtgcgcgccggccgggcaaccctatgctggcgtaatcgggttcctccgagccgccgtaggactggttccggcgggctggtgaggaatggagccggtaggctgctgcggcgagtgccgcggctcctccgtagacccgcggagcaccttcgtgttgagtaacctggcggaggtggtggagcgtgtgctcaccttcctgcccgccaaggcgttgctgcgggtggcctgcgtgtgccgcttatggagggagtgtgtgcgcagagtattgcggacccatcggagcgtaacctggatctccgcaggcctggcggaggccggccacctggaggggcattgcttggttcgcgtggtagcagaggagcttgagaatgttcgcatcttaccacatacagttctttacatggctgattcagaaactttcattagtctggaagagtgtcgtggccataagagagcaaggaaaagaactagtatggaaacagcacttgcccttgagaagctattccccaaacaatgccaagtccttgggattgtgaccccaggaattgtagtgactccaatgggatcaggtagcaatcgacctcaggaaatagaaattggagaatctggttttgctttattattccctcaaattgaaggaataaaaatacaaccctttcattttattaaggatccaaagaatttaacattagaaagacatcaactcactgaagtaggtcttttagataaccctgaacttcgtgtggtccttgtctttggttataattgctgtaaggtgggagccagtaattatctgcagcaagtagtcagcactttcagtgatatgaatatcatcttggctggaggccaggtggacaacctgtcatcactgacttctgaaaagtatgtcttgtgtgcttctgatttcgtctgtgaatgaagggaaatggtctcaggttttgtcactttggggttaacaatttaaaaaacgtgtttaaagaattattaagataatagttcattccattttgtagtagacattggctaaggggcttactgaacataattctgcttacggttgaataattacatttttatatatattgtccttcaagaacttccttgagtcacattctccttaaaatttgacattgcctgttgatctttcctttgacagatgtggtactctgtgtgacctcaatgtgtcacctcctttctagtttcctcctttaaaggaaacacatggttagagtgtatctttatggcaaaacttctcagagcttctaatatgcccagtgctgtggaaatctggaaggagaatagcattacctgtgacagttcccaaatgtgtttggtcacaaaacttttttccacagaatgtcttgcaagtcgtactggtttttggaaattctgtattagatcttttgaaaggctttttcaagcttaaaaattgtggatcttttttgttactaaggcttttgctttcaaagataaaaatatttgctcttc

SEQ ID NO: 133581 - DNA, 1496 bp, Homo sapiens
  Payload ID: 6106
  Gene Symbol: FBXO22
  Gene Name: F-box protein 22
  ENST ID: ENST00000569749
  CDS Start-End: 89-370
tcagtgcgcgccggccgggcaaccctatgctggcgtaatcgggttcctccgagccgccgtaggactggttccggcgggctggtgaggaatggagccggtaggctgctgcggcgagtgccgcggctcctccgtagacccgcggagcaccttcgtgttgagtaacctggcggaggtggtggagcgtgtgctcaccttcctgcccgccaaggcgttgctgcgggtggcctgcgtgtgccgcttatggagggagtgtgtgcgcagagtattgcggacccatcggagcgtaacctggatctccgcaggcctggcggaggccggccacctggaggggcattgcttggttcgcgtggtagcagaggagcttgagtgactccaatgggatcaggtagcaatcgacctcaggaaatagaaattggagaatctggttttgctttattattccctcaaattgaaggaataaaaatacaaccctttcattttattaaggatccaaagaatttaacattagaaagacatcaactcactgaagtaggtcttttagataaccctgaacttcgtgtggtccttgtctttggttataattgctgtaaggtgggagccagtaattatctgcagcaagtagtcagcactttcagtgatatgaatatcatcttggctggaggccaggtggacaacctgtcatcactgacttctgaaaagtatgtcttgtgtgcttctgatttcgtctgtgaatgaagggaaatggtctcaggttttgtcactttggggttaacaatttaaaaaacgtgtttaaagaattattaagataatagttcattccattttgtagtagacattggctaaggggcttactgaacataattctgcttacggttgaataattacatttttatatatattgtccttcaagaacttccttgagtcacattctccttaaaatttgacattgcctgttgatctttcctttgacagatgtggtactctgtgtgacctcaatgtgtcacctcctttctagtttcctcctttaaaggaaacacatggttagagtgtatctttatggcaaaacttctcagagcttctaatatgcccagtgctgtggaaatctggaaggagaatagcattacctgtgacagttcccaaatgtgtttggtcacaaaacttttttccacagaatgtcttgcaagtcgtactggtttttggaaattctgtattagatcttttgaaaggctttttcaagcttaaaaattgtggatcttttttgttactaaggcttttgctttcaaagataaaaatatttgctcttctgtcttgggagccattacttcctttccatcttgaatgaaaatacatatcattttgagtttgaaacaattaggtggacataaatatcatttgtttccagcaggaaaatcagaccctaccccaccctcaatgcttgtaaacactactatttgtttcccactctgtttaatatttgcatcctagagtggtgacat

SEQ ID NO: 133582 - DNA, 725 bp, Homo sapiens
  Payload ID: 6106
  Gene Symbol: FBXO22
  Gene Name: F-box protein 22
  ENST ID: ENST00000565036
  CDS Start-End: 1-725
tgcggcgagtgccgcggctcctccgtagacccgcggagcaccttcgtgttgagtaacctggcggaggtggtggagcgtgtgctcaccttcctgcccgccaaggcgttgctgcgggtggcctgcgtgtgccgcttatggagggagtgtgtgcgcagagtattgcggacccatcggagcgtaacctggatctccgcaggcctggcggaggccggccacctggaggggcattgcttggttcgcgtggtagcagaggagcttgagaatgttcgcatcttaccacatacagttctttacatggctgattcagaaactttcattagtctggaagagtgtcgtggccataagagagcaaggaaaagaactagtatggaaacagcacttgcccttgagaagctattccccaaacaatgccaagtccttgggattgtgaccccaggaattgtaggtcttttagataaccctgaacttcgtgtggtccttgtctttggttataattgctgtaaggtgggagccagtaattatctgcagcaagtagtcagcactttcagtgatatgaatatcatcttggctggaggccaggtggacaacctgtcatcactgacttctgaaaagaaccctctggatattgatgcctcgggtgtggttggactgtcatttagtggacaccgaatccagagtgccactgtgctcctcaacgaggacgtcagtgatgagaagactgctga

SEQ ID NO: 133583 - DNA, 316 bp, Homo sapiens
  Payload ID: 6106
  Gene Symbol: FBXO22
  Gene Name: F-box protein 22
  ENST ID: ENST00000564220
  CDS Start-End: 1-237
gctgcgatgcagcgcctcaaagcggccaacattccagagcataacaccattggcttcatgtttgcatgcgttggcaggggctttcagtattacagagccaaggggaatgttgaggctgatgcatttagaaagttttttcctagtgttcccttattcggcttctttggaaatggagaaattggatgtgatcggatagtcactgggaactttatattgaggaaatgtaatgaggtctaaatagctaactaactggtagaccagagtattacatcatcttattttggttttataccaataaaacatagcgtggaactca

SEQ ID NO: 133584 - DNA, 2164 bp, Homo sapiens
  Payload ID: 6106
  Gene Symbol: FBXO22
  Gene Name: F-box protein 22
  Uniprot ID: Q8NEZ5
  ENST ID: ENST00000569022
  CDS Start-End: 87-227
agtgcgcgccggccgggcaaccctatgctggcgtaatcgggttcctccgagccgccgtaggactggttccggcgggctggtgaggaatggagccggtaggctgctgcggcgagtgccgcggctcctccgtagacccgcggagcaccttcgtgttgagtaacctggcggaggtggtggagcgtgtgctcaccttcctgcccgccaaggcgttgctgcgggtggcctgaatgttcgcatcttaccacatacagttctttacatggctgattcagaaactttcattagtctggaagagtgtcgtggccataagagagcaaggaaaagaactagtatggaaacagcacttgcccttgagaagctattccccaaacaatgccaagtccttgggattgtgaccccaggaattgtagtgactccaatgggatcaggtagcaatcgacctcaggaaatagaaattggagaatctggttttgctttattattccctcaaattgaaggaataaaaatacaaccctttcattttattaaggatccaaagaatttaacattagaaagacatcaactcactgaagtaggtcttttagataaccctgaacttcgtgtggtccttgtctttggttataattgctgtaaggtgggagccagtaattatctgcagcaagtagtcagcactttcagtgatatgaatatcatcttggctggaggccaggtggacaacctgtcatcactgacttctgaaaagaaccctctggatattgatgcctcgggtgtggttggactgtcatttagtggacaccgaatccagagtgccactgtgctcctcaacgaggacgtcagtgatgagaagactgctgaggctgcgatgcagcgcctcaaagcggccaacattccagagcataacaccattggcttcatgtttgcatgcgttggcaggggctttcagtattacagagccaaggggaatgttgaggctgatgcatttagaaagttttttcctagtgttcccttattcggcttctttggaaatggagaaattggatgtgatcggatagtcactgggaactttatattgaggaaatgtaatgaggtaaaagatgatgatctgtttcatagctatacaacaataatggcactcatacatctggggtcatctaaataataattaaagtggctttcataatatgtaacttttgggttctgcctttttcagaaaatggaaacttgggccatgtgtatttcaaacaaaaataactttagatatatcttttttgtagctttgattgatgctctaagatcacatgagggtagtatttaatatattagatgaaggacaactttggacataacactgactaggagttgagagcttttgcatcaggcagaagcaaactgattatagttgtgttgcaccagatcatgtagctgctgtgtaacatgaccttaaatagtcttcctgcataggaagagcaaaagggtattcatcaataggatatagatttaagacattccctgactaccccttgcgttgttaggtgatgtcttttagcagaatcatgaagaccttttttctcccttaataaaggagaaaaatatactgatggctggagaaatttttctctgcctttcagttttatgaattttttcagaagtaacaatattattattgactttttacttatttgataaaaattaaagaactatttttgttttggtcagataaattgacaagactaatcagtattttattataagtaaaagatttttcttctttccttaaaaatatttttttttcacctaggtctaaatagctaactaactggtagaccagagtattacatcatcttattttggttttataccaataaaacatagcgtggaactcattcaggtaatgttttgcatttcattgcttttggatgaacaaaggaagtaaactaatcctttataaatgaaaacccagaatagttggtatgtcagctagtcattcctgtcatattcccagtagaatgattttcaagtttgaatttctgtacaaatatctaaataagagatgtgcagagagcaccaattttccttcaatatccattctttacttttcacataatgatagaacctttgatttttcaagtgggtatgcctcctagaataaagactacatttccca

SEQ ID NO: 133585 - DNA, 782 bp, Homo sapiens
  Payload ID: 6106
  Gene Symbol: FBXO22
  Gene Name: F-box protein 22
  ENST ID: ENST00000569054
  CDS Start-End: 301-782
gggaagcttgcctggggacacgccgtgggcatgtcccaggctggcggggtggggggagagacccttgggacccaccagggccgtccccggctcgctcgccctacctgaggtgaccccctacccgcgagcgtgtgccgcttatggagggagtgtgtgcgcagagtattgcggacccatcggagcgtaacctggatctccgcaggcctggcggaggccggccacctggaggggcattgcttggttcgcgtggtagcagaggagcttgagaatgttcgcatcttaccacatacagttctttacatggctgattcagaaactttcattagtctggaagagtgtcgtggccataagagagcaaggaaaagaactagtatggaaacagcacttgcccttgagaagctattccccaaacaatgccaagtccttgggattgtgaccccaggaattgtagtgactccaatgggatcaggtagcaatcgacctcaggaaatagaaattggagaatctggttttgctttattattccctcaaattgaaggaataaaaatacaaccctttcattttattaaggatccaaagaatttaacattagaaagacatcaactcactgaagtaggtcttttagataaccctgaacttcgtgtggtccttgtctttggttataattgctgtaaggtgggagccagtaattatctgcagcaagtagtcagcactttcagtgatatgaatatcatcttggctggaggccaggtggacaacctgtcatcactgacttctgaaaa

SEQ ID NO: 133586 - DNA, 722 bp, Homo sapiens
  Payload ID: 6106
  Gene Symbol: FBXO22
  Gene Name: F-box protein 22
  ENST ID: ENST00000561885
  CDS Start-End: 1-460
agagtgtcgtggccataagagagcaaggaaaagaactagtatggaaacagcacttgcccttgagaagctattccccaaacaatgccaagtccttgggattgtgaccccaggaattgtagtgactccaatgggatcaggtagcaatcgacctcaggaaatagaaattggagaatctggttttgctttattattccctcaaattgaaggaataaaaatacaaccctttcattttattaaggatccaaagaatttaacattagaaagacatcaactcactgaagtaggtcttttagataaccctgaacttcgtgtggtccttgtctttggttataattgctgtaaggtgggagccagtaattatctgcagcaagtagtcagcactttcagtgatatgaatatcatcttggctggaggccaggtggacaacctgtcatcactgacttctgaaaagtctaaatagctaactaactggtagaccagagtattacatcatcttattttggttttataccaataaaacatagcgtggaactcattcagtctcctgtgcaggtatgactgtgttctggacaatggaatgtgaggggaaacgattttttgtgtccttaaaatggcatgaccatttatttgcccctttctccatcctgttgcttggaatgtggatctggtagtgagccatcttggaccctgaagaggaggcaacacaccattgtagaagaaaa

SEQ ID NO: 133587 - DNA, 2276 bp, Homo sapiens
  Payload ID: 6107
  Gene Symbol: FBXO24
  Gene Name: F-box protein 24
  Uniprot ID: O75426
  ENST ID: ENST00000241071
  CDS Start-End: 323-2065
gagagaagggaggggaacaaggatagagcgctcgccaacggccgacgctccaggccgtcccgcccagcgcagctgcacccaatcacaatgctcagatcgggaggtggagccaatcaggtccaaccaagaggaggggacaccggcactccactagcaggaaaacgggccgagggaccgcaagcagggggtgcctagtcctcgtcccccaaagaccaatcgtaagccagatacaggcgagtgactgtcaagaaggccaattagagcctccgaagggaatctggacctgcctcttctctgagggacggctctacctaccaatagcatgggcgagaaggcggtccctttgctaaggaggaggcgggtgaagagaagctgcccttcttgtggctcggagcttggggttgaagagaagagggggaaaggaaatccgatttccatccagttgttccccccagagctggtggagcatatcatctcattcctcccagtcagagaccttgttgccctcggccagacctgccgctacttccacgaagtgtgcgatggggaaggcgtgtggagacgcatctgtcgcagactcagtccgcgcctccaagatcagggttctggagtccggccctggaagagagctgccattctgaactacacgaagggcctgtatttccaggcatttggaggccgccgccgatgtctcagcaagagcgtggcccccttgctagcccacggctaccgccgcttcttgcccaccaaggatcacgtcttcattcttgactacgtggggaccctcttcttcctcaaaaatgccctggtctccaccctcggccagatgcagtggaagcgggcctgtcgctatgttgtgttgtgtcgtggagccaaggattttgcctcggacccaaggtgtgacacagtttaccgtaaatacctctacgtcttggccactcgggagccgcaggaagtggtgggtaccaccagcagccgggcctgtgactgtgttgaggtctatctgcagtctagtgggcagcgggtcttcaagatgacattccaccactcaatgaccttcaagcagatcgtgctggttggtcaggagacccagcgggctctactgctcctcacagaggaaggaaagatctactctttggtagtgaatgagacccagcttgaccagccacgctcctacacggttcagctggccctgaggaaggtgtcccactacctgcctcacctgcgcgtggcctgcatgacttccaaccagagcagcaccctctacgtcacagaccaggggggagtgtattttgaggtgcataccccaggggtgtatcgcgatctctttgggacccttcaagcctttgaccccctggaccagcagatgccgcttgctctctcactgcctgccaagatcctattctgtgctcttggctacaaccaccttggcctggtggatgaatttggccgaatcttcatgcaaggaaataacagatacgggcagctaggaacaggggacaaaatggaccgaggggaacccacacaggtttgttacctgcagcggcccatcaccctgtggtgcggcctcaaccactccctggtgctgagccagagctcagagttcagcaaggagctgctgggctgcggctgtggggctgggggccgcctcccaggctggcccaaggggagtgcctccttcgtcaagctccaagtcaaggtccctctgtgtgcctgtgccctctgtgccaccagggagtgcctatacatcctgtccagccacgacattgagcagcacgccccctatcgccacctgccagccagcagggtggtggggactcctgagcccagcctgggggccagagcaccccaggaccccggggggatggcccaggcctgcgaggagtacctcagccagatccacagttgccaaacgttgcaggaccgcacggagaagatgaaggagatcgtagggtggatgcccctgatggccgcacagaaggacttcttctgggaggccctggacatgctgcagagggctgaaggaggcgggggtggtgtagggcccccagcccctgagacctaatccccctcatgctagcctagtccctggaggagggagtccggccccaggccagggactaaggagcaatgaccattgtgcacatgcgtgtgggaaggggttgctagggggtggggacggctaaccagggtaagaatgttcagggggctgcccaggaggggcccccaacctgactatcatggacaagagatttgatggatagaataaaaggctg

SEQ ID NO: 133588 - DNA, 2087 bp, Homo sapiens
  Payload ID: 6107
  Gene Symbol: FBXO24
  Gene Name: F-box protein 24
  Uniprot ID: O75426
  ENST ID: ENST00000427939
  CDS Start-End: 13-1869
taggctggggacatggtgtgggaaagccagcaggaacgggggggccaagggcctaggagacaggagggcaggagcagggagggggcaatcaggatggtcaggggaagccagagacggaagctgcaaaaattcaccaggctgtgtggacgggaggaggggctccgggtgaagagaagctgcccttcttgtggctcggagcttggggttgaagagaagagggggaaaggaaatccgatttccatccagttgttccccccagagctggtggagcatatcatctcattcctcccagtcagagaccttgttgccctcggccagacctgccgctacttccacgaagtgtgcgatggggaaggcgtgtggagacgcatctgtcgcagactcagtccgcgcctccaagatcagggttctggagtccggccctggaagagagctgccattctgaactacacgaagggcctgtatttccaggcatttggaggccgccgccgatgtctcagcaagagcgtggcccccttgctagcccacggctaccgccgcttcttgcccaccaaggatcacgtcttcattcttgactacgtggggaccctcttcttcctcaaaaatgccctggtctccaccctcggccagatgcagtggaagcgggcctgtcgctatgttgtgttgtgtcgtggagccaaggattttgcctcggacccaaggtgtgacacagtttaccgtaaatacctctacgtcttggccactcgggagccgcaggaagtggtgggtaccaccagcagccgggcctgtgactgtgttgaggtctatctgcagtctagtgggcagcgggtcttcaagatgacattccaccactcaatgaccttcaagcagatcgtgctggttggtcaggagacccagcgggctctactgctcctcacagaggaaggaaagatctactctttggtagtgaatgagacccagcttgaccagccacgctcctacacggttcagctggccctgaggaaggtgtcccactacctgcctcacctgcgcgtggcctgcatgacttccaaccagagcagcaccctctacgtcacagaccaggggggagtgtattttgaggtgcataccccaggggtgtatcgcgatctctttgggacccttcaagcctttgaccccctggaccagcagatgccgcttgctctctcactgcctgccaagatcctattctgtgctcttggctacaaccaccttggcctggtggatgaatttggccgaatcttcatgcaaggaaataacagatacgggcagctaggaacaggggacaaaatggaccgaggggaacccacacaggtttgttacctgcagcggcccatcaccctgtggtgcggcctcaaccactccctggtgctgagccagagctcagagttcagcaaggagctgctgggctgcggctgtggggctgggggccgcctcccaggctggcccaaggggagtgcctccttcgtcaagctccaagtcaaggtccctctgtgtgcctgtgccctctgtgccaccagggagtgcctatacatcctgtccagccacgacattgagcagcacgccccctatcgccacctgccagccagcagggtggtggggactcctgagcccagcctgggggccagagcaccccaggaccccggggggatggcccaggcctgcgaggagtacctcagccagatccacagttgccaaacgttgcaggaccgcacggagaagatgaaggagatcgtagggtggatgcccctgatggccgcacagaaggacttcttctgggaggccctggacatgctgcagagggctgaaggaggcgggggtggtgtagggcccccagcccctgagacctaatccccctcatgctagcctagtccctggaggagggagtccggccccaggccagggactaaggagcaatgaccattgtgcacatgcgtgtgggaaggggttgctagggggtggggacggctaaccagggtaagaatgttcagggggctgcccaggaggggcccccaacctgactatcatggacaagagatttgatggatagaataaaaggctgcagcgag

SEQ ID NO: 133589 - DNA, 579 bp, Homo sapiens
  Payload ID: 6107
  Gene Symbol: FBXO24
  Gene Name: F-box protein 24
  ENST ID: ENST00000466053
  CDS Start-End: 17-579
aagactgaggttaagaatgaacgcggagcccctggccggccgggaacgcagttcgccgctgcagtggcgagtgaagagaagctgcccttcttgtggctcggagcttggggttgaagagaagagggggaaaggaaatccgatttccatccagttgttccccccagagctggtggagcatatcatctcattcctcccagtcagagaccttgttgccctcggccagacctgccgctacttccacgaagtgtgcgatggggaaggcgtgtggagacgcatctgtcgcagactcagtccgcgcctccaagatcagggttctggagtccggccctggaagagagctgccattctgaactacacgaagggcctgtatttccaggcatttggaggccgccgccgatgtctcagcaagagcgtggcccccttgctagcccacggctaccgccgcttcttgcccaccaaggatcacgtcttcattcttgactacgtggggaccctcttcttcctcaaaaatgccctggtctccaccctcggccagatgcagtggaagcgggcctgtcgctatgttgtgttgtgtcgtgg

SEQ ID NO: 133590 - DNA, 1630 bp, Homo sapiens
  Payload ID: 6107
  Gene Symbol: FBXO24
  Gene Name: F-box protein 24
  ENST ID: ENST00000488079
  CDS Start-End: 281-394
cgacgctccaggccgtcccgcccagcgcagctgcacccaatcacaatgctcagatcgggaggtggagccaatcaggtccaaccaagaggaggggacaccggcactccactagcaggaaaacgggccgagggaccgcaagcagggggtgcctagtcctcgtcccccaaagaccaatcgtaagccagatacaggcgagtgactgtcaagaaggccaattagagcctccgaagggaatctggacctgcctcttctctgagggacggctctacctaccaatagcatgggcgagaaggcggtccctttgctaaggaggaggcggacacgaagggcctgtatttccaggcatttggaggccgccgccgatgtctcagcaagagcgtggcccccttgctagcccacggctaccgccgcttcttgcccaccaaggatcacgtcttcattcttgactacgtggggaccctcttcttcctcaaaaatgccctggtctccaccctcggccagatgcagtggaagcgggcctgtcgctatgttgtgttgtgtcgtggagccaaggattttgcctcggacccaaggtgtgacacagtttaccgtaaatacctctacgtcttggccactcgggagccgcaggaagtgaggaaggaaagatctactctttggtagtgaatgagacccagcttgaccagccacgctcctacacggttcagctggccctgaggaaggtgtcccactacctgcctcacctgcgcgtggcctgcatgacttccaaccagagcagcaccctctacgtcacagaccaggggggagtgtattttgaggtgcataccccaggggtgtatcgcgatctctttgggacccttcaagcctttgaccccctggaccagcagatgccgcttgctctctcactgcctgccaagatcctattctgtgctcttggctacaaccaccttggcctggtggatgaatttggccgaatcttcatgcaaggaaataacagatacgggcagctaggaacaggggacaaaatggaccgaggggaacccacacaggtccctctgtgtgcctgtgccctctgtgccaccagggagtgcctatacatcctgtccagccacgacattgagcagcacgccccctatcgccacctgccagccagcagggtggtggggactcctgagcccagcctgggggccagagcaccccaggaccccggggggatggcccaggcctgcgaggagtacctcagccagatccacagttgccaaacgttgcaggaccgcacggagaagatgaaggagatcgtagggtggatgcccctgatggccgcacagaaggacttcttctgggaggccctggacatgctgcagagggctgaaggaggcgggggtggtgtagggcccccagcccctgagacctaatccccctcatgctagcctagtccctggaggagggagtccggccccaggccagggactaaggagcaatgaccattgtgcacatgcgtgtgggaaggggttgctagggggtggggacggctaaccagggtaagaatgttcagggggctgcccaggaggggcccccaacctgactatcatggacaagagatttgatggatagaataaaaggctgcagcgag

SEQ ID NO: 133591 - DNA, 598 bp, Homo sapiens
  Payload ID: 6107
  Gene Symbol: FBXO24
  Gene Name: F-box protein 24
  ENST ID: ENST00000461079
  CDS Start-End: 208-598
tcctttgcaagatggcccctccccgccacctcaggattcttcctactatcaccccagggagcctagtccaagggagatcagggacccaagactaggcgacacgcagcgaagacactcagaaagagatgggagacgggaggggaaggctcaaggcagtccgggcagcaaggcactgatgcttttcgtctgcttggagggcgaggagagatggagggcaggtgttgcagagcaggcgagatcagtggggaggtttcgactggttctccccagaagagggaagaggatgtgtgccagtgccggcctgagtgttcccaggtgaagagaagctgcccttcttgtggctcggagcttggggttgaagagaagagggggaaaggaaatccgatttccatccagttgttccccccagagctggtggagcatatcatctcattcctcccagtcagagaccttgttgccctcggccagacctgccgctacttccacgaagtgtgcgatggggaaggcgtgtggagacgcatctgtcgcagactcagtccgcgcctccaagatcagggttctggagtccggccctggaagagagctgccattctgaact

SEQ ID NO: 133592 - DNA, 957 bp, Homo sapiens
  Payload ID: 6107
  Gene Symbol: FBXO24
  Gene Name: F-box protein 24
  Uniprot ID: O75426
  ENST ID: ENST00000465843
  CDS Start-End: 1-957
atgggcgagaaggcggtccctttgctaaggaggaggcgggtgaagagaagctgcccttcttgtggctcggagcttggggttgaagagaagagggggaaaggaaatccgatttccatccagttgttccccccagagctggtggagcatatcatctcattcctcccagtcagagaccttgttgccctcggccagacctgccgctacttccacgaagtgtgcgatggggaaggcgtgtggagacgcatctgtcgcagactcagtccgcgcctccaagatcaggacacgaagggcctgtatttccaggcatttggaggccgccgccgatgtctcagcaagagcgtggcccccttgctagcccacggctaccgccgcttcttgcccaccaaggatcacgtcttcattcttgactacgtggggaccctcttcttcctcaaaaatgccctggtctccaccctcggccagatgcagtggaagcgggcctgtcgctatgttgtgttgtgtcgtggagccaaggattttgcctcggacccaaggtgtgacacagtttaccgtaaatacctctacgtcttggccactcgggagccgcaggaagtggtgggtaccaccagcagccgggcctgtgactgtgttgaggtctatctgcagtctagtgggcagcgggtcttcaagatgacattccaccactcaatgaccttcaagcagatcgtgctggttggtcaggagacccagcgggctctactgctcctcacagaggaaggaaagatctactctttggtagtgaatgagacccagcttgaccagccacgctcctacacggttcagctggccctgaggaaggtgtcccactacctgcctcacctgcgcgtggcctgcatgacttccaaccagagcagcaccctctacgtcacagatcctattctgtgctcttggctacaaccaccttggcctggtggatga

SEQ ID NO: 133593 - DNA, 1901 bp, Homo sapiens
  Payload ID: 6107
  Gene Symbol: FBXO24
  Gene Name: F-box protein 24
  Uniprot ID: O75426
  ENST ID: ENST00000468962
  CDS Start-End: 69-1775
agactccatgggggaggggcctaggaggcagaggggcctcagaggtcccccaagcctaggctggggacatggtgaagagaagctgcccttcttgtggctcggagcttggggttgaagagaagagggggaaaggaaatccgatttccatccagttgttccccccagagctggtggagcatatcatctcattcctcccagtcagagaccttgttgccctcggccagacctgccgctacttccacgaagtgtgcgatggggaaggcgtgtggagacgcatctgtcgcagactcagtccgcgcctccaagatcagggttctggagtccggccctggaagagagctgccattctgaactacacgaagggcctgtatttccaggcatttggaggccgccgccgatgtctcagcaagagcgtggcccccttgctagcccacggctaccgccgcttcttgcccaccaaggatcacgtcttcattcttgactacgtggggaccctcttcttcctcaaaaatgccctggtctccaccctcggccagatgcagtggaagcgggcctgtcgctatgttgtgttgtgtcgtggagccaaggattttgcctcggacccaaggtgtgacacagtttaccgtaaatacctctacgtcttggccactcgggagccgcaggaagtggtgggtaccaccagcagccgggcctgtgactgtgttgaggtctatctgcagtctagtgggcagcgggtcttcaagatgacattccaccactcaatgaccttcaagcagatcgtgctggttggtcaggagacccagcgggctctactgctcctcacagaggaaggaaagatctactctttggtagtgaatgagacccagcttgaccagccacgctcctacacggttcagctggccctgaggaaggtgtcccactacctgcctcacctgcgcgtggcctgcatgacttccaaccagagcagcaccctctacgtcacagaccaggggggagtgtattttgaggtgcataccccaggggtgtatcgcgatctctttgggacccttcaagcctttgaccccctggaccagcagatgccgcttgctctctcactgcctgccaagatcctattctgtgctcttggctacaaccaccttggcctggtggatgaatttggccgaatcttcatgcaaggaaataacagatacgggcagctaggaacaggggacaaaatggaccgaggggaacccacacaggtttgttacctgcagcggcccatcaccctgtggtgcggcctcaaccactccctggtgctgagccagagctcagagttcagcaaggagctgctgggctgcggctgtggggctgggggccgcctcccaggctggcccaaggggagtgcctccttcgtcaagctccaagtcaaggtccctctgtgtgcctgtgccctctgtgccaccagggagtgcctatacatcctgtccagccacgacattgagcagcacgccccctatcgccacctgccagccagcagggtggtggggactcctgagcccagcctgggggccagagcaccccaggaccccggggggatggcccaggcctgcgaggagtacctcagccagatccacagttgccaaacgttgcaggaccgcacggagaagatgaaggagatcgtagggtggatgcccctgatggccgcacagaaggacttcttctgggaggccctggacatgctgcagagggctgaaggaggcgggggtggtgtagggcccccagcccctgagacctaatccccctcatgctagcctagtccctggaggagggagtccggccccaggccagggactaaggagcaatgaccattgtgcacatgcgtgtgggaaggggttgctagggggtggggacggctaaccagg

SEQ ID NO: 133594 - DNA, 2104 bp, Homo sapiens
  Payload ID: 6108
  Gene Symbol: FBXO25
  Gene Name: F-box protein 25
  Uniprot ID: Q8TCJ0
  ENST ID: ENST00000276326
  CDS Start-End: 160-1035
ggagaactatgccatttttgggtcaggactggagatctcctggatggagttggattaagacagaagatggctggaagagatgtgaatcttgtagtcagaaacttgaaagagagaataaccgttgtaacatcagtcacagcattatcttaaatagtgaagatggagaaatattcaataatgaagagcatgaatatgcatcgaaaaaaaggaaaaaggaccattttagaaatgacacaaatactcaaaaggcatggctattgcaccttgggagaagcctttaatcggttagacttctcaagtgcaattcaagatatccgaaggttcaattatgtggtcaaactgttgcagctaattgcaaaatcccagttaacttcattgagtggcgtggcacagaagaattacttcaacattttggataaaatcgttcaaaaggttcttgatgaccaccacaatcctcgcttaatcaaagatcttctgcaagacctaagctctaccctctgcattcttattagaggagtagggaagtctgtattagtgggaaacatcaatatttggatttgccgattagaaactattctcgcctggcaacaacagctacaggatcttcagatgactaagcaagtgaacaatggcctcaccctcagtgaccttcctctgcacatgctgaacaacatcctataccggttctcagacggatgggacatcatcaccttaggccaggtgacccccacgttgtatatgcttagtgaagacagacagctgtggaagaagctttgtcagtaccattttgctgaaaagcagttttgtagacatttgatcctttcagaaaaaggtcatattgaatggaagttgatgtactttgcacttcagaaacattacccagcgaaggagcagtacggagacacactgcatttctgtcggcactgcagcattctcttttggaaggactcaggacacccctgcacggcggccgaccctgacagctgcttcacgcctgtgtctccgcagcacttcatcgacctcttcaagttttaagggctgcccctgccatccctattggagattgtgaatcctgctgtctgtgcagggctcatagtgagtgttctgtgaggtgggtggagactcctcggaagcccctgcttccagaaagcctgggaagaactgcccttctgcaaaggggggactgcatggttgcattttcatcactgaaagtcagaggccaaggaaatcatttctacttctttaaaaactccttctaagcatattaaaatgtgaaattttgcgtactctctctctctatatatatagttcaaaaatactttaggtggtcagctccacattctttgttgacgtgacactaacggccaataatatgcttcttaattatcaaattatagtttcccaattgggaaactaattgggggtgggttacaaaacatttgatccttgtaaatacattgtacagaatatttattttttctcaaaatgcattttaactactacattggctgtgcccaaatgagtcctctttgaatagaaagtgaacccagggcaatgacagccattcttgtcttagggattatggatcggggtatgaagtgtgcacacgcagcccaacaacgggcagtggtctctgtgctcctaggcatccagcacaggttctggcagggcacccctgctggggttgggggctggtctgtgcataatcctggactgtgatgggaacagcccagtgcagtctaaacttcaattgtgttgaaactactttaatagacaaagtaataaatcatgtttatctattgatttaaacttcatcagttttgcatcctactgagaaatgttagtgattttgatacttaaatccttaaaagattgcttcgtttttaaaataacgcatgtccattttagaaaattagaaaatcagtcccaccacccaaagattattgtgcatgctgaaaagagtatgaaaaatcccctcagcaggcataggatagaaacgtattgttgtatatttccatttttgaatagggtcaaggagcccaagcaaatcatttctactttttcctttaagcataataataaaagtatacttttatggcgttat

SEQ ID NO: 133595 - DNA, 2360 bp, Homo sapiens
  Payload ID: 6108
  Gene Symbol: FBXO25
  Gene Name: F-box protein 25
  Uniprot ID: Q8TCJ0
  ENST ID: ENST00000352684
  CDS Start-End: 418-1293
gacggaggggcagtgcctactacgcaggcgcacgctgcgggcgacaggaccaggcagcaacattgccacgcggatccgcgccggccaatcagcatggccaggggcggggcttccctgaggcgcgccgggaggcggcggcccacttccggcaataaccgcctggtcgccgtcaggtgcgggcccaggtggccggcgcgcccgttgggcactgggggacgcgggcgcgtcaggtgaagactgggggccgcaggcgcgctaggagaactatgccatttttgggtcaggactggagatctcctggatggagttggattaagacagaagatggctggaagagatgtgaatcttgtagtcagaaacttgaaagagagaataaccgttgtaacatcagtcacagcattatcttaaatagtgaagatggagaaatattcaataatgaagagcatgaatatgcatcgaaaaaaaggaaaaaggaccattttagaaatgacacaaatactcaaaaggcatggctattgcaccttgggagaagcctttaatcggttagacttctcaagtgcaattcaagatatccgaaggttcaattatgtggtcaaactgttgcagctaattgcaaaatcccagttaacttcattgagtggcgtggcacagaagaattacttcaacattttggataaaatcgttcaaaaggttcttgatgaccaccacaatcctcgcttaatcaaagatcttctgcaagacctaagctctaccctctgcattcttattagaggagtagggaagtctgtattagtgggaaacatcaatatttggatttgccgattagaaactattctcgcctggcaacaacagctacaggatcttcagatgactaagcaagtgaacaatggcctcaccctcagtgaccttcctctgcacatgctgaacaacatcctataccggttctcagacggatgggacatcatcaccttaggccaggtgacccccacgttgtatatgcttagtgaagacagacagctgtggaagaagctttgtcagtaccattttgctgaaaagcagttttgtagacatttgatcctttcagaaaaaggtcatattgaatggaagttgatgtactttgcacttcagaaacattacccagcgaaggagcagtacggagacacactgcatttctgtcggcactgcagcattctcttttggaaggactcaggacacccctgcacggcggccgaccctgacagctgcttcacgcctgtgtctccgcagcacttcatcgacctcttcaagttttaagggctgcccctgccatccctattggagattgtgaatcctgctgtctgtgcagggctcatagtgagtgttctgtgaggtgggtggagactcctcggaagcccctgcttccagaaagcctgggaagaactgcccttctgcaaaggggggactgcatggttgcattttcatcactgaaagtcagaggccaaggaaatcatttctacttctttaaaaactccttctaagcatattaaaatgtgaaattttgcgtactctctctctctatatatatagttcaaaaatactttaggtggtcagctccacattctttgttgacgtgacactaacggccaataatatgcttcttaattatcaaattatagtttcccaattgggaaactaattgggggtgggttacaaaacatttgatccttgtaaatacattgtacagaatatttattttttctcaaaatgcattttaactactacattggctgtgcccaaatgagtcctctttgaatagaaagtgaacccagggcaatgacagccattcttgtcttagggattatggatcggggtatgaagtgtgcacacgcagcccaacaacgggcagtggtctctgtgctcctaggcatccagcacaggttctggcagggcacccctgctggggttgggggctggtctgtgcataatcctggactgtgatgggaacagcccagtgcagtctaaacttcaattgtgttgaaactactttaatagacaaagtaataaatcatgtttatctattgatttaaacttcatcagttttgcatcctactgagaaatgttagtgattttgatacttaaatccttaaaagattgcttcgtttttaaaataacgcatgtccattttagaaaattagaaaatcagtcccaccacccaaagattattgtgcatgctgaaaagagtatgaaaaatcccctcagcaggcataggatagaaacgtattgttgtatatttccatttttgaatagggtcaaggagcccaagcaaatcatttctactttttcctttaagcataataataaaagtatacttttatggcgtt

SEQ ID NO: 133596 - DNA, 2229 bp, Homo sapiens
  Payload ID: 6108
  Gene Symbol: FBXO25
  Gene Name: F-box protein 25
  Uniprot ID: Q8TCJ0
  ENST ID: ENST00000350302
  CDS Start-End: 267-1343
gacggaggggcagtgcctactacgcaggcgcacgctgcgggcgacaggaccaggcagcaacattgccacgcggatccgcgccggccaatcagcatggccaggggcggggcttccctgaggcgcgccgggaggcggcggcccacttccggcaataaccgcctggtcgccgtcaggtgcgggcccaggtggccggcgcgcccgttgggcactgggggacgcgggcgcgtcaggtgaagactgggggccgcaggcgcgctaggagaactatgccatttttgggtcaggactggagatctcctggatggagttggattaagacagaagatggctggaagagatgtgaatcttgtagtcagaaacttgaaagagagaataaccgttgtaacatcagtcacagcattatcttaaatagtgaagatggagaaatattcaataatgaagagcatgaatatgcatcgaaaaaaaggaaaaaggaccattttagaaatgacacaaatactcaaagtttttatcgtgaaaaatggatctatgtccataaagaaagcacaaaggaaaggcatggctattgcaccttgggagaagcctttaatcggttagacttctcaagtgcaattcaagatatccgaaggttcaattatgtggtcaaactgttgcagctaattgcaaaatcccagttaacttcattgagtggcgtggcacagaagaattacttcaacattttggataaaatcgttcaaaaggttcttgatgaccaccacaatcctcgcttaatcaaagatcttctgcaagacctaagctctaccctctgcattcttattagaggagtagggaagtctgtattagtgggaaacatcaatatttggatttgccgattagaaactattctcgcctggcaacaacagctacaggatcttcagatgactaagcaagtgaacaatggcctcaccctcagtgaccttcctctgcacatgctgaacaacatcctataccggttctcagacggatgggacatcatcaccttaggccaggtgacccccacgttgtatatgcttagtgaagacagacagctgtggaagaagctttgtcagtaccattttgctgaaaagcagttttgtagacatttgatcctttcagaaaaaggtcatattgaatggaagttgatgtactttgcacttcagaaacattacccagcgaaggagcagtacggagacacactgcatttctgtcggcactgcagcattctcttttggaaggactcaggacacccctgcacggcggccgaccctgacagctgcttcacgcctgtgtctccgcagcacttcatcgacctcttcaagttttaagggctgcccctgccatccctattggagattgtgaatcctgctgtctgtgcagggctcatagtgagtgttctgtgaggtgggtggagactcctcggaagcccctgcttccagaaagcctgggaagaactgcccttctgcaaaggggggactgcatggttgcattttcatcactgaaagtcagaggccaaggaaatcatttctacttctttaaaaactccttctaagcatattaaaatgtgaaattttgcgtactctctctctctatatatatagttcaaaaatactttaggtggtcagctccacattctttgttgacgtgacactaacggccaataatatgcttcttaattatcaaattatagtttcccaattgggaaactaattgggggtgggttacaaaacatttgatccttgtaaatacattgtacagaatatttattttttctcaaaatgcattttaactactacattggctgtgcccaaatgagtcctctttgaatagaaagtgaacccagggcaatgacagccattcttgtcttagggattatggatcggggtatgaagtgtgcacacgcagcccaacaacgggcagtggtctctgtgctcctaggcatccagcacaggttctggcagggcacccctgctggggttgggggctggtctgtgcataatcctggactgtgatgggaacagcccagtgcagtctaaacttcaattgtgttgaaactactttaatagacaaagtaataaatcatgtttatctattgatttaaacttcatcagttttgcatcctactgagaaatgttagtgattttgatacttaaatccttaaaagattgcttcgtttttaaaataacgcatgtccattttagaaaattagaaaat

SEQ ID NO: 133597 - DNA, 10386 bp, Homo sapiens
  Payload ID: 6108
  Gene Symbol: FBXO25
  Gene Name: F-box protein 25
  Uniprot ID: Q8TCJ0
  ENST ID: ENST00000382824
  CDS Start-End: 120-1223
ggcaataaccgcctggtcgccgtcaggtgcgggcccaggtggccggcgcgcccgttgggcactgggggacgcgggcgcgtcaggtgaagactgggggccgcaggcgcgctaggagaactatgccatttttgggtcaggactggagatctcctggatggagttggattaagacagaagatggctggaagagatgtgaatcttgtagtcagaaacttgaaagagagaataaccgttgtaacatcagtcacagcattatcttaaatagtgaagatggagaaatattcaataatgaagagcatgaatatgcatcgaaaaaaaggaaaaaggaccattttagaaatgacacaaatactcaaagtttttatcgtgaaaaatggatctatgtccataaagaaagcacaaaggaaaggcatggctattgcaccttgggagaagcctttaatcggttagacttctcaagtgcaattcaagatatccgaaggttcaattatgtggtcaaactgttgcagctaattgcaaaatcccagttaacttcattgagtggcgtggcacagaagaattacttcaacattttggataaaatcgttcaaaaggttcttgatgaccaccacaatcctcgcttaatcaaagatcttctgcaagacctaagctctaccctctgcattcttattagaggagtagggaagtctgtattagtgggaaacatcaatatttggatttgccgattagaaactattctcgcctggcaacaacagctacaggatcttcagatgactaagcaagtgaacaatggcctcaccctcagtgaccttcctctgcacatgctgaacaacatcctataccggttctcagacggatgggacatcatcaccttaggccaggtgacccccacgttgtatatgcttagtgaagacagacagctgtggaagaagctttgtcagtaccattttgctgaaaagcagttttgtagacatttgatcctttcagaaaaaggtcatattgaatggaagttgatgtactttgcacttcagaaacattacccagcgaaggagcagtacggagacacactgcatttctgtcggcactgcagcattctcttttggaaggactaccatcttgctttactattcaaggactcaggacacccctgcacggcggccgaccctgacagctgcttcacgcctgtgtctccgcagcacttcatcgacctcttcaagttttaagggctgcccctgccatccctattggagattgtgaatcctgctgtctgtgcagggctcatagtgagtgttctgtgaggtgggtggagactcctcggaagcccctgcttccagaaagcctgggaagaactgcccttctgcaaaggggggactgcatggttgcattttcatcactgaaagtcagaggccaaggaaatcatttctacttctttaaaaactccttctaagcatattaaaatgtgaaattttgcgtactctctctctctatatatatagttcaaaaatactttaggtggtcagctccacattctttgttgacgtgacactaacggccaataatatgcttcttaattatcaaattatagtttcccaattgggaaactaattgggggtgggttacaaaacatttgatccttgtaaatacattgtacagaatatttattttttctcaaaatgcattttaactactacattggctgtgcccaaatgagtcctctttgaatagaaagtgaacccagggcaatgacagccattcttgtcttagggattatggatcggggtatgaagtgtgcacacgcagcccaacaacgggcagtggtctctgtgctcctaggcatccagcacaggttctggcagggcacccctgctggggttgggggctggtctgtgcataatcctggactgtgatgggaacagcccagtgcagtctaaacttcaattgtgttgaaactactttaatagacaaagtaataaatcatgtttatctattgatttaaacttcatcagttttgcatcctactgagaaatgttagtgattttgatacttaaatccttaaaagattgcttcgtttttaaaataacgcatgtccattttagaaaattagaaaatcagtcccaccacccaaagattattgtgcatgctgaaaagagtatgaaaaatcccctcagcaggcataggatagaaacgtattgttgtatatttccatttttgaatagggtcaaggagcccaagcaaatcatttctactttttcctttaagcataataataaaagtatacttttatggcgttataaataggactaaaaaaagattctggatttttcagccccacttctgtgaactgacacaaatggccaagaatgcatttatttgtcaaattatagtttctcctgaggcgatgcaaatacctggggcctctgcgaatatatgttagtttttcataagaccataaatgtcccgtataccactgttacttcacaacgccccccgtcccgaccctgcctttttttagaaacgtagaaccatatcctaaatgttatttggaaacttggcttttattagctccacagaatcacccagatggaacaggctttttcatcacaacatattggggttcctgagtgtctcgccgttagcatcaataactatgataagcatcgtcacacaacaatgtggccgtctccttacaaccactggtagtacagccaacatcatgagtcaaacatattttaaggcttttaaatatatttctagattgttcatgaaaaaaaatttttttggagtttgtttttgagacagggtcttgctctgtcacccaggctggagtgcaggggtatgatgtcggcttactgcaacctctgtcccccaggctcaagtgatcctcccacctcaccctccagtgatcctcccacctcagcctcccaagcagtcaggaccacaggcatataccaccatgctcagctgtttttttgtatttttagtagagatggggtttcaccatgttgcccaggctggtctcaggagtttgagctcaagcaatccacctgcctcagcttcccaaagtgctgggattacaggcatgagccaccacgtccagctgagaaaagaaattgttctaatctaggaaagggagtaagtacattgagtttccattatccctgaagcacaggtatttctttttctgttggtgctgttttaataagtgaagaatttgatgtatgataaattgtgagcttgaatatttccatatatttattatccatttgcttttcttgtttttggtaaattacttaatgtggtatttgcctgttttttggggtggatgtcagtcttttttcatgttagtttcttcttaaaaggaaactatccttttgaagttgtggttctttcccctaatttgtcatatactgttactgtcatttaattgttagatgttataacagttctcagctgtgctatcaaatcacagatgtgcatttaacttgtataaattgagcagtacttgcttggaaaacataaccatattaatagtgtaggattccagctgttctgctgggctggcatatttccacaggccatggacacagctagccgcattgccactgcatgggtcacagcctcctgcaggtgcgttcgagggacaagctgtgggagctgggcaggtaagcagggatggcttacattgctggggagagattgaaaggttaatggagggtataaggacagaataaagacaattttgaggcactgatcagttatttacagaagatcggacaacaccaaacagagatgagaagagaaatcatagatctccactttggaatggtatttttgaatacagtttctatcagggggccttccaaaagtagggatgccactcctgtgagattaagttacattctgatgccttcattacaatgaagtagataattcaggaccccaggagcctaaagccaggtagtaagtttcacttgcccatcgctcctgtgaaaggcaatgccagacactctcaagatagaatctccagtcattctcggacctgttctcagtctgcgctgctcactcagggctggtgtctcttgacacccagttacaacttccttttgcctattttgagtcaaaaagtcacattcctcacctaatttatgaatacacacaaattggaaagccatgcagtagcctctcaggagcagaccgatttgtagctgtcgtggtttactgcatgacgtacaggctctctgtatgcactgtgtgtgcgtactgtacagggctgtacacagcaaactgtgtctactttatggaaaaaatttaaccatctgtgaacagttttttgccttaagtgctgcttttagaaccaaactgtcatataagatttatcagctcttttaacacctttgtagattcctgatgctgtgtacaaaatcatgtcatctatgaatagacagtttcacttcttcctctcagtctagatgtcctttattctttcttaccccgtttcgctggctagaatctctagtacaatgttgaatagcagtgcgagagtgaacatccttgtcttgttcctcatcttaggggaaagctttcagtctcaccattaactatgatgttaaccctgggttttccatacataccctctattaggttggggaggttcccttctattcctagtttgtttttatcgtgaaagggtgtggattttgtcaaatgctttttctgcatctcttaagataatgtagtttttggccttcataagatcatgtgctgttattacattgactgatttctatatcttgaaccaaccttgcattcttgggtcaaagcccactaagtcatggtttatgataccttttatacatagctgttagatttggtgtgctggaacagccagccctctgtatccacgggggattggttccaagacccccacccccaccccacctgccacccaccaccttgtgatctcttgggttttggtgtccatctcataggataagcttagaaagtgttccctcttctgtgttttggaagtgtttgtggtggtttcttgttaattcttctttaaatgtttgagagaactccatataagatttgaagtcactgagaagcttcaattatcctttaagaggataagaccattttctccagagatgccttttaatggtttttcttttcattgcgaaggcctaacttagtagataagtggactgtgaaacctagtctgttctgcttatcttcagaattatcaaaaggaaggggtgctgccctctgagaaaagtcagaagcaagcctgccttatgaaactcgactttttaatctccctctcttcattatgatgtgtgcacgtgatggacaccactcacctccctttagtccctatcaaatgctacccaatggcaaagccaagggattagcaacaggtaggaggaaaaagaaggacctgcatacatgactaaccagcaccagccattggggccctctatggctgacaccagcatccaccctgcactcatatgtatctcaacagaattgctgcttctgtcttcactcaagccccactccttatcccttcctgttgtttctgcatagaggaggcagaccctcaactttggaaagcagtgtccccccgcgtcccatgggctaaatgccactgagccggtaggagctgctcaggtgtagcctctgccttcagaatttcagcaggaactgcatcattgtgtgcctaaaaagccctggctcacagcatgagacagtgtgttctaggtggtaacgtggcacctgcacatgcacccccagcagtcctctctaaactcaggcagtgtatggctgctgccattctcgccctcagcatctgtgagatgaaggagttgctccccagggcacctgccccaatacaggccacgtggatctgccattgcttttcacgtgaatgcctaggagaggctgttaaccctcctagttgtcctttttgtacttggtcctcttccttccaatcctcactggctcaaatccacagagtgacaaagaacagagatgcccagagcaccagctggaggggcaagcaggagaaggcactgctggtgccacaggggtcctgggctggctcttggaccataaccagcgttcactgaggatgcggtttctttgaaatgctcttgttcttcctaagtaagggagagcaaaaaaaatgaggacatctgtgtcaaatagaagagacacctcaactgtctcgtttttgcatggaaatttcatttttatttgataatcatttgagaaacttgcacagatgaaggcaagttggtttttattatctaacctatgtagtcaattctaatgtcatttaaaagaatttgacatgttaaaatacacgtgaaatttaccatcttacctattttaagtgtgcaatttagtggcattaaatacattcatactgtgcaaccttctctaccacgtatccacaagttcaactttacaagatgaacttttgtcatcttgtaaaactgaagctctgtacccattaagcaccaactccctattccccatccaccagcccctggcagcctctgttctcctttgtctcttttaatttgacttctgtagggacctcgtatgagtggaaccagaagggatttgtccttttgtgactggcttatttcacttagcgtaatgtcctcaaggtttattcaagttgtaggatatgtcaagatttctttttaaggctgattctatggatggaccacattttgtttgtgtactcatctgttgaggacacttgagttgcttccaccttttagctattgtgaatattgctgccgtaaacatgggtgtgcaaatatctgagtctctgctttcaatcatatggcaatcctatgtttaatttcttagggcactgccataagtgttttacacggtggctgcaccattttacattcccactgaaggttccagttttgccacatccttgccaacacctgtttttaataattgccatcctaatgagtgtgaagtggtatcctgctgagattttgatttgcatttccgtaatgactggtgatgctgagtatctgtttgttggccgtttatatgtcgtctttggagaaatgtctatttgggctctttgtccatttttcaatcaggtgtgtgtttttatatgttctgggtattcacccttttcagatatatcattttaaaatactttgtcccattccgtggattgcctttcactctgttttgttctttgatgtacagaagttgtttctttcttttagttacctgtgtgtgcctctggtgtcatatctaagaaatcactgcctcacccttttcagatatatcattttaaaatactttgtcccattccgtggattgcctttcactctgttttgttctttgatgtacagaagttgtttctttcttttagttacctgtgtgtgcctctggtgtcatatctaagaaatcactgccaaatccaatgttgttaaaagtttcccttatgtttctcctaaatgttttagttttagctcttagtttaggcctttgatctattttaatttttatatatggtgtgaggtagatctagcttcatgtggatgtccacttgtctagcaccatttgttgaaaagactgtcctttctcccttgaatggtcttggcaccatcaaaaatcatttgacccatatgtgcaagggtttatttggggatttgctattctgttccattggtctacatgactgtctttgtttcaatacaacaccattttgattattgtagctttgtcgtaagttatgaaataaggaagtgagagacctcctacttggttccctttcaagatgattttggctgtgtgaggtctcttgagattccatatgagtttcaggatggaaaaaaaaaagccactgggatattctgatagagattgcatgaaatctatagattgctttggactatggacatcttaaggtatccaatccataaacacgggattgctttctatttatttgtgttgaccttactttctttaagcagtgttttatggttttcaagtacaagtcttttgcttccttaagtttattcctaaatatttcagtttttttgttactattataatggaattttcttaaatttccttttgagattgcttgttattgtatagaaatatcatggatttgttgtgttgattttgtaaactgcagtgttactgaaatttttttttgtatatgtatggacactaggattttctacatataagatcatgtcatctgcaaacagataattttgcttcttcctttccagtctggatgccttttatttctttttcttgcctaactgctctaagactccagtactgtgttaaacagaagtggtgagacagggtatttctgtgttgttcttgatcttaaagtcctttcagtcttattgaatatgatgtttacagtgggatgttcatatggcctctattttaggttgtttccttctattcccaattgttgagtttttatcatgaaagggcatgacattgtctcaaatgctttttctccatcaatggagatcacatttttttccttcattctattaatgtaatagacattacatttattgacttgagcatgttgaaacatctttgcataccagctgtaaatcttacttggccatgatgtgtaatcctttcaatgtcccactgaatcctgttggccagtattttgttgaatattgatttaaaaaaatcttgatcaggaatactgatgtgtggtgtttttttcttatagtgtctttgtctggttttggtatcagaataatgatggcctcatagaatgcatttggaagtgtcctttcctcttcagttttttggaagagtttgaggagaattgatttaattcttcagatgtttgccagaattcccatatgaccctgggcttttctttcttgggaggcttttctttactacttcatgctcttgactagcataggtctgttcagattttccatttcttcatgattcaatcttgataggctgtgtgtttctaagaatttgtccagttcatctaggttatccaattctttgatatgtaattgctcatagtactcttaatcctttttatttctgtaaaatcagttgtaatgtctcctcctggtttttagttgtttttcttagtcactcttagctatcaacaaactcttggtttcatttatttttctctattgcttttctgttctctattttgtctctgctctaatctttattattattataatcatctccattctgctggctttgggttgattgctcttctttttctagttctttcagatgtaaatttagggttgacttgagatcttaatttgtttaataggtgtatttacagttacaaatttccctcctaccactgctttgactgtacctgtttttttgtatattacatttttcatttaccacaagatattttctaatttcccttgtgagttccccattaatctgctggttgagagcgttgtttaattttcacataattgtgtacttttcagttttttgtctgttactgatttctagtttcatcccactgtggccagaaaagatattttatttcctcagtcttttgaaatttgttgacttgtttagtcatctaacatactgtctatcctagagaaaggtccatttgcacttgagaaaaacgtgtgtactgctgttgtgtctgttaggtccagctggtatgatgctgttcaagttctgtcttgcgactgatcttctgtctggttgtcctatccgttactgaaagtgggctactgcagtctcctactcttactgtagaactatccatttcttcctttgattctgtcaatgtttgtttcatatattttgggctctgatgtttggtgcatatatattacatcttggtgaattttcaaactttttaaatttcaacatgaagatgaaattataggatgtctgggatttcctttgaatccgtggggctgggagtaactataaatgaaacaagattggccgggaatttgaggctgcaaggataggtacacacaggggagtgaagcagggcttggagcagatggtaaagattgttggcttttccagccatggggctctcttgccacttggcagtagtggcatgaagccgccaccagggggccacgcaccagtgcatgtggctgtgttccaaactttttggacaataaaatctgaatttcacatacttttcttatgtcattagatattacccttttacatcttttcactatttaaaaatgtaaaaatcattcttaacatttgggctgtgcaaaaacagctggtgggcccaattttggcctgtatttcacttgccaacctgatttatacttttgtatctatttgacattttccattaaaagttatataacacta

SEQ ID NO: 133598 - DNA, 632 bp, Homo sapiens
  Payload ID: 6108
  Gene Symbol: FBXO25
  Gene Name: F-box protein 25
  ENST ID: ENST00000518240
  CDS Start-End: 259-632
gtgtgagcgcgcagtgatgccctagagtgcagtcatcccgggcttggcgcccagcgggtggaaatacggccgcagggtggaaatgcggcggcggggctgcccaggctcctgtgggacccgcgcggcgcgggcacgcacattctcagggacgcgcgtcctcaggccacgagaacacctgaaggccccggccagcgtcctcccgtgaagacccggaccggcgtcgtcacccgccgcgcaggcctaaatctcaggagaactatgccatttttgggtcaggactggagatctcctggatggagttggattaagacagaagatggctggaagagatgtgaatcttgtagtcagaaacttgaaagagagaataaccgttgtaacatcagtcacagcattatcttaaatagtgaagatggagaaatattcaataatgaagagcatgaatatgcatcgaaaaaaaggaaaaaggaccattttagaaatgacacaaatactcaaagtttttatcgtgaaaaatggatctatgtccataaagaaagcacaaaggaaaggcatggctattgcaccttgggagaagcctttaatcggttagacttctcaagtgcaattcaagatatccgaaggttcaattatgt

SEQ ID NO: 133599 - DNA, 826 bp, Homo sapiens
  Payload ID: 6108
  Gene Symbol: FBXO25
  Gene Name: F-box protein 25
  ENST ID: ENST00000519274
  CDS Start-End: 1-90
gactcaggacacccctgcacggcggccgaccctgacagctgcttcacgcctgtgtctccgcagcacttcatcgacctcttcaagttttaagggctgcccctgccatccctattggagattgtgaatcctgctgtctgtgcagggctcatagtgagtgttctgtgagagatggggtttcaccatgttgcccaggctggtctcaggagtttgagctcaagcaatccacctgcctcagcttcccaaagtgctgggattacaggcatgagccaccacgtccagctgagaaaagaaattgttctaatctaggaaagggagtaagtacattgagtttccattatccctgaagcacaggtatttctttttctgttggtgctgttttaataagtgaagaatttgatgtatgataaattgtgagcttgaatatttccatatatttattatccatttgcttttcttgtttttggtaaattacttaatgtggtatttgcctgttttttggggtggatgtcagtcttttttcatgttagtttcttcttaaaaggaaactatccttttgaagttgtggttctttcccctaatttgtcatatactgttactgtcatttaattgttagatgttataacagttctcagctgtgctatcaaatcacagatgtgcatttaacttgtataaattgagcagtacttgcttggaaaacataaccatattaatagtgtaggattccagctgttctgctgggctggcatatttccacaggccatggacacagctagccgcattgccactgcatgggtcacagcctcctgcaggtgcgttcgagggacaa

SEQ ID NO: 133600 - DNA, 2330 bp, Homo sapiens
  Payload ID: 6109
  Gene Symbol: FBXO27
  Gene Name: F-box protein 27
  Uniprot ID: Q8NI29
  ENST ID: ENST00000292853
  CDS Start-End: 121-972
gggaggggccggcgagtaaaaaggacgcagaggggcgtggggagcttgcggcacagctagggcatcccggcgaggagcgccgccaggccccgggccacagccgggcctggcggggggaccatgggcgcctcggtctccaggggccgggccgcccgggtccccgcgccggagccggaacccgaagaggcgctggacctgagccaactacccccagagctgcttctggtggtgctgagccacgtccccccgcgcacgctgctcgggcgctgccgccaagtgtgccggggctggcgagccctggtggacggccaggccctgtggctgctgatcctggcccgcgaccacggcgccaccggccgcgcgctgctgcacctcgcccgcagctgccagtctcccgcccgtaacgccaggccttgccccctgggccgcttctgcgcgcgcagacccatcggacgcaaccttattcgcaacccctgcggccaagaaggcctccgaaagtggatggtgcaacacggtggggacggctgggtggtggaggaaaacaggacaaccgtgcctggggccccttctcagacgtgcttcgtgacttcattcagctggtgttgcaagaagcaggtcttggacctagaggaggagggtctgtggccagaactgctggatagtggcaggattgagatttgtgtctctgactggtggggagcccgacacgacagcggctgtatgtacagactcctcgtccaacttctagacgccaaccagactgttctagataaattctctgctgtgcctgatcccatcccgcagtggaacaacaatgcctgccttcacgtcacccacgtgttctccaacatcaagatgggcgtccgctttgtgtctttcgaacaccggggccaggacacacagttctgggctggccactatggagcccgtgtgaccaactccagtgtgatcgtgcgagtccgtctgtcctagtccagcactacccttcttgcaagacagcctgactgtgccttccagggcctgggaccattggctgggacccctcattaaccaaccaagcacttgtacctccctggcatactgagaattcctgggtccaatcaaaggccctgacgggccctgtcttcaggttctagaaactaccagaagaagcttcttccatcttatctacctactgcagctgctgctttgcgggggggccctactgtactgaggggaaacccacaagtgagcatgggggaatgcccatcctggagaagaattcttgccctcccctctcttctcctcccaaccaaaaccctccgatccagccccaggcccctctgtaccatcccctcccctccgcaccactgacctcttgtctcctgttgtttctgccacagggacttccttggtcccttcagggaagccctcaactcatctctgaacttagaatctcatccttagggctcagagagtcccagccctaagggtgtgaacctcacctcctggggcttccgagctacagggctgggaccaggtcatgcagctgaaagtctacgttaaaaaaaaaaagtttgggccaggcacagtggctcatgcctgtaatcccagcactttgggaggctgaggcaggcggatcacctgaggtcaggagttcaagaccagcctggccaacatggtgaaaccccgtctctactaaaaatccaaaaaattagccgggcttggtggtgtgcacctgtaattccagctactcgggaggctgaggcaggagaattgcttgagcccgggaggcagaggctgcagtgaaccaagatcatgccactgcactccagcctgggcaacacagcgagactccgtctcaaaaagaaaaagtttggatcaggcagggtggctcacacctgtaatccctgcactttgggaggccaaggtgggaggatcagttgagccccagagttcaagaccagcctgggcaatgtagtaagacccccatcgctacaaaaaatacaaaagttagccaggtacagtagtacacacctgtagtccaagctacttgggaggctgaagtgggaggatcatttgtgcccaggttgaggctatagtgagccatgatcataccactgcactccagcctgggtgacagagcgagaccctgtctcaaaaaaaaaaaagaatttggagatggttctgcccactctggtttctctgaaaaaacgaggtaattccctgagcccaaccctgatcctcaaggacctgtaattgtgtggtatttaaaattaaaataacattatttttattttgactttttttcaaacagtaagaataatatatcagcagcatgtatctgccaa

SEQ ID NO: 133601 - DNA, 2130 bp, Homo sapiens
  Payload ID: 6109
  Gene Symbol: FBXO27
  Gene Name: F-box protein 27
  Uniprot ID: Q8NI29
  ENST ID: ENST00000509137
  CDS Start-End: 50-901
gaggagcgccgccaggccccgggccacagccgggcctggcggggggaccatgggcgcctcggtctccaggggccgggccgcccgggtccccgcgccggagccggaacccgaagaggcgctggacctgagccaactacccccagagctgcttctggtggtgctgagccacgtccccccgcgcacgctgctcgggcgctgccgccaagtgtgccggggctggcgagccctggtggacggccaggccctgtggctgctgatcctggcccgcgaccacggcgccaccggccgcgcgctgctgcacctcgcccgcagctgccagtctcccgcccgtaacgccaggccttgccccctgggccgcttctgcgcgcgcagacccatcggacgcaaccttattcgcaacccctgcggccaagaaggcctccgaaagtggatggtgcaacacggtggggacggctgggtggtggaggaaaacaggacaaccgtgcctggggccccttctcagacgtgcttcgtgacttcattcagctggtgttgcaagaagcaggtcttggacctagaggaggagggtctgtggccagaactgctggatagtggcaggattgagatttgtgtctctgactggtggggagcccgacacgacagcggctgtatgtacagactcctcgtccaacttctagacgccaaccagactgttctagataaattctctgctgtgcctgatcccatcccgcagtggaacaacaatgcctgccttcacgtcacccacgtgttctccaacatcaagatgggcgtccgctttgtgtctttcgaacaccggggccaggacacacagttctgggctggccactatggagcccgtgtgaccaactccagtgtgatcgtgcgagtccgtctgtcctagtccagcactacccttcttgcaagacagcctgactgtgccttccagggcctgggaccattggctgggacccctcattaaccaaccaagcacttgtacctccctggcatactgagaattcctgggtccaatcaaaggccctgacgggccctgtcttcaggttctagaaactaccagaagaagcttcttccatcttatctacctactgcagctgctgctttgcgggggggccctactgtactgaggggaaacccacaagtgagcatgggggaatgcccatcctggagaagaattcttgccctcccctctcttctcctcccaaccaaaaccctccgatccagccccaggcccctctgtaccatcccctcccctccgcaccactgacctcttgtctcctgttgtttctgccacagggacttccttggtcccttcagggaagccctcaactcatctctgaacttagaatctcatccttagggctcagagagtcccagccctaagggtgtgaacctcacctcctggggcttccgagctacagggctgggaccaggtcatgcagctgaaagtctacgttaaaaaaaaaaagtttgggccaggcacagtggctcatgcctgtaatcccagcactttgggaggctgaggcaggcggatcacctgaggtcaggagttcaagaccagcctggccaacatggtgaaaccccgtctctactaaaaatccaaaaaattagccgggcttggtggtgtgcacctgtaattccagctactcgggaggctgaggcaggagaattgcttgagcccgggaggcagaggctgcagtgaaccaagatcatgccactgcactccagcctgggcaacacagcgagactccgtctcaaaaagaaaaagtttggatcaggcagggtggctcacacctgtaatccctgcactttgggaggccaaggtgggaggatcagttgagccccagagttcaagaccagcctgggcaatgtagtaagacccccatcgctacaaaaaaaaaaaaaaagaatttggagatggttctgcccactctggtttctctgaaaaaacgaggtaattccctgagcccaaccctgatcctcaaggacctgtaattgtgtggtatttaaaattaaaataacattatttttattttgactttttttcaaacagtaagaataatatatcagcagcatgtatctgccaatcatatgtaataaatttcttattttgcc

SEQ ID NO: 133602 - DNA, 1557 bp, Homo sapiens
  Payload ID: 6109
  Gene Symbol: FBXO27
  Gene Name: F-box protein 27
  ENST ID: ENST00000600828
  CDS Start-End: 127-975
actaacgaattagggacacttcaaggggccggctggaggggacggctgtgagcagcaggccttggctcctggctgcacctggccccgtcgcgggaagcagccacagccgggcctggcggggggaccatgggcgcctcggtctccaggggccgggccgcccgggtccccgcgccggagccggaacccgaagaggcgctggacctgagccaactacccccagagctgcttctggtggtgctgagccacgtccccccgcgcacgctgctcgggcgctgccgccaagtgtgccggggctggcgagccctggtggacggccaggccctgtggctgctgatcctggcccgcgaccacggcgccaccggccgcgcgctgctgcacctcgcccgcagctgccagtctcccgcccgtaacgccaggccttgccccctgggccgcttctgcgcgcgcagacccatcggacgcaaccttattcgcaacccctgcggccaaggcctccgaaagtggatggtgcaacacggtggggacggctgggtggtggaggaaaacaggacaaccgtgcctggggccccttctcagacgtgcttcgtgacttcattcagctggtgttgcaagaagcaggtcttggacctagaggaggagggtctgtggccagaactgctggatagtggcaggattgagatttgtgtctctgactggtggggagcccgacacgacagcggctgtatgtacagactcctcgtccaacttctagacgccaaccagactgttctagataaattctctgctgtgcctgatcccatcccgcagtggaacaacaatgcctgccttcacgtcacccacgtgttctccaacatcaagatgggcgtccgctttgtgtctttcgaacaccggggccaggacacacagttctgggctggccactatggagcccgtgtgaccaactccagtgtgatcgtgcgagtccgtctgtcctagtccagcactacccttcttgcaagacagcctgactgtgccttccagggcctgggaccattggctgggacccctcattaaccaaccaagcacttgtacctccctggcatactgagaattcctgggtccaatcaaaggccctgacgggccctgtcttcaggttctagaaactaccagaagaagcttcttccatcttatctacctactgcagctgctgctttgcgggggggccctactgtactgaggggaaacccacaagtgagcatgggggaatgcccatcctggagaagaattcttgccctcccctctcttctcctcccaaccaaaaccctccgatccagccccaggcccctctgtaccatcccctcccctccgcaccactgacctcttgtctcctgttgtttctgccacagggacttccttggtcccttcagggaagccctcaactcatctctgaacttagaatctcatccttagggctcagagagtcccagccctaagggtgtgaacctcacctcctggggcttccgagctacagggctgggaccaggtcatgcagctgaaagtctacgttaaaaaaaaaaa

SEQ ID NO: 133603 - DNA, 300 bp, Homo sapiens
  Payload ID: 6109
  Gene Symbol: FBXO27
  Gene Name: F-box protein 27
  ENST ID: ENST00000598394
  CDS Start-End: 1-300
ccaacttctagacgccaaccagactgttctagataaattctctgctgtgcctgatcccatcccgcagtggaacaacaatgcctgccttcacagacacagtttcactatgttgcctgggctggtcttgaactcctgtgctcaagcaatcctctcgcctcagcctcccacagtgctgggattacaggcacaagccactgcatccagcccgtgcgtgtttttgagtgcaccaattccagctctaagattgacgagatggaatcttactctctcacccaggctggagtgcaatggcacaatctc

SEQ ID NO: 133604 - DNA, 508 bp, Homo sapiens
  Payload ID: 6109
  Gene Symbol: FBXO27
  Gene Name: F-box protein 27
  ENST ID: ENST00000593847
  CDS Start-End: 109-508
cttcaaggggccggctggaggggacggctgtgagcagcaggccttggctcctggctgcacctggccccgtcgcgggaagcagccacagccgggcctggcggggggaccatgggcgcctcggtctccaggggccgggccgcccgggtccccgcgccggagccggaacccgaagaggcgctggacctgagccaactacccccagagctgcttctggtggtgctgagccacgtccccccgcgcacgctgctcgggcgctgccgccaagtgtgccggggctggcgagccctggtggacggccaggccctgtggctgctgatcctggcccgcgaccacggcgccaccggccgcgcgctgctgcacctcgcccgcagctgccagtctcccgcccgtaacgccaggccttgccccctgggccgcttctgcgcgcgcagacccatcggacgcaaccttattcgcaacccctgcggccaagaaggcctccgaaagtggatggtgcaacacggtgggg

SEQ ID NO: 133605 - DNA, 5451 bp, Homo sapiens
  Payload ID: 6110
  Gene Symbol: FBXO28
  Gene Name: F-box protein 28
  Uniprot ID: Q9NVF7
  ENST ID: ENST00000366862
  CDS Start-End: 44-1150
ccctgttccccttgctgtgggggtaaggaatcaagcccccaagatggcggcagcggcggaggagcggatggcagaggaaggaggcggcggccaaggcgacggcggttcctctttggcctccggctctacccagcgacagcctccaccgcccgcgccacagcacccgcagccggggtcccaggcgctcccagcccccgcgctggctccggaccagctgcctcaaaacaacacgcttgtggcgctgcccatcgtagccatcgagaacatcctcagctttatgtcctacgacgaaattagccagctccgcctggtttgtaaaagaatggacttggtctgccagagaatgttgaatcagggatttctgaaagtggagaggtaccataatctatgtcagaaacaagttaaagcacaactcccaaggagagagtcagaaaggagaaaccattcattagctcgtcatgcagacattcttgctgctgttgaaacaaggctgtcactattaaatatgactttcatgaaatatgtggattccaatctctgttgcttcatcccaggaaaggtgattgatgagatttatcgtgtgttgagatatgtcaattctaccagagcccctcaacgagctcatgaagtacttcaagaattaagggatatatcctctatggcaatggagtactttgatgaaaagattgttccaattttaaagaggaaattaccaggatcagatgtttctggaagactcatgggctctcctccagttccaggaccgtctgcagccctaacaacaatgcagctcttctccaagcaaaatccttcaagacaagaggttaccaaactccagcagcaggttaaaacaaatggtgctggcgtgactgttctcaggcgtgaaatttctgagcttcgcaccaaagtgcaagaacagcaaaaacagcttcaagaccaggaccagaaactgctagagcagacccagatcataggtgaacaaaatgcacggttggcagagctagaacgcaaactacgagaagtaatggaaagtgctgtaggaaattcctcagggtccgggcagaatgaggagtctcctcggaaacgaaaaaaggccacggaagccatagactctcttaggaaatctaaacgtcttcggaatagaaagtaaattggaatgtggttctagttccagaggaagacacagcttagtagcttaagcagttatgcatatcaggatactgtgagcaacatggtgtcccttaagcttctaggctttcagaacacaacttaaacttgaactcttatggttgggacattcttttcctgcttctcctgattgaactgatgcacagaatctttttactttgcaatagatttgtactaaccagacctgttctatcatgttttgaggagttaacttttttctgtgcagataatgttgaaagtaagttaatttgtttctgcatatatgcacatacatacgtaaggatcttaaacccagtcttgacagactagaagttaagtttaatacagaaaatgtcctgttcacttgaaagaaaagacctactttttaaatggacactatcttggttcttttttttttaagtcatctttttgttataagtgacctttgtctggaatgtctgaaaagtagttaatgctttttggtattgaagtaatgggtaactaaaatggacttccatagtattgactgtagaaggagcctctacaatattgactatatatttttataaactactggcaaggaacttacccagctgttatacatgttttcagttctctttgggggccatgtcctacatttgcatggatggatgcatgcattgcctagtcaactcacttaaaaagctcttgcactggtattgatcttgaacctctatacttctccactttttagagcggcgtcttagtttatttaaacgcttaacatcttccaccgcaacagcttgcctctagagggggaattgttcatccatttgtcctccagttttataggaacaagagactattaaagcccattgctttatctgctctctgtagggttcaggtacactggctaaggcagaaccccaaatttcaaggctctttctatcaatattggacctctgggagctaatactcctctttgctcaccaccatgtgatcattgatcagatgtggtgagtgagtaggggactcgacttgcgggatgcagttttgccattgcagcaaagttcattgaggaaaattgtaccatgaaaaagcattttgattatttcatttctggaggatgaccttgagggaagctttttaatattagtttcaagctttccttaccctacaactttaaacaaaagctttaattttgtttgcactcctattttgagcttgtaactggaaaagcatgtcttgcactgttcaacctcctgagtggtcgctttaacaacctccaaattgtgtacagtggttattttccccagttgtatagttttgagacattcaattatcactgtcttagttgtattttaatttactaaattatgtagctatttgactgttaagttcttttaaacaactgtttccttgggcttcagttatttaaagtaaatttaggtgtaatatagaaaactgtccctttccaggtgggagcttaacacctgtataaaacctaaggttttggtaagtaccttagttgaataaaagcacaaggttatcaccttttttatccgtccaccgtgacatggttatgcatcctttagattaacctcaccaaatgaagctttttctatccatttttaatattgtccttacataatattgtccttagattttgatcaattctatgtctgactttgaaattccatttacaatgtagtatgttttcaatgaaaaaccataaagtaacatccaagtgtttcatggtttgttgggaaggtaattttaaaataaaacaatttccaaaaaacatttgtcagccaaggtcatccataaaagtccccgtctggaactcgttttctcagcacttctcatttttataatcatagtatttagccatattagcatatctttagaggaggcctggtggaatacccggggcctctactagtctgcttttccggtcataggaagacttttttttttacgtatcaaagcatgtgtttacagatttacagagtgtgatccgtatgcatcaaagggatacagccccagactgtttctttaatggtcattcatgaactattaaaaatttcctgaatttctttttaaactacatctagatagcctaaacatctatgtagtcttccattagttaacatgtgtatagggctttcataataagtagtcacactgttacaaggtaaattttctattacaaaatccaaatttctattgcatacacttataatcatctattcataaagctaattcattgtacttgttaatgcatgaatgttccatgcagtaggagaataaagcactacagttcggttgttcaaatcttaaatcttaggctatttagctaaaacatgttaggatattgccttcaccacttgttaggacagttatttgatagccattatgcttacctatggatagcataatggtatttaaggttcaacaaaccgcagattattatgatcagctagaactgacatatgttacaagaaaactgtaaattaacctcctgagagaaccattctgccctgcattttaagtcaggtatttaaatactgcgtgttgttaatattgcgttgtcttagtgcaacatttcttaaagtattcccgttatcttccttggctgtttttcagaggagacgtctccatgttaatgggtccttcccacatagaaatgtattctggtacagcgctgcacacatggatagcaatgtgaaaaggcatgcctaagagacagaaacggctgaccttaccccaccccagccggatcctctgcttatctcccacatgcacttggcttaactggttttcacagattctgaggttatagaacctgttgtttttcaaactcctgtacagagcctggaaataatggagcaaacgcaaatgtattgagagtcattatactttaaaatagttttaaagactattggggtaccatcaggtcaaaagccactgatttgggaagcaatttttttgcaaaacactttttttggagtactgaactttacaggggcttgccttaatctctatttagtagtttcaagatatatgcgcaattattctacgtgttaaaaatgttaaaatattctatgtagccccaaaggtgggtaaaacagtataagtaatgcctaaattaataagctaaaaggtgtcactacagctggatttttgagagaaaatggacataaaactaggctatgtgtaataaaaataatggcaccttaagattgcactattttatgcattattttatatgccatttcatagcctgcactttaatctccaaagaaacgatgtatgatgtcccacttgttccttattcttaataaactttttcctgagacagggcacttaattctattttactatactgaattagtttcttggaggtagattcatttcttgagttctctgtttccttagccataatattttctaggatccgggaactccctatattgtctatttccaacattatataattttaatttaatgtaatgtaaatctcatacttggtgatcagcacattcttatatcctgctctagcaatgagtacccatttgttacacttaccaaactctctaaaaacatatactgtgagtaagatttgaagccaggaataaaaggcagtctgaaagaaaacgtcctatacgatgcagttgtttggaaatggctgatttctgatatgaaacccaacttgatacactgtttggttctttgacttgggatctatctgaattgctttcactagtacacaaaaggttaagttaaaactactttaaacttgtatagcctgccatctgaggtgaattattttcaaaaaatactaaatctatgaactgagactagcaattagttggctgctccctaccatgattttacttttaatagcaatacagttatattggtgataaatatgacaggcttaagtactgctgtccttttgcatcttcctaagcatcttggttaaatttctgaagtttaaaaattagatccagatttcttctgttgtgtctgaagagaaccatgacatttagaagtatattggtaatctattaggtccattggcaaagtatattggtccatattcaaacctattccaaaaggttagaagtgtttaagattcctttattgtggtaccatgtctgtttacctatgcttatgagcaacaataaattactagtttaccttctggaattttaattgttataaccgaatcaattattggaaagtgaaaaacacctcccggtcacacaacagggtacgtaaataaatgtgttgttaccagtg

SEQ ID NO: 133606 - DNA, 1334 bp, Homo sapiens
  Payload ID: 6110
  Gene Symbol: FBXO28
  Gene Name: F-box protein 28
  Uniprot ID: Q9NVF7
  ENST ID: ENST00000424254
  CDS Start-End: 20-559
aaggaatcaagcccccaagatggcggcagcggcggaggagcggatggcagaggaaggaggcggcggccaaggcgacggcggttcctctttggcctccggctctacccagcgacagcctccaccgcccgcgccacagcacccgcagccggggtcccaggcgctcccagcccccgcgctggctccggaccagctgcctcaaaacaacacgcttgtggcgctgcccatcgtagccatcgagaacatcctcagctttatgtcctacgacgaaattagccagctccgcctggtttgtaaaagaatggacttggtctgccagagaatgttgaatcagggatttctgaaagtggagaggtaccataatctatgtcagaaacaagttaaagcacaactcccaaggagagagtcagaaaggagaaaccattcattagctcgtcatgcagacattcttgctgctgttgaaacaaggctgtcactattaaatatgactttcatgaaatatgtggattccaatctctgttgcttcatcccaggaaagttccaggaccgtctgcagccctaacaacaatgcagctcttctccaagcaaaatccttcaagacaagaggttaccaaactccagcagcaggttaaaacaaatggtgctggcgtgactgttctcaggcgtgaaatttctgagcttcgcaccaaagtgcaagaacagcaaaaacagcttcaagaccaggaccagaaactgctagagcagacccagatcataggtgaacaaaatgcacggttggcagagctagaacgcaaactacgagaagtaatggaaagtgctgtaggaaattcctcagggtccgggcagaatgaggagtctcctcggaaacgaaaaaaggccacggaagccatagactctcttaggaaatctaaacgtcttcggaatagaaagtaaattggaatgtggttctagttccagaggaagacacagcttagtagcttaagcagttatgcatatcaggatactgtgagcaacatggtgtcccttaagcttctaggctttcagaacacaacttaaacttgaactcttatggttgggacattcttttcctgcttctcctgattgaactgatgcacagaatctttttactttgcaatagatttgtactaaccagacctgttctatcatgttttgaggagttaacttttttctgtgcagataatgttgaaagtaagttaatttgtttctgcatatatgcacatacatacgtaaggatcttaaacccagtcttgacagactagaagttaagtttaatacagaaaatgtcctgttcacttgaaagaaaagacctacttttt

SEQ ID NO: 133607 - DNA, 1415 bp, Homo sapiens
  Payload ID: 6110
  Gene Symbol: FBXO28
  Gene Name: F-box protein 28
  ENST ID: ENST00000523990
  CDS Start-End: 12-392
aagcccccaagatggcggcagcggcggaggagcggatggcagaggaaggaggcggcggccaaggcgacggcggttcctctttggcctccggctctacccagcgacagcctccaccgcccgcgccacagcacccgcagccggggtcccaggcgctcccagcccccgcgctggctccggaccagctgcctcaaaacaacacgcttgtggcgctgcccatcgtagccatcgagaacatcctcagctttatgtcctacgacgaaattagccagctccgcctggtttgtaaaagaatggacttggtctgccagagaatgttgaatcagggatttctgaaagtggagaggtaccataatctatgtcagaaacaagttaaagcacaactcccaaggtgattgatgagatttatcgtgtgttgagatatgtcaattctaccagagcccctcaacgagctcatgaagtacttcaagaattaagggatatatcctctatggcaatggagtactttgatgaaaagattgttccaattttaaagaggaaattaccaggatcagatgtttctggaagactcatgggctctcctccagttccaggaccgtctgcagccctaacaacaatgcagctcttctccaagcaaaatccttcaagacaagaggttaccaaactccagcagcaggttaaaacaaatggtgctggcgtgactgttctcaggcgtgaaatttctgagcttcgcaccaaagtgcaagaacagcaaaaacagcttcaagaccaggaccagaaactgctagagcagacccagatcataggtgaacaaaatgcacggttggcagagctagaacgcaaactacgagaagtaatggaaagtgctgtaggaaattcctcagggtccgggcagaatgaggagtctcctcggaaacgaaaaaaggccacggaagccatagactctcttaggaaatctaaacgtcttcggaatagaaagtaaattggaatgtggttctagttccagaggaagacacagcttagtagcttaagcagttatgcatatcaggatactgtgagcaacatggtgtcccttaagcttctaggctttcagaacacaacttaaacttgaactcttatggttgggacattcttttcctgcttctcctgattgaactgatgcacagaatctttttactttgcaatagatttgtactaaccagacctgttctatcatgttttgaggagttaacttttttctgtgcagataatgttgaaagtaagttaatttgtttctgcatatatgcacatacatacgtaaggatcttaaacccagtcttgacagactagaagttaagtttaatacagaaaatgtcctgttcacttgaaagaaaagacctactttttaaatggacactatcttggttctttttttttta

SEQ ID NO: 133608 - DNA, 2397 bp, Homo sapiens
  Payload ID: 6111
  Gene Symbol: FBXO3
  Gene Name: F-box protein 3
  Uniprot ID: Q9UK99
  ENST ID: ENST00000265651
  CDS Start-End: 20-1435
ctgcaccgggccaggcaagatggcggccatggagaccgagacggcgccgctgaccctagagtcgctgcccaccgatcccctgctcctcatcttatcctttttggactatcgggatctaatcaactgttgttatgtcagtcgaagacttagccagctatcaagtcatgatccgctgtggagaagacattgcaaaaaatactggctgatatctgaggaagagaaaacacagaagaatcagtgttggaaatctctcttcatagatacttactctgatgtaggaagatacattgaccattatgctgctattaaaaaggcctgggatgatctcaagaaatatttggagcccaggtgtcctcggatggttttatctctgaaagagggtgctcgagaggaagacctcgatgctgtggaagcgcagattggctgcaagcttcctgacgattatcgatgttcataccgaattcacaatggacagaagttagtggttcctgggttattgggaagcatggcactgtctaatcactatcgttctgaagatttgttagacgtcgatacagctgccggaggattccagcagagacagggactgaaatactgtctccctttaactttttgcatacatactggtttgagtcagtacatagcagtggaagctgcagagggccgaaacaaaaatgaagttttctaccaatgtccagaccaaatggctcgaaatccagctgctattgacatgtttattataggtgctacttttactgactggtttacctcttatgtcaaaaatgttgtatcaggtggcttccccatcatcagagaccaaattttcagatatgttcacgatccagaatgtgtagcaacaactggggatattactgtgtcagtttccacatcgtttctgccagaacttagctctgtacatccaccccactatttcttcacataccgaatcaggattgaaatgtcaaaagatgcacttcctgagaaggcctgtcagttggacagtcgctattggagaataacaaatgctaagggtgacgtggaagaagttcaaggacctggagtagttggtgaatttccaatcatcagcccaggtcgggtatatgaatacacaagctgtaccacattctctacaacatcaggatacatggaaggatattataccttccattttctttactttaaagacaagatctttaatgttgccattccccgattccatatggcatgtccaacattcagggtgtctatagcccgattggaaatgggtcctgatgaatatgaagagatggaagaagaggaggaggaggaagaggaggaagacgaggatgatgattcagcagatatggatgaatcagatgaagatgatgaagaggagagacggaggagagtctttgatgttcccattcgcagacgccgctgctcacgccttttttagcaagccttctgctgatggaagcactaggatgattctaggctgttaaatagatttctcaataatgtaaataactaaattgttctctgcatatagcaggaaaactagcatgaaatattgtttcaggccctgggttctatgtgacactacattaggaattggattgtttgggtttgctttgtgtttttgaggtagaggaagaaatgggaatcttttttttctcttccaggagtcagtggaagaatagttctctagctaaggaatggacatacctttgttttaaaatattttatacttacaaaaatctagaaatggagagggaactgttttgaataaggatttaaaatacctgcacaaggatagagagaaactatgtgactcattctgtgaaaagacttcttgcagttgtgagttatttagaaatgatcaaaatttgtaattaggctaatccatttagtgattcctaatattttgtactcacagagaactaattgactaaacaacttgaacgctagtggtttgtccttagacaatctgtctttgaatttaaagtctttatcgctaagaccttgactttaaatttttcatcactacaaccttgaatttaatttcaggtcttcaacatgatgaccttggatttaatttaaagtcttcaacactatgcgctttatcatattattcacagatgcatttttgaaatgtagtatgtaaaagtatgtaacgtgctgtttattaacaaaagattgttcacaacatctcatgtagtttaaatttgtaaatactgcttctgttttgtttctcctttatacacttgactgtctttgtgataagtgacatgaattttatgttaggattaagtatgttttcctgaaacttggattttttttgtaattatataattgagagttaagaatgaaatccttcaagtgttaaaaactcacattttaaaagcaaattttggttcc

SEQ ID NO: 133609 - DNA, 1672 bp, Homo sapiens
  Payload ID: 6111
  Gene Symbol: FBXO3
  Gene Name: F-box protein 3
  Uniprot ID: Q9UK99
  ENST ID: ENST00000448981
  CDS Start-End: 47-1294
aggggcggggccagggcggggccagacctgcaccgggccaggcaagatggcggccatggagaccgagacggcgccgctgaccctagagtcgctgcccaccgatcccctgctcctcatcttatcctttttggactatcgggatctaatcaactgttgttatgtcagtcgaagacttagccagctatcaagtcatgatccgctgtggagaagacattgcaaaaaatactggctgatatctgaggaagagaaaacacagaagaatcagtgttggaaatctctcttcatagatacttactctgatgtaggaagatacattgaccattatgctgctattaaaaaggcctgggatgatctcaagaaatatttggagcccaggtgtcctcggatggttttatctctgaaagagggtgctcgagaggaagacctcgatgctgtggaagcgcagattggctgcaagcttcctgacgattatcgatgttcataccgaattcacaatggacagaagttagtggttcctgggttattgggaagcatggcactgtctaatcactatcgttctgaagatttgttagacgtcgatacagctgccggaggattccagcagagacagggactgaaatactgtctccctttaactttttgcatacatactggtttgagtcagtacatagcagtggaagctgcagagggccgaaacaaaaatgaagttttctaccaatgtccagaccaaatggctcgaaatccagctgctattgacatgtttattataggtgctacttttactgactggtttacctcttatgtcaaaaatgttgtatcaggtggcttccccatcatcagagaccaaattttcagatatgttcacgatccagaatgtgtagcaacaactggggatattactgtgtcagtttccacatcgtttctgccagaacttagctctgtacatccaccccactatttcttcacataccgaatcaggattgaaatgtcaaaagatgcacttcctgagaaggcctgtcagttggacagtcgctattggagaataacaaatgctaagggtgacgtggaagaagttcaaggacctggagtagttggtgaatttccaatcatcagcccaggtcgggtatatgaatacacaagctgtaccacattctctacaacatcaggatacatggaaggatattataccttccattttctttactttaaagacaagatctttaatgttgccattccccgattccatatggcatgtccaacattcagggtgtctatagcccgattggtaagttaaattttcctctagtgctgatttacatgactttgtagggttaacactgcagataagccaggcaaatagttagtttataaatagtgttccagagaaccctagagattttgagaaagtatcttgggggtcatgtgaatttgttgagagaaatggacaagtaaatgaggctccatagtctctaaccagagaatttctgctgttttaaagattcaacttgtttttcactgttcagtggcctaaatgtagattatgagaaataccacattagaccagtagaatcagctttaagactgggaaaacaacttcttacagtgtttttgctcaaacttccaatttaatgtcaaataaacaaatattccataaagatcattataaagaaaa

SEQ ID NO: 133610 - DNA, 584 bp, Homo sapiens
  Payload ID: 6111
  Gene Symbol: FBXO3
  Gene Name: F-box protein 3
  ENST ID: ENST00000529137
  CDS Start-End: 8-397
aggcaagatggcggccatggagaccgagacggcgccgctgaccctagagtcgctgcccaccgatcccctgctcctcatcttatcctttttggactatcgggatctaatcaactgttgttatgtcagtcgaagacttagccagctatcaagtcatgatccgctgtggagaagacattgcaaaaaatactggctgatatctgaggaagagaaaacacagaagaatcagtgttggaaatctctcttcatagatacttactctgatgtaggaagatacattgaccattatgctgctattaaaaaggcctgggatgatctcaagaaatatttggagcccaggtgtcctcggatggttttatctctgaaaggtgttggtatcaagatgatgctggccttataaaacgagtcgagaagtgttgcctctttttctgttccctggaagagtttatagggtgctcgagaggaagacctcgatgctgtggaagcgcagattggctgcaagcttcctgacgattatcgatgttcataccgaattcacaatggacagaagttagtggttcctgggttattgggaagcatggcactgt

SEQ ID NO: 133611 - DNA, 3217 bp, Homo sapiens
  Payload ID: 6111
  Gene Symbol: FBXO3
  Gene Name: F-box protein 3
  ENST ID: ENST00000534136
  CDS Start-End: 8-1300
aggcaagatggcggccatggagaccgagacggcgccgctgaccctagagtcgctgcccaccgatcccctgctcctcatcttatcctttttggactatcgggatctaatcaactgttgttatgtcagtcgaagacttagccagctatcaagtcatgatccgctgtggagaagacattgcaaaaaatactggctgatatctgaggaagagaaaacacagaagaatcagtgttggaaatctctcttcatagatacttactctgatgtaggaagatacattgaccattatgctgctattaaaaaggcctgggatgatctcaagaaatatttggagcccaggtgtcctcggatggttttatctctgaaagagggtgctcgagaggaagacctcgatgctgtggaagcgcagattggctgcaagcttcctgacgattatcgatgttcataccgaattcacaatggacagaagttagtggttcctgggttattgggaagcatggcactgtctaatcactatcgttctgaagatttgttagacgtcgatacagctgccggaggattccagcagagacagggactgaaatactgtctccctttaactttttgcatacatactggtttgagtcagtacatagcagtggaagctgcagagggccgaaacaaaaatgaagttttctaccaatgtccagaccaaatggctcgaaatccagctgctattgacatgtttattataggtgctacttttactgactggtttacctcttatgtcaaaaatgttgtatcaggtggcttccccatcatcagagaccaaattttcagatatgttcacgatccagaatgtgtagcaacaactggggatattactgtgtcagtttccacatcgtttctgccagaacttagctctgtacatccaccccactatttcttcacataccgaatcaggattgaaatgtcaaaagatgcacttcctgagaaggcctgtcagttggacagtcgctattggagaataacaaatgctaagggtgacgtggaagaagttcaaggacctggagtagttggtgaatttccaatcatcagcccaggtcgggtatatgaatacacaagctgtaccacattctctacaacatcaggatacatggaaggatattataccttccattttctttactttaaagacaagatctttaatgttgccattccccgattccatatggcatgtccaacattcagggtgtctatagcccgattgggttaccttatgacaagtgtaacagtaactccaaccttagagactataacatgattaaagaaagttatgaagctccagttatacaatggggataaaatatgaattatatacccagaatgcaattgagttgtaggtgttgaatctttggaaaatgccctctagcttctggaatgaccctgatggatgggtttaagtttggaaagatggacatgatattaatctgatccagagctgacacattttcaactccagtttgaaaagagaaggatgataatgagactttgggccattacctgtgtggcatatctagtgaaaagaatctacagtgtgcgtttggaagtgaagatttagatttcttcccagtggaggaatgccagaaactgtatttccagtactgggaatttgctgctttgcataacagaattccttttttgactggcccagtatctgtatgagtttggaataatcttttccctaaatgtttgatatgattcatcactgaagttatctggggctagagttctgtttgtgggaaaattttgaaatttgaatttaatttctttaatattcatattttctatttcttcttgtttcagttttggtaatttgtgcctttcaaggaatttgtccattccatctaaatgttgaatttattggtataaagttattgacagtattcccttgatatccttttaatggctacaaaagccatagtcacttgtcctcttttgttcttaatattgttaatttatatcttctcttttgttcattgctttagttaggggtttgtaatttttattgatcatttaaaggagcaacttttggttttactaattttctctatttgcttattttctatcgcattgatttctgcagttatctttatttctttccttctactttgagtttgcttttcttctagcttttttaaggtagaagtttatattagtaattttagaacttttctctctccaagcactgttttagctgcatttcacaagttttgatgtgttttcatgaacgcgtagttcaaaatagtgtcagatttcccttgtaatttaattttgatctatgacttttctagaaatgtgttaattttcaaacatttgggggagttttcagttatcttttggctatcgattttttaaatttattgtggttagagaatttgctctgtattttcaatcctaaatgttttatggcccaaaattatggtttatcttggtaaatgatccttgtatatttgaaaataatgtacattctgctattttggggaatattactctataaatgataggtcaaatcggttgacagtttttttcaagtcttctgtatacttgctgattttttttttttttggtctttgtcctatcaacaagtgagagatgattgttgaaatctccaaatataattatagttttttgtttctctttttagttctgtcaggtttgcttcatgtattttgaagctgtataattatatgcaaatatgctaaggattattatgtatttttaatgacataattctttcatcattatgaaatctccatctttatcgctgataatattccttgtcctaaagttcaaagagcattgaggtgtgttttggcaggcagttgagttactattgggtcgacttgatcctttggaatcttgtttgtttttaatgtttgttagggtgggtgtaaagttgtctttatttaaggacggtggttgtcaactttcagtctcatgaccccctgaaactctaaaaacttattgaggactccgaagaattcttgcttatgtggattgtattaatgcttaccatatcagaaattaaaactgagaaataagtaaaacaatatttacttattagttccttttcaaatgacaataataaacccatttcatgttcagctctctcttaactatgttctttcttattagttttcgtttccttctaaccacaaataaacatataaaatcttga

SEQ ID NO: 133612 - DNA, 7410 bp, Homo sapiens
  Payload ID: 6111
  Gene Symbol: FBXO3
  Gene Name: F-box protein 3
  Uniprot ID: Q9UK99
  ENST ID: ENST00000530401
  CDS Start-End: 22-1254
acctgcaccgggccaggcaagatggcggccatggagaccgagacggcgccgctgaccctagagtcgctgcccaccgatcccctgctcctcatcttatcctttttggactatcgggatctaatcaatcgaagacttagccagctatcaagtcatgatccgctgtggagaagacattgcaaaaaatactggctgatatctgaggaagagaaaacacagaagaatcagtgttggaaatctctcttcatagatacttactctgatgtaggaagatacattgaccattatgctgctattaaaaaggcctgggatgatctcaagaaatatttggagcccaggtgtcctcggatggttttatctctgaaagagggtgctcgagaggaagacctcgatgctgtggaagcgcagattggctgcaagcttcctgacgattatcgatgttcataccgaattcacaatggacagaagttagtggttcctgggttattgggaagcatggcactgtctaatcactatcgttctgaagatttgttagacgtcgatacagctgccggaggattccagcagagacagggactgaaatactgtctccctttaactttttgcatacatactggtttgagtcagtacatagcagtggaagctgcagagggccgaaacaaaaatgaagttttctaccaatgtccagaccaaatggctcgaaatccagctgctattgacatgtttattataggtgctacttttactgactggtttacctcttatgtcaaaaatgttgtatcaggtggcttccccatcatcagagaccaaattttcagatatgttcacgatccagaatgtgtagcaacaactggggatattactgtgtcagtttccacatcgtttctgccagaacttagctctgtacatccaccccactatttcttcacataccgaatcaggattgaaatgtcaaaagatgcacttcctgagaaggcctgtcagttggacagtcgctattggagaataacaaatgctaagggtgacgtggaagaagttcaaggacctggagtagttggtgaatttccaatcatcagcccaggtcgggtatatgaatacacaagctgtaccacattctctacaacatcaggatacatggaaggatattataccttccattttctttactttaaagacaagatctttaatgttgccattccccgattccatatggcatgtccaacattcagggtgtctatagcccgattggtaagttaaattttcctctagtgctgatttacatgactttgtagggttaacactgcagataagccaggcaaatagttagtttataaatagtgttccagagaaccctagagattttgagaaagtatcttgggggtcatgtgaatttgttgagagaaatggacaagtaaatgaggctccatagtctctaaccagagaatttctgctgttttaaagattcaacttgtttttcactgttcagtggcctaaatgtagattatgagaaataccacattagaccagtagaatcagctttaagactgggaaaacaacttcttacagtgtttttgctcaaacttccaatttaatgtcaaataaacaaatattccataaagatcattataaagaaaatttaatgtgtggatgtgtacttttggcagtctctctgggatcatttcttaagtcaactaggtatattttttaaaatctcgtttttagggttaccttatgacaagtgtaacagtaactccaaccttagagactataacatgattaaagaaagttatgaagctccagttatacaatggggataaaatatgaattatatacccagaatgcaattgagttgtaggtgttgaatctttggaaaatgccctctagcttctggaatgaccctgatggatgggtttaagtttggaaagatggacatgatattaatctgatccagagctgacacattttcaactccagtttgaaaagagaaggatgataatgagactttgggccattacctgtgtggcatatctagtgaaaagaatctacagtgtgcgtttggaagtgaagatttagatttcttcccagtggaggaatgccagaaactgtatttccagtactgggaatttgctgctttgcataacagaattccttttttgactggcccagtatctgtatgagtttggaataatcttttccctaaatgtttgatatgattcatcactgaagttatctggggctagagttctgtttgtgggaaaattttgaaatttgaatttaatttctttaatattcatattttctatttcttcttgtttcagttttggtaatttgtgcctttcaaggaatttgtccattccatctaaatgttgaatttattggtataaagttattgacagtattcccttgatatccttttaatggctacaaaagccatagtcacttgtcctcttttgttcttaatattgttaatttatatcttctcttttgttcattgctttagttaggggtttgtaatttttattgatcatttaaaggagcaacttttggttttactaattttctctatttgcttattttctatcgcattgatttctgcagttatctttatttctttccttctactttgagtttgcttttcttctagcttttttaaggtagaagtttatattagtaattttagaacttttctctctccaagcactgttttagctgcatttcacaagttttgatgtgttttcatgaacgcgtagttcaaaatagtgtcagatttcccttgtaatttaattttgatctatgacttttctagaaatgtgttaattttcaaacatttgggggagttttcagttatcttttggctatcgattttttaaatttattgtggttagagaatttgctctgtattttcaatcctaaatgttttatggcccaaaattatggtttatcttggtaaatgatccttgtatatttgaaaataatgtacattctgctattttggggaatattactctataaatgataggtcaaatcggttgacagtttttttcaagtcttctgtatacttgctgattttttttttttttggtctttgtcctatcaacaagtgagagatgattgttgaaatctccaaatataattatagttttttgtttctctttttagttctgtcaggtttgcttcatgtattttgaagctgtataattatatgcaaatatgctaaggattattatgtatttttaatgacataattctttcatcattatgaaatctccatctttatcgctgataatattccttgtcctaaagttcaaagagcattgaggtgtgttttggcaggcagttgagttactattgggtcgacttgatcctttggaatcttgtttgtttttaatgtttgttagggtgggtgtaaagttgtctttatttaaggacggtggttgtcaactttcagtctcatgaccccctgaaactctaaaaacttattgaggactccgaagaattcttgcttatgtggattgtattaatgcttaccatatcagaaattaaaactgagaaataagtaaaacaatatttacttattagttccttttcaaatgacaataataaacccatttcatgttcagctctctcttaactatgttctttcttattagttttcgtttccttctaaccacaaataaacatataaaatcttgacctgccttgtggaaaatgttttctctcaaggatgagaaataaaatgagaattctggacttacttcttatcaacattaaaaaagccatgggggttgtatttgttgacctttcctgtttgtatattagttttctgatatggagaattgttctgctttttcgtcctctaccagtctgattaattcgtaggcttaacacttcctttttctttctccttggaatgcctcttgggatatgcattagttggtcttatgtcttttcttggtctaggtggtgtgtgtgtttggcttgtttggggcacttttagaggctccagctgcacatttccactcctctctgtgtgttcctctctgcatctgctgtttgtgtgtgtacactttttttctgagcaatctttctccttagccacattgagttctttaacagtttttctgttttcttcttcattaagataattaataatcatactactcacatatcatgttttagaacttcctaagcctttccctttcccaccttttggacctcctaactgaatttcaaagtcttcattccttagattaaaaaaataaatccaaagataaaagaatgtaatgtcttataagtcgtatcagtgtatattttctctgttattgttgttagtgttataataaatcctaagtgacacaattcctttctcctacattaattcatttgcttgtacaacaactatttattgagcactgtgattaacaatataatcaaattccctgccttggaatttacattccaattcaaagagacaaactgtaacaataaacactatgtccttatattaagtagtaataagtgctgtggagaaacagcagagtaaaggggataaagaacgtattgttaggttgttctaatataaagatgtgtcaggagaggccttggtgacatttaagctgaaacgtgaaaggagcagagggaattaggtggatatgtgggagacgagaggtcgaagcaaaggagcagcacgtgtggaggttccgaaacagtaatgtgcttggtgtgcttgacccaaggaggccagtgtagctggagtgcagtgaacaacagggagaggggctggagattagatcagagtgttaatggggtggtggatcacgtaacaccataaaagccttggtggaaggactctggctgacatcacgccccaagttgccccatactttccagaataccaagtaggtccttgctgttcagaattctgttcaatgtagcagcccctcccattgcgtcttcaaatgtgtgagagagaacattgacagcagagtaagtcatggcttgattacagacattgcatgggcagaattgacatttccaagagatattcagatgcatgttcaacatcactactgtcctaatctgagagcctccaacaaggtaattttaaaatagaggctgtcatttccttccagtgtgggttgatcttagatatatacttataacgaatcggcaaagtgacactgtgatttctgagttagaaaaaggtaatattccttcagcctagggttctgtctttctctcctgggacatgtgtctttgacaccctgagccaccatgtaagaagtccagctaccatgaagccgtcatgcagaagagaccatgtagagacatcacacagagatagagggaggcacccaggagccccagctgtttcagactccagatatttggatcatcctgcgcgggtaccagacatgtgaatgaagaagctcgtgagatgactgcagttccagctaccatcggactgcaacatcacgggacaccccaacccagaaccaccccactgaatacttcccaaacaccaacccacatgaaccatgagagataataatgactgttgctgtttcaagccactaaaaaaataaaaatatttttttaaaaagtagaggctactgatggttgaattgaaatgatgtgtctttatggtaggagctcaataaaaatcttagatctcttgttgacagtgcataaaagttaccagtagaggtcatacttgattaatattttcatatcctcttttctgtaagtatatagcttaataattattattcagtatatgaatataagctcagtaaaactgtatcttggattgttacaagtggtctgtttgctaccttctgtgaattaccaactactgtgtaaaaaataagtactggcttagtgaaatatttaccattaaaaccatactgagctgggctgggtcgcatgcacctgtagtcccagctactcgggaggatgaggtgggagaactgcttgagcccaggagtttgaggctagcctaggcaacacagcaagaactcgtctctaagaaaaaataataatttttttaaaaagaagatcttccattaaacaacaacaaaaaaatcacactgagcattatttaacacaagatatagaatccactccagaatcttgcatcagcatgtgtgttgtgagaatccactgttcaagtctatggaaattcatatttggcgtgtctggttgtttgaattctagataaatgagaatttacatgaaataactaaaaaactgatagatgctcttcttatcaaaagattgttttctctttcaaggaaatgggtcctgatgaatatgaagagatggaagaagaggaggaggaggaagaggaggaagacgaggatgatgattcagcagatatggatgaatcagatgaagatgatgaagaggagagacggaggagagtctttgatgttcccattcgcagacgccgctgctcacgccttttttagcaagccttctgctgatggaagcactaggatgattctaggctgttaaatagatttctcaataatgtaaataactaaattgttctctgcatatagcaggaaaactagcatgaaatattgtttcaggccctgggttctatgtgacactacattaggaattggattgtttgggtttgctttgtgtttttgaggtagaggaagaaatgggaatcttttttttctcttccaggagtcagtggaagaatagttctctagctaaggaatggacatacctttgttttaaaatattttatacttacaaaaatctagaaatggagagggaactgttttgaataaggatttaaaatacctgcacaaggatagagagaaactatgtgactcattctgtgaaaagacttcttgcagttgtgagttatttagaaatgatcaaaatttgtaattaggctaatccatttagtgattcctaatattttgtactcacagagaactaattgactaaacaacttgaacgctagtggtttgtccttagacaatctgtctttgaatttaaagtctttatcgctaagaccttgactttaaatttttcatcactacaaccttgaatttaatttcaggtcttcaacatgatgaccttggatttaatttaaagtcttcaacactatgcgctttatcatattattcacagatgcatttttgaaatgtagtatgtaaaagtatgtaacgtgctgtttattaacaaaagattgttcacaacatctcatgtagtttaaatttgtaaatactgcttctgttttgtttctcctttatacacttgactgtctttgtgataagtgacatgaattttatgttaggattaagtatgttttcctgaaacttggattttttttgtaattatataattgagagttaagaatgaaatccttcaagtgttaaaaactcacatttt

SEQ ID NO: 133613 - DNA, 918 bp, Homo sapiens
  Payload ID: 6111
  Gene Symbol: FBXO3
  Gene Name: F-box protein 3
  ENST ID: ENST00000532057
  CDS Start-End: 273-749
agctgctgcccagcctctgtgagttccttactcttagtttggtgctcgtctgacatggtgctacttttactgactggtttacctcttatgtcaaaaatgttgtatcaggtggcttccccatcatcagagaccaaattttcagatatgttcacgatccagaatgtgtagcaacaactggggatattactgtgtcagtttccacatcgtttctgccagaacttagctctgtacatccaccccactatttcttcacataccgaatcaggattgaaatgtcaaaagatgcacttcctgagaaggcctgtcagttggacagtcgctattggagaataacaaatgctaagggtgacgtggaagaagttcaaggacctggagtagttggtgaatttccaatcatcagcccaggtcgggtatatgaatacacaagctgtaccacattctctacaacatcaggatacatggaaggatattataccttccattttctttactttaaagacaagatctttaatgttgccattccccgattccatatggcatgtccaacattcagggtgtctatagcccgattggaaatgggtcctgatgaatatgaagagatggaagaagaggaggaggaggaagaggaggaagacgaggatgatgattcagcagatatggatgaatcagatgaagatgatgaagaggagagacggaggagagtctttgatgttcccattcgcagacgccgctgctcacgccttttttagcaagccttctgctgatggaagcactaggatgattctaggctgttaaatagatttctcaataatgtaaataactaaattgttctctgcatatagcaggaaaactagcatgaaatattgtttcaggccctgggttctatgtgacactacattaggaattggattgtttggg

SEQ ID NO: 133614 - DNA, 945 bp, Homo sapiens
  Payload ID: 6111
  Gene Symbol: FBXO3
  Gene Name: F-box protein 3
  ENST ID: ENST00000532927
  CDS Start-End: 24-542
agacctgcaccgggccaggcaagatggcggccatggagaccgagacggcgccgctgaccctagagtcgctgcccaccgatcccctgctcctcatcttatcctttttggactatcgggatctaatcaactgttgttatgtcagtcgaagacttagccagctatcaagtcatgatccgctgtggagaagacattgcaaaaaatactggctgatatctgaggaagagaaaacacagaagaatcagtgttggaaatctctcttcatagatacttactctgatgtaggaagatacattgaccattatgctgctattaaaaaggcctgggatgatctcaagaaatatttggagcccaggtgtcctcggatggttttatctctgaaagagggtgctcgagaggaagacctcgatgctgtggaagcgcagattggctgcaagcttcctgacgattatcgatgttcataccgaattcacaatggacagaagttagtggttcctgggaccaaatggctcgaaatccagctgctattgacatgtttattataggtgctacttttactgactggtttacctcttatgtcaaaaatgttgtatcaggtggcttccccatcatcagagaccaaattttcagatatgttcacgatccagaatgtgtagcaacaactggggatattactgtgtcagtttccacatcgtttctgccagaacttagctctgtacatccaccccactatttcttcacataccgaatcaggattgaaatgtcaaaagatgcacttcctgagaaggcctgtcagttggacagtcgctattggagaataacaaatgctaagggtgacgtggaagaagttcaaggacctggagtagttggtgaatttccaatcatcagcccaggtcgggtatatgaatacacaagctgtaccacattctctacaacatcaggatacat

SEQ ID NO: 133615 - DNA, 1448 bp, Homo sapiens
  Payload ID: 6111
  Gene Symbol: FBXO3
  Gene Name: F-box protein 3
  ENST ID: ENST00000531080
  CDS Start-End: 506-982
aagctgctgcccagcctctgtgagttccttactcttagtttggtgctcgtctgacatggtatgtagaacctcaccactccagcagagtactaaggtgtaataatactatgccagtagctgggatttctcttaaaatgggagagcaaagcaaaagattgagagacactgagaagagatgaggtgagaagttaatgcagggaggaaggatgaaaaaggagcttcctttcagctgccttgataaagctccagaaccatcagagagaccccaacacatgggcttactttaaaaggtgctacttttactgactggtttacctcttatgtcaaaaatgttgtatcaggtggcttccccatcatcagagaccaaattttcagatatgttcacgatccagaatgtgtagcaacaactggggatattactgtgtcagtttccacatcgtttctgccagaacttagctctgtacatccaccccactatttcttcacataccgaatcaggattgaaatgtcaaaagatgcacttcctgagaaggcctgtcagttggacagtcgctattggagaataacaaatgctaagggtgacgtggaagaagttcaaggacctggagtagttggtgaatttccaatcatcagcccaggtcgggtatatgaatacacaagctgtaccacattctctacaacatcaggatacatggaaggatattataccttccattttctttactttaaagacaagatctttaatgttgccattccccgattccatatggcatgtccaacattcagggtgtctatagcccgattggaaatgggtcctgatgaatatgaagagatggaagaagaggaggaggaggaagaggaggaagacgaggatgatgattcagcagatatggatgaatcagatgaagatgatgaagaggagagacggaggagagtctttgatgttcccattcgcagacgccgctgctcacgccttttttagcaagccttctgctgatggaagcactaggatgattctaggctgttaaatagatttctcaataatgtaaataactaaattgttctctgcatatagcaggaaaactagcatgaaatattgtttcaggccctgggttctatgtgacactacattaggaattggattgtttgggtttgctttgtgtttttgaggtagaggaagaaatgggaatcttttttttctcttccaggagtcagtggaagaatagttctctagctaaggaatggacatacctttgttttaaaatattttatacttacaaaaatctagaaatggagagggaactgttttgaataaggatttaaaatacctgcacaaggatagagagaaactatgtgactcattctgtgaaaagacttcttgcagttgtgagttatttagaaatgatcaaaatttgtaattaggctaatccatttagtgattcctaata

SEQ ID NO: 133616 - DNA, 5798 bp, Homo sapiens
  Payload ID: 6111
  Gene Symbol: FBXO3
  Gene Name: F-box protein 3
  ENST ID: ENST00000526785
  CDS Start-End: 3753-4829
ggcggtgaggcagggggaaagggggtcggggccgctgacaggacccgagcttccgcgacaccagaaggtgacgccagggccgccctcatcctgcggagccaccggggaccggggcgagacgggggcggaaagggcctcgccctgagtcttcctcctgtcctgggcccaggtatgagaagcgacgagatatctctctcccaggcctcggtgaggcccacttgcaagagaaggaggtagtggccctcgtgccgcaccgccgcgctccgcggacccccgctggccccgcaggtgcccgcccggttggggtcagtccctgctgctgtgtaaaagcccctgtcccggccaggcgctcttctctgctgggtccggggcctgcggagtctggcgccggggtgggcaggtgggtgagcgagaggagaagataggcaaccccttactcccctggcgcgacttccccagcgccagaatcgctgtccgggctcactttcggacttcagtgcgtgagaattgttttgctgtcagcattgctccttacggttcgatgttggattttatgttttggtactgacttccggtgatgccataccggtgactatcttttctcctggacaccttgggtttcccacattactagcatctgttccagaaataaacaccggttgctgataagggtggttcaatgcccagtttcttcagaacttgggactgtctggggtggtggaagaaatggcgctgccagcccgccccccagctgtcaggattgtttacacccttgacagggggtggcatggctgtgagtttcctgtgctaccgtatatatttgcagaggatgcaaagtcgccctcttaggataggtgggcgagatttgttttgtgtttggattaaccattagattctagccatttgatgattgtgccctgtgttattagaggtctttttataaatacagatttcttggagctacagatagttgttggcctagctaagtggtgatagagagatacctcaagtttttggtcactacctgtactggtcgctacctgtacctgctagcaattttatttttctagaaaatacttacaatttaactaacagtctccaacttttgattgctgccagagtaatctttccaagacacatctggttgtcattctccttaaaacctgtgacacccctatgtttatagactataacctaaacttctggggcattgaaagctcttatcatctggcttgtatatctaaggtcctccaggacttatttctccaccactatcacatttgcaccatccattctaaccaaatcagacctctgccagcatacaacacacttgcactttctttttttttttttttcctgtggctcaagctctcgaccttgcctggaatgccttgcctacctcttctcaacttggcaaggtggagaagatgccctctctaccttcttcctgcagaattgatttgccatgtcaggtagatggcgtgcttcttgattgtaagggctgccttgcttatcttcctattcaaagatttttttttccccgagggcttgctatgtgccagtctgttaagtgttgagggtacagtagtgaacaacgcagataaggcaactcttatggagcttacagtccagtgggcaagcgcataattgcaagaggtactaagtgctgtgaaggaaatagattgctctgttaaggaataggaagtgagaagtgatcaaatcggaaggagctgccatatatgaagcagggcatatgcagttctggcagagggaaaagtatgttcagagattgacgggactgctgaacggtactgttcaacagcatggcctggtggaagatacagaaggctggcgttgctggaggtagggagtgactcacagacagtgatgagatgagggtggtgagatcatgcaggaccttgggaaccaaggtgaggaagtaagagtttactttaaatgctttaggtagtaatcacaattttaaacagaagtgacatgatccctctgtaaatgtctgtggaaataaattgagttgaataccatttgaattttatctacagaaaagtatccagtgtattgcagcttttttcctgcaccatacagcccaattttgtcaagggtctagtctagtgataagctctgaagtttttggtattatttgctgaactggattgggttggattggattagtacactggaatcatgtagcatcagttgcctagtttgaattgagatgatctgataccctctccatttcagagtgatttattctgaaatggagtgaataaatgccacactgtgcgtcagaatgacctgtgcatcagaatggcctgtggcactttttaaacatacagatgcctgaggtacagatctcagtccaaaccgactggatcagaatctctagaacagtagttttcactctcgatgtgcattgaattcatctttcatgcatattccagattcttttatgtcatttagctcctagggcagtggagggacaggaatcaagaagagggtatggaaactgaatgcacaaaactggagggattcctatgtttacaaaagttaatttgggcatctcctgagcttggcagaaaaggatgaggatgatgtttctgtaaaatctgaaaatcaaacaaaggcaattttgtttactatagatggtttttaacacaccttagtcatggccttgacaaacctgatgtgatttaagattctgttgatagctattgcccaagtgagatctttgaatacctactttcaattaatataacttgtaatttctctctggaaaggatagagtcctaatcttaggttcattctttttacaaattaattatgtagggtagaatttacaggattgcaacactgttgtgttagaaatctttatatagtaagaaagttatttgcttctaacattcgatgttttggggcagctgatagcttgtgtagccatgactattgagtcagaactgttacgattcaggcaccctctataggtggactttccagtagttgctttaatgaaaacgtggtttttgtggcaatacttttttcctttaagtaaaaaattttaaaaaacaaaaataaaaagtctgtgtatttagtagcatacatcttacagatcttgggaaaaaaccccaagtccctttgtttatgactaaataactttcttcctatatgtagaaatgagtattgtcctgataataagcataggacaactccttgacttgagattaactccaatggcatatatggtctgtagatatttttgtgaaaaattacagttgtagatgtttcagggtttatttgtgaactcagtttcactactaacaaggcaattatactacttaacatgttaaacaggttttagaaaatagttttgtaattataagggtaataagtgaaaagtaagagaaacaaaaggcataaaacaaaacaatgaatattttaatctttatttttaaattgttttcttacttttttaaatactatcggtgaatctggttactgccagctgttgttatgtcagtcgaagacttagccagctatcaagtcatgatccgctgtggagaagacattgcaaaaaatactggctgatatctgaggaagagaaaacacagaagaatcagtgttggaaatctctcttcatagatacttactctgatgtaggaagatacattgaccattatgctgctattaaaaaggcctgggatgatctcaagaaatatttggagcccaggtgtcctcggatggttttatctctgaaagagggtgctcgagaggaagacctcgatgctgtggaagcgcagattggctgcaagcttcctgacgattatcgatgttcataccgaattcacaatggacagaagttagtggttcctgggttattgggaagcatggcactgtctaatcactatcgttctgaagatttgttagacgtcgatacagctgccggaggattccagcagagacagggactgaaatactgtctccctttaactttttgcatacatactggtttgagtcagtacatagcagtggaagctgcagagggccgaaacaaaaatgaagttttctaccaatgtccagaccaaatggctcgaaatccagctgctattgacatgtttattataggtgctacttttactgactggtttacctcttatgtcaaaaatgttgtatcaggtggcttccccatcatcagagaccaaattttcagatatgttcacgatccagaatgtgtagcaacaactggggatattactgtgtcagtttccacatcgtttctgccagaacttagctctgtacatccaccccactatttcttcacataccgaatcaggattgaaatgtcaaaagatgcacttcctgagaaggcctgtcagttggacagtcgctattggagaataacaaatgctaagggtgacgtggaagaagttcaaggacctggagtagttggtgaatttccaatcatcagcccaggtcgggtatatgaatacacaagctgtaccacattctctacaacatcaggatacatggaaggatattataccttccattttctttactttaaagacaagatctttaatgttgccattccccgattccatatggcatgtccaacattcagggtgtctatagcccgattggaaatgggtcctgatgaatatgaagagatggaagaagaggaggaggaggaagaggaggaagacgaggatgatgattcagcagatatggatgaatcagatgaagatgatgaagaggagagacggaggagagtctttgatgttcccattcgcagacgccgctgctcacgccttttttagcaagccttctgctgatggaagcactaggatgattctaggctgttaaatagatttctcaataatgtaaataactaaattgttctctgcatatagcaggaaaactagcatgaaatattgtttcaggccctgggttctatgtgacactacattaggaattggattgtttgggtttgctttgtgtttttgaggtagaggaagaaatgggaatcttttttttctcttccaggagtcagtggaagaatagttctctagctaaggaatggacatacctttgttttaaaatattttatacttacaaaaatctagaaatggagagggaactgttttgaataaggatttaaaatacctgcacaaggatagagagaaactatgtgactcattctgtgaaaagacttcttgcagttgtgagttatttagaaatgatcaaaatttgtaattaggctaatccatttagtgattcctaatattttgtactcacagagaactaattgactaaacaacttgaacgctagtggtttgtccttagacaatctgtctttgaatttaaagtctttatcgctaagaccttgactttaaatttttcatcactacaaccttgaatttaatttcaggtcttcaacatgatgaccttggatttaatttaaagtcttcaacactatgcgctttatcatattattcacagatgcatttttgaaatgtagtatgtaaaagtatgtaacgtgctgtttattaacaaaagattgttcacaacatctcatgtagtttaaatttgtaaatactgcttctgttttgtttctcctttatacacttgactgtctttgtgataagtgacatgaattttatgttaggattaagtatgttttcctgaaacttggattttttttgtaattatataattgagagttaagaatgaaatccttcaagtgttaaaaactcacattttaaaagcaaattttggttccaattctg

SEQ ID NO: 133617 - DNA, 9009 bp, Homo sapiens
  Payload ID: 6112
  Gene Symbol: FBXO30
  Gene Name: F-box protein 30
  Uniprot ID: Q8TB52
  ENST ID: ENST00000237281
  CDS Start-End: 168-2405
gaaaaggcggcggcccggctggggaagaggggcggaggaggcggttcggacggctgtgtggggtacggagcgtcgccgggacagagcggagcagctgggcacggcgtccagggcagctagggcctgggccgcggttcggccgcgccggccgagctggactggccattatggaggaggagctgcagcattcccattgtgtgaattgtgtcagtagacggtgcatgaccaggccagagccagggatttcctgtgatttgattggttgtccattggtttgtggtgcagttttccattcttgtaaagctgatgagcatcgacttttatgtccatttgaacgagtgccttgcttaaatagtgactttggatgtccatttaccatggcccgaaataaagttgctgaacatctagaaatgtgtcctgcaagtgtggtgtgctgtactatggaatggaatcgatggccagttagttatgcagaccggaaatcatatgaaaatctaagcagagatgtcgatgaagtggcacaattggatatggccttggctcttcaagaccaaaggatgctcttagaatccctcaaagtagccaccatgatgtcaaaagcaactgataaagtatccaaacctagagaacaaatctcagttaaatcaagtgtcccagaaataccacatgctaatggtttagtgtctgttgatgaagaatcttatggtgcactttatcaagctactgtagaaacaaccagaagtttggctgctgctttggatatcctgaatactgctacaagagacattggcatgttaaatacaagtgtcccaaatgacatggatgaacagcaaaatgcgagagaaagcttagaggatcaaaacttgaaagaccaagatcatctttatgaggaggaaataggagcagtaggtggaattgactacaatgacacaaatcagaatgcccagtctgaacaaaatggttcaagtgatttattatgtgacttgaatacaagttcttatgacacttctgctctttgtaatggctttcctttggaaaatatatgtacccaggtcatagaccagaatcagaatttacatggtgattcaaaacaaagtaacttaacaaatggagactgtgtggcatcatcagatggcacttcaaaaccttccagctcacttgcggtggcagcacaacttagggaaataataccatccagtgctttgcctaatggcacagttcagcatatcctcatgccagatgatgaaggtgaaggtgaattgtgttggaaaaaagtagacttaggggacgtgaagaatgtggatgtcttatctttcagtcatgctccttcattcaattttctttctaattcatgttggtctaaaccaaaggaagataaagcagtagatacatcagatttggaagttgcagaagatcctatgggcctccaaggaatagatctgatcacagcagcattgcttttttgtctaggagattctccaggagggaggggtatatctgatagccgcatggctgatatttatcacattgacgttgggactcagactttttcacttccatctgcaatattagctacaagtacaatggttggggagatagcttcagcttcagcttgtgatcatgccaatccacagctttcaaatccaagtccgtttcagacacttgggctggatttagtattggaatgtgtcgctaggtaccaacccaagcagcgttcaatgtttacctttgtgtgtggacagttatttagaaggaaagaattttcttcccactttaagaatgtgcatggtgacattcatgctggactcaatggctggatggaacagaggtgccctttagcttactatggttgtacctattctcagcgtagattttgtccatcaatacaaggagcaaagattatacatgaccgccatttgaggtcatttggagttcagccatgtgtatctacagtattagtggagcctgctagaaactgtgtgttgggattacataatgaccatctaagtagtcttccttttgaggtcctgcagcatattgcaggctttctcgatggcttcagcttatgtcagctctcatgtgtatccaagttaatgagggatgtgtgtggcagcctgcttcagtctcgtggcatggtcatactgcagtgggggaaaaggaagtatccagaaggaaattcatcatggcagataaaagaaaaggtatggcgatttagtactgcattttgttctgttaatgaatggaaatttgctgacatcctaagcatggcagaccacttgaagaaatgcagttacaatgttgtcgagaaacgggaggaagcaatccctttgccatgtatgtgtgtgacacgagaactcactaaagaaggacgttcactacgctcagttttaaaacctgtactttaaaagttgtaatattactagcacatatatgcaagcacctagtataatttctttgtaatatgtgaaactttattaatgtattaaatattacaactagctaaatttattgtcactgtgtatataatgttttgaagtgacatctatttttataaagtactgtttagttggaaaaagttgccttaatgtttgaaatgtgtgaaatttttggaacttgctggacagggtgatttaatttttagctacataattttaagaattagtattttcagtggtgtgcatattttggttcttaaatttttgcttcttaaactaaaaaaatcctgaccaatttatttgttgttttctgtgggttgcgacccatgcaatcaaaaagcaaaattttgattgagattttttacagcataggtttttcatataaaaatattctgaatttgttaagcactgccataatatcattataatgtttttgtcttttagtgcttccctatacaattgttaatgcacaaatgatctctaatatatacttacatacgtaaaatcataaagtttggtaatgcagtttatcgttttaaaaataatccacaaagatgtttttatctcacatacttacaactcaacacacagagtgaccatgtgcagctttcttttttgttagatgccacatccgaagactcatcgcagtgtgttatatgacaggacaaagcaaaaacaaacaaaaagcaagcctgtgaatataatttaatttgaaactgctcctggtattatatatttgctagttatctaatgttttaaaagaaaatatacctcatttaggtttgaattgggcgtattgtgtaaatttcaaatattcagaatgcaaagggcttgactattaaatgtttgcctttgatgtttataaacattacaactatgttgttttaagacatttaaaaacgtgaaatttgttatctttgtaaaatgacaatcatgtagaaacctgtcttggttgacaatctctttgaaacatttccgagttaatttcccataggcttcaccaccaagaaagtaagaattgcatctttacataatgatcaaggtataatggaaaaatatacctattcttgaagtagtttattatagttttcaaattgatttataccattattaacctgatgtggtctgcttaaaaaatgaatatatcagtatttagaaataaattgcaaaggtgggaatatatacttaaataatttgtcttaagtaaattagcatttggtagtctgaaatggtgacagattacttgttaaaattgtgaaaactctgttgtgtcctctcttcctacatttgtccctgagagtactccacgattactaggttcttgattcccttatatggcaatcaggcagaggcgttccttaagcattagagagttctgaagcttaagatttgttttggttggatgaagtccttagtacagttgaaaaacagagcattaaagactaatcaattgttttgcctcaccagtcattttaaatagtagaatacttatttctcagtgcttaaaatttctttttcaactgtgagattgaataaacagtctctatttctgtggaaaaaacaacagaaaagagatattaaataccataaaatgtaactctgccttttaaagttttgctgaagaatgtgtctgtggttaggatagcacaagcattaacttttgttttatagttatgctttttaaaattcattgtttttaaatttagacttcttatttccacactggattatgagatacttaacaatttttccaccttatatttcttttacacattttgctgttctcttttttgttattgttatgccaccataccattttgttaaaatgttttctttgtgaaacatttgttcaagttctaataaaattaatgttttcccttaacatggctcaataacttaaaaacgttcatttaaataaaattttaatacttgtttgacaaattccaacacaatcatattgtttctgtaatgtggattttctgcatgttatggtagttgttgattatcatcattactcacccatgttttactagtgaaccttaatttttttaaaatttgagacacgcattagttagctttctctgatccttcagtgtctcgaaagtaataccacctaggtgcactgaaaggcggaagagtttctagcatggttatagctctaaaagttgtcatggaaaccatctctctctcctcttaagtatgaaaaggtttttatgttggcctaatagattgtactttgagaagtcatcattgattccttagtctttgctaaatagcaaggtaaaaggcaagcatcgggatggagggaagtatttgaattcacttttgtcctctgcctccttcctcaatactgcctgttagcttaatctttctccctctccctttcccttctccctctctcactcttttttctagattttgagactcacagatcttacagcagtggttcctaaagtgtggtccttggaccagcaggaacatcaacacctaggaatttgttagaaatgcagattattaggcttctctccagacttagtgaatcaggaactctggggtgggacccaacaatctgttttaacaagatctctaggtgattctaacgcacagtaaagtattagaacttagagggaagactgggtcatgccagctaccctctggtgcattactggagtggatatatgtgtgtacctgtgtgtgtttgtataaatatatgtgtaatccaaaagtcagtaatggtaatttattaatggttaaactatatatgttgtctcaattttacagccatatgacaaaatacactgggtactgtagttgttggacttgtattctttaaattagtatttactagtatttaaaattttactaaaattttactagtgtttcttctgttcaaggtaaattgcagtgcaaattttagttcattagcagtaacatttagcctagtcatctcattctcttgtttagtggttgtagagtcgtgaacatattcaaattgtagggtaatcaaagagtagaagtagacaaatattggattaaatcctacaaaaaatatttttagggatcttttcaaccctatcaataagatgttatgaaagattggatctcttgtttacaagtagtatagaatcttttttgatctttgactctgtgctgcctatctcatcaatgttgttgctattaatatctgtcctttaacactggatgttgggatcttagtaatgttgctgataataggattttcagcaaaacttccatatcccttgaagatatggtagtttatattactatatcgataacagttttgcctgtggagatttgactagttttaggtgtttggaagcaaaacagatttcttcatgttttgcatcccaacctgaaaagacatggggtttattaattttaaaatttcctaaggaaaagttattcaaatattttaaaatgtgtttgtttcatgcatgacatgccacattggtgatgtgattggagcttgcagagttggttgtttagaagtgcagtagagagaaagcaattggccctcattctctggacagacttttgatggaaagaatttctctgataggtgtttgactggttatctaaacgttgctgttaagtagtcttacttaagatgctcataaggtctaggaagcagagaatattagttatacctttatcaactcatcagtgacttgtttgatggtgtttaagataatttaataatggggtttgacaggatttgtctgatttccaaaaaagcaaagttcgaattcagaaaagatcaactctaatgaagtcctttctaaataagggaaaaggaaagatggtttgcttttgaagtcatcttttacataattatttccctttatttaaaagattaaagtgagatcaagagataaaacctttcaaatttgaattttatggatgagaaaataggtactcaaaatttaggcagtgattagtgtactgggatatttgagagagaattatgtccttacatagatcactttttcactttacgaatgcaggaagaaaagagatgtttagatgtaaggaaatttggaaaatgttgcctaggatatttgattcctactgctttggaaagcattttggagcaataccaaaaggaaactaactaaccaagtgtgatatgttgctctgaaaatctttgcgaaatgagggcctcttgctgaattttacaagtaggttattgcatctatgattaaacttttttaaataaattgcttatacatgtttatttgacatatataatcttcataattggccagtacaccttgagatgtattaatggcgatacatcttgaggtgctttgttaccttagcacatttcaaaactggcattttgtattcagattgttttatatttcaatgtattatgtggagagtgacttttcattaataaactacaaagaaatgggttataaggaatattcatgaacatgctctatagaaatataataaaaattcattgatgcaaagtccttttttaaaaataattttcaatctttttgataagctggacggaagcatctgtcttttactatgaagaaaacatttttgaagtgaactgacaacataaggcaaatactgggtaaaaatttaagcatctccaaaatcattttattaacccatttgcatgcaaatactagggaatggttcttcaatatgtagctagttcttgtggtggttaatagttcttcgtgtatttgaaagtaacaaaactgcatttgtgttgaactcttaagaccaattaatcaggtcaaattgctcttaagaccaataaattaggtcagttgctcctaacaaaggcaaattcatcagatttaatttctacccttttctaatataaatttttagaaattttgtttctcagatgtgaggcaaataggttgatctatttgtttattctttgacagagagactgactagagttagacagctttttaataccccttccagtcaaaaagtaacattgttatattagtatttagtagttttaaagtctgatgacataagaacagtaacaatttgttaatattcaaaagattgaaattgaaaaaaaggggtcctgcattctgctgtcctagaatttttttttgtgttgaaatcttcttttccatattgtcattattgcttctttatcccatgacattaattttctggtgaggtgaccctgaatttagtcattttcgtcagtaattttagatttaagtaacttatcatgcttgttttaaagtctctctcagctcacccgtgaagaaacaaattttttttcatttttttcttcaaaaatcagcaagtattgctgaatctaacaagtatcagcattcaggtttaaccgtgttatttgattgaaataaatcaaaccatggaaataatgggcactgtgtctgctcaagagtaaaattacccaatgaatgattatgtcaactggatgtcttttatatcaattgatgactttttaaaaaatctgtattttaaataaaatatggagagaacagtattggtccctacaacattccaatagctttgtcatgacagccatgtcatatgaaataacttactctgaatggctaataattcagtggagatgaattctaaagatttttatttgcacttaaaatgttaaagtagtattgttcatttgatcaatgtttgaatactactcagtattgaaaactttaactgcattctgaaaggtcattgcgccgattggcttacctaagatgtcatttagcttccttttctcatgatttacataaatgttgttaccttaaatgcagaaagatgtgatattctttggaggataaaaaacctaagtgaatgaagctagacacaaaaggctacatattatatgatttcatttatatgaaatatgcagaataggtaaattcatagagataaatcagattcatggttgctgggggaatgggagtgactgcttcatgggtatggggttttcttttggattgatgaaaatattgtagaacaagatagtggggatagttgcacattgtgaatgtgccaaaatgccagtgaattgtatactttaaaatggtgtatttgatgtgtattttattacaattaaaaagaaaagaatttgatatttgcaatcattaccaaagccaaaaactagtgttctcaacgtttgtgaaatgcccaaaccgtggtttagaattaatttatagcattagtaacatgacaaatctattcagcttaaagttctagtaaaatttgtgaatcccatcatagaagtactcctgacagcagcagaaataaagctgtaattcatcaaaatttccttatatttaaaacttctgtgactgagtgattgacttctgtgtcaatgtttattttttatcttttgaaatttattatgattccttgtggcacatcccaatcacgctttttaaagatgtgtttttaaaaccatgctttgaaaaaaatttgtataattttcaaggtttttttttatagttttatactttgtttcttttaaagaacaaatgcaacttgttgtattagagtaagactaaataaattgtactgatgtgta

SEQ ID NO: 133618 - DNA, 5934 bp, Homo sapiens
  Payload ID: 6113
  Gene Symbol: FBXO31
  Gene Name: F-box protein 31
  Uniprot ID: Q5XUX0
  ENST ID: ENST00000311635
  CDS Start-End: 14-1633
gtcactgggcggcatggcggtgtgtgctcgcctttgcggcgtgggcccgtcgcgcggatgtcggcgccgccagcagcgccggggcccggccgagacggcggcggccgacagcgagccggacacagaccccgaggaggagcgcatcgaggctagcgccggggtcgggggcggcttgtgcgcgggcccctcgccgccgcccccgcgctgctcgctgctggagctgccgcccgagctgctggtggagatcttcgcgtcgctgccgggcacggacctacccagcttggcccaggtctgcacgaagttccggcgcatcctccacaccgacaccatctggaggaggcgttgccgtgaggagtatggtgtttgcgaaaacttgcggaagctggagatcacaggcgtgtcttgtcgggacgtctatgcgaagctgcttcaccgatatagacacattttgggattgtggcagccagatatcgggccatacggaggactgctgaacgtggtggtggacggcctgttcatcatcgggtggatgtacctgcctccccatgacccccacgtcgatgaccctatgagattcaagcctctgttcaggatccacctgatggagaggaaggctgccacagtggagtgcatgtacggccacaaagggccccaccacggccacatccagattgtgaagaaggatgagttctccaccaagtgcaaccagacggaccaccacaggatgtccggcgggaggcaggaggagtttcggacgtggctgagggaggaatgggggcgcacgctggaggacatcttccacgagcacatgcaggagctcatcctgatgaagttcatctacaccagtcagtacgacaactgcctgacctaccgccgcatctacctgccgcccagccgccccgacgacctcatcaagcctggcctcttcaaaggtacctatggcagccacggcctggagattgtgatgctcagcttccacggccggcgtgccaggggcaccaagatcacgggcgaccccaacatccccgctgggcagcagacagtggagatcgacctgaggcatcggatccagctgcccgacctcgagaaccagcgcaacttcaatgagctctcccgcatcgtcctggaggtgcgcgagagggtgcgccaggagcagcaggaaggcgggcacgaggcgggcgagggtcgtggccggcagggcccccgggagtcccagccaagccctgcccagcccagggcagaggcgcccagcaagggcccagatgggacacctggtgaggatggtggcgagcctggggatgccgtagctgcggccgagcagcctgcccagtgtgggcaggggcagccgttcgtgctgcccgtgggcgtgagctccaggaatgaggactacccccgaacctgcaggatgtgtttttatggcacaggcctcatcgcgggccacggcttcaccagccctgaacgcacccccggggtcttcatcctcttcgatgaggaccgcttcgggttcgtctggctggagctgaaatccttcagcctgtacagccgggtccaggccaccttccggaacgcagatgcgccgtccccacaggccttcgatgagatgctcaagaacattcagtccctcacctcctgaccggccacatccttgccgccacatcccgggtggctctggggctctgaactctgacctgtgaatagaagcagcatgcactttggaaatccggccttttgaccagaacgcacacctcgtcggggggcccagtccagccaccccccagcactttatgtagagagtgtgacatagacctgcatatttgtcagtgccatgatggaagaagctgagcatgtcttaccaaaaacagagagaacgagcctgaatacagcagatgtaggggacagccgtgggaccgcgtgagaattgaagcggtggggttcccgcaccctgggctggctggtggttttctcgggaagcaggaccctcctgactggtgctcttcctgtgagcggatagagtgatagactgggtcgtgtgtgagacgcatgtgctccaccccactccttttgggggaagccaggcaacagtggcctctgggagggggtcaggaagaggcgaacagctcaggcagcgcaggtgtgatgggcacagtacgcagagcaagctcgggaagttggtaggatctcaggcttggggccgggactctggagtgaatccccatttctctaccggcttgcttggagtttggacagaagcatttcacctctgatctcagcttccccacctgtggagtgggtttagtgacctgagtcactagggaatgtcacctgaatgcacagcccagcccatgcacctgccccagcccctccagctttggagccaaggccatcgttccagccacttgactgtcctcgacggcctgttccagacagggcgtttgttttgtccatgccttcctccctgcacgcacacggcgtcaaaaccaagctgccggccactgtctccagaacgcaaggctccaggcccgtgtgtctgaagcagtgagtggtccacacaggtgccaggagtgcccatatgagatgacgaggaaacccctttgcaggtgaggggacagctttctagaaaagccacacctgcatctggggacacactttggaaagtgggaccctccagcctggagaccccatggactgatgcctccactgctgtgtgccccatgttgtgttaacacctgcgtgtggggaccccatctgaggtcttggctgaggttggcatctcctgaagaacagagagcacggtgtccagagctggcccttcccccagcccacagccagctccgtgcccgagtgggcgtccccagcgagccttccctctctgccgcttgtccttgtgtctgggctgctccaagtccttgtgctgggcaccctggacacgtcctgctggtgagggacctcgggaaggtgacagtctgtgtgccttggtgtggagaccaacctgaggatgtcctgggaaatgttttcctgatgaatttctccttgactggcctttaaagaacataagaattcccattgcccagcctcagtgcatttggcaaatgcttactttgcttcccagagtcagagaattggcaaaggttcctaaatggtaatctggccggcctgggagaaagactcacgagaaaagccagtggagaaagcgcccttccagggcggcagcagcgggagccacgcagaccccgaggcgcacctgctggctcttgtgtgtggccccagtttctagcggcttttgcagcattagcctacaagctttgtcactccctgccctctgtggtggtcactgtttttctctcttgccaaatgaggcagtctctgagtgacggtgactgtggccttgaagcctggaggactgttgggcatgtagactggcaccttgaagattcaccattgtttaaataaaatcaagcaaatgcttttttaccaagagcccgagcctcgctctaagggacgcagtcctagaggcgtgccctttggggcttgaagagcacactgtgggacgcacgtgcttctgattaaaggaatctcagatctcaattacgcttccagtgtttgggtatagaaatagcttccacccatcatgtctcagccatgggctgttggtcagttcatgtggctcctggttctggtgtgtatgttgggggcgggggtctctccatggtggtgacctgcagtgatgccaggcagggccagagccacacagccaggaaagggaggcctttttggccgcacagccagtcccttcagtcgtgactacaggtcttgttttttccgctccgatgtgtccttagccagttcttggctccggttctgtagggacaggcactgaatctgcgcgcctcaaaacagcagcttcccttccgggggagggcatccaccctctcaggggatcctgcaggtggcccatttcctgcaggtgagaactcggaagggctgatgtcgtcatcagaggcctaagggcagctgagagttggataaaaccgtttccaaggaggaggctgagtaacccagttcaggacagccaagcgcattaggcttgattggggaaggtggcaggtggagttgggaggttgggactctccatcttttgcaccacggatgcctttctgtcgctgtctcactctggggcaggatcaagtctgctctctggagtggggctgcctgcagtgcagctctgcacacctgaacgtgttctttgtcacttgtttggaaatgatgtgattgaagatttcagagaggtcattggaggcttttctgtgccggcactgaatgttcatttgcatgaggaagttgcaaacgacttctgcaggctgagattcaaggcaggtggtattggggtccctcagcccacctgggccgtgacctcaagtgtccactgctgagtgtgagtggctttgcaggcctggtggtgggagagcctcaggctccctccttcttcgttcctgaccatgccctgggccccttcagtctgcctgcggctctgtggcatccctgccctgacactgggcacctgtgcccctagcaagcccacctggcacacgaggagggaggggtgggtggccatgtccttcctctagccacatgccctgctggccgctccattctgagctttgtgcagaaccgggtctgagctggagatttttctctgagaacctgcagttgtgctgcagccgcacgcaagggcccttcagccgctggctctggcttccctgactcctcagggcgtgttcacccccaggctttctcacctgcacacggttaggccattttcagtgctcgtgggcagtcacggacagcagcagaaactcctcagcccctttgttacttcagaacgcctgcccacatgcatcttctgagctcgtgttgtcctcatggccgtggggtcttgggtgcgaacaggagatgctgagctgtggtccaccgtccaaggtgctgcagaaagcagctaggctcttttaggatgtttctattctggttgctgccttcgtggtgtaacttttaagaacacttacgggaatgtgctcatagaaccatcacctgtcctgagaataaaactcctggaatcatgatcaagtccagtgttaacgtggcccaacctgtctgtacttctggggagagaccaggaacatcactggactcctcatccccgtaattatttagagaagatgcaagcagcagatagtctccatgcggctggtactttttttgttgttttttgagacagggtcttgctctgtcacctgggctggagtgcagagcggcgatcatggctccctgaggcctcaacctactaggctcaagctgtctgcccgccttagcctcccaagtagctgggaccacaggcacccaccaccaccatgcttggctaacttgtttttgtagagatggagttttgccatgttgctcaggttggtctcgaactcccgatctcaggtgatccacccgcctcggcctcccaaagtgctgggattacaggcgtgagcccctgcgccccagccttggggcctgtctttgaatgggaatgagactgtgcaaaccgtggactaccctgtgtcacccacagctcagtggcctgcctgccggccctcaggggctgctgaccgggagaccagccagagcacgagggggtcagggctgtgtgggttttggcctgattctgcatttggttgtttctgggggccatgtagcctgcctgcattaggaaagcgctgtgccatctgatcatgagcacctctgcaccccctggtaaggtgaccttgcagcaggagctgtgccctgcctgggtaggcacccactaggtaggaccggagcaatcctggcagccgccacctgcacccgtgcacttgtttctcctcacagtttcaagtaaatccgtttttgaaggct

SEQ ID NO: 133619 - DNA, 2717 bp, Homo sapiens
  Payload ID: 6113
  Gene Symbol: FBXO31
  Gene Name: F-box protein 31
  ENST ID: ENST00000565593
  CDS Start-End: 20-439
gtggccgtcactgggcggcatggcggtgtgtgctcgcctttgcggcgtgggcccgtcgcgcggatgtcggcgccgccagcagcgccggggcccggccgagacggcggcggccgacagcgagccggacacagaccccgaggaggagcgcatcgaggctagcgccggggtcgggggcggcttgtgcgcgggcccctcgccgccgcccccgcgctgctcgctgctggagctgccgcccgagctgctggtggagatcttcgcgtcgctgccgggcacggacctacccagcttggcccaggtctgcacgaagcgggcgagggtcgtggccggcagggcccccgggagtcccagccaagccctgcccagcccagggcagaggcgcccagcaagggcccagatgggacacctggtgaggatggtggcgagcctggggatgccgtagctgcggccgagcagcctgcccagtgtgggcaggggcagccgttcgtgctgcccgtgggcgtgagctccaggaatgaggactacccccgaacctgcaggatgtgtttttatggcacaggcctcatcgcgggccacggcttcaccagccctgaacgcacccccggggtcttcatcctcttcgatgaggaccgcttcgggttcgtctggctggagctgaaatccttcagcctgtacagccgggtccaggccaccttccggaacgcagatgcgccgtccccacaggccttcgatgagatgctcaagaacattcagtccctcacctcctgaccggccacatccttgccgccacatcccgggtggctctggggctctgaactctgacctgtgaatagaagcagcatgcactttggaaatccggccttttgaccagaacgcacacctcgtcggggggcccagtccagccaccccccagcactttatgtagagagtgtgacatagacctgcatatttgtcagtgccatgatggaagaagctgagcatgtcttaccaaaaacagagagaacgagcctgaatacagcagatgtaggggacagccgtgggaccgcgtgagaattgaagcggtggggttcccgcaccctgggctggctggtggttttctcgggaagcaggaccctcctgactggtgctcttcctgtgagcggatagagtgatagactgggtcgtgtgtgagacgcatgtgctccaccccactccttttgggggaagccaggcaacagtggcctctgggagggggtcaggaagaggcgaacagctcaggcagcgcaggtgtgatgggcacagtacgcagagcaagctcgggaagttggtaggatctcaggcttggggccgggactctggagtgaatccccatttctctaccggcttgcttggagtttggacagaagcatttcacctctgatctcagcttccccacctgtggagtgggtttagtgacctgagtcactagggaatgtcacctgaatgcacagcccagcccatgcacctgccccagcccctccagctttggagccaaggccatcgttccagccacttgactgtcctcgacggcctgttccagacagggcgtttgttttgtccatgccttcctccctgcacgcacacggcgtcaaaaccaagctgccggccactgtctccagaacgcaaggctccaggcccgtgtgtctgaagcagtgagtggtccacacaggtgccaggagtgcccatatgagatgacgaggaaacccctttgcaggtgaggggacagctttctagaaaagccacacctgcatctggggacacactttggaaagtgggaccctccagcctggagaccccatggactgatgcctccactgctgtgtgccccatgttgtgttaacacctgcgtgtggggaccccatctgaggtcttggctgaggttggcatctcctgaagaacagagagcacggtgtccagagctggcccttcccccagcccacagccagctccgtgcccgagtgggcgtccccagcgagccttccctctctgccgcttgtccttgtgtctgggctgctccaagtccttgtgctgggcaccctggacacgtcctgctggtgagggacctcgggaaggtgacagtctgtgtgccttggtgtggagaccaacctgaggatgtcctgggaaatgttttcctgatgaatttctccttgactggcctttaaagaacataagaattcccattgcccagcctcagtgcatttggcaaatgcttactttgcttcccagagtcagagaattggcaaaggttcctaaatggtaatctggccggcctgggagaaagactcacgagaaaagccagtggagaaagcgcccttccagggcggcagcagcgggagccacgcagaccccgaggcgcacctgctggctcttgtgtgtggccccagtttctagcggcttttgcagcattagcctacaagctttgtcactccctgccctctgtggtggtcactgtttttctctcttgccaaatgaggcagtctctgagtgacggtgactgtggccttgaagcctggaggactgttgggcatgtagactggcaccttgaagattcaccattgtttaaataaaatcaagcaaatgcttttttaccaagagcccgagcctcgctctaagggacgcagtcctagaggcgtgccctttggggcttgaagagcacactgtgggacgcacgtgcttctgattaaaggaatctcagatctcaa

SEQ ID NO: 133620 - DNA, 726 bp, Homo sapiens
  Payload ID: 6113
  Gene Symbol: FBXO31
  Gene Name: F-box protein 31
  ENST ID: ENST00000563113
  CDS Start-End: 291-726
agattccgaaatttttaacctctgaagctgtgccttcacatgatctaggacagcgttcagaagatggctacagtctgttggtttgtattctgtgaaaatagaaaaaaaaatccgagtatggtgtttgcgaaaacttgcggaagctggagatcacaggcgtgtcttgtcgggacgtctatgcgaagctgcttcaccgatatagacacattttgggattgtggcagccagatatcgggccatacggaggactgctgaacgtggtggtggacggcctgttcatcatcgggtggatgtacctgcctccccatgacccccacgtcgatgaccctatgagattcaagcctctgttcaggatccacctgatggagaggaaggctgccacagtggagtgcatgtacggccacaaagggccccaccacggccacatccagattgtgaagaaggatgagttctccaccaagtgcaaccagacggaccaccacaggatgtccggcgggaggcaggaggagtttcggacgtggctgagggaggaatgggggcgcacgctggaggacatcttccacgagcacatgcaggagctcatcctgatgaagttcatctacaccagtcagtacgacaactgcctgacctaccgccgcatctacctgccgcccagccgccccgacgacctcatcaagcctggcctcttcaaaggtacctatggcagccacggcctggagattgtga

SEQ ID NO: 133621 - DNA, 5718 bp, Homo sapiens
  Payload ID: 6113
  Gene Symbol: FBXO31
  Gene Name: F-box protein 31
  ENST ID: ENST00000618298
  CDS Start-End: 314-1417
ccgctgggcgcctgaggcccctgagattccgaaatttttaacctctgaagctgtgccttcacatgatctaggacagcgttcagaagatggctacagtctgttggtttgtattctgtgaaaatagaaaaaaaaatccgagtatggtgtttgcgaaaacttgcggaagctggagatcacaggcgtgtcttgtcgggacgtctatgcgaagctgcttcaccgatatagacacattttgggattgtggcagccagatatcgggccatacggaggactgctgaacgtggtggtggacggcctgttcatcatcgggtggatgtacctgcctccccatgacccccacgtcgatgaccctatgagattcaagcctctgttcaggatccacctgatggagaggaaggctgccacagtggagtgcatgtacggccacaaagggccccaccacggccacatccagattgtgaagaaggatgagttctccaccaagtgcaaccagacggaccaccacaggatgtccggcgggaggcaggaggagtttcggacgtggctgagggaggaatgggggcgcacgctggaggacatcttccacgagcacatgcaggagctcatcctgatgaagttcatctacaccagtcagtacgacaactgcctgacctaccgccgcatctacctgccgcccagccgccccgacgacctcatcaagcctggcctcttcaaaggtacctatggcagccacggcctggagattgtgatgctcagcttccacggccggcgtgccaggggcaccaagatcacgggcgaccccaacatccccgctgggcagcagacagtggagatcgacctgaggcatcggatccagctgcccgacctcgagaaccagcgcaacttcaatgagctctcccgcatcgtcctggaggtgcgcgagagggtgcgccaggagcagcaggaaggcgggcacgaggcgggcgagggtcgtggccggcagggcccccgggagtcccagccaagccctgcccagcccagggcagaggcgcccagcaagggcccagatgggacacctggtgaggatggtggcgagcctggggatgccgtagctgcggccgagcagcctgcccagtgtgggcaggggcagccgttcgtgctgcccgtgggcgtgagctccaggaatgaggactacccccgaacctgcaggatgtgtttttatggcacaggcctcatcgcgggccacggcttcaccagccctgaacgcacccccggggtcttcatcctcttcgatgaggaccgcttcgggttcgtctggctggagctgaaatccttcagcctgtacagccgggtccaggccaccttccggaacgcagatgcgccgtccccacaggccttcgatgagatgctcaagaacattcagtccctcacctcctgaccggccacatccttgccgccacatcccgggtggctctggggctctgaactctgacctgtgaatagaagcagcatgcactttggaaatccggccttttgaccagaacgcacacctcgtcggggggcccagtccagccaccccccagcactttatgtagagagtgtgacatagacctgcatatttgtcagtgccatgatggaagaagctgagcatgtcttaccaaaaacagagagaacgagcctgaatacagcagatgtaggggacagccgtgggaccgcgtgagaattgaagcggtggggttcccgcaccctgggctggctggtggttttctcgggaagcaggaccctcctgactggtgctcttcctgtgagcggatagagtgatagactgggtcgtgtgtgagacgcatgtgctccaccccactccttttgggggaagccaggcaacagtggcctctgggagggggtcaggaagaggcgaacagctcaggcagcgcaggtgtgatgggcacagtacgcagagcaagctcgggaagttggtaggatctcaggcttggggccgggactctggagtgaatccccatttctctaccggcttgcttggagtttggacagaagcatttcacctctgatctcagcttccccacctgtggagtgggtttagtgacctgagtcactagggaatgtcacctgaatgcacagcccagcccatgcacctgccccagcccctccagctttggagccaaggccatcgttccagccacttgactgtcctcgacggcctgttccagacagggcgtttgttttgtccatgccttcctccctgcacgcacacggcgtcaaaaccaagctgccggccactgtctccagaacgcaaggctccaggcccgtgtgtctgaagcagtgagtggtccacacaggtgccaggagtgcccatatgagatgacgaggaaacccctttgcaggtgaggggacagctttctagaaaagccacacctgcatctggggacacactttggaaagtgggaccctccagcctggagaccccatggactgatgcctccactgctgtgtgccccatgttgtgttaacacctgcgtgtggggaccccatctgaggtcttggctgaggttggcatctcctgaagaacagagagcacggtgtccagagctggcccttcccccagcccacagccagctccgtgcccgagtgggcgtccccagcgagccttccctctctgccgcttgtccttgtgtctgggctgctccaagtccttgtgctgggcaccctggacacgtcctgctggtgagggacctcgggaaggtgacagtctgtgtgccttggtgtggagaccaacctgaggatgtcctgggaaatgttttcctgatgaatttctccttgactggcctttaaagaacataagaattcccattgcccagcctcagtgcatttggcaaatgcttactttgcttcccagagtcagagaattggcaaaggttcctaaatggtaatctggccggcctgggagaaagactcacgagaaaagccagtggagaaagcgcccttccagggcggcagcagcgggagccacgcagaccccgaggcgcacctgctggctcttgtgtgtggccccagtttctagcggcttttgcagcattagcctacaagctttgtcactccctgccctctgtggtggtcactgtttttctctcttgccaaatgaggcagtctctgagtgacggtgactgtggccttgaagcctggaggactgttgggcatgtagactggcaccttgaagattcaccattgtttaaataaaatcaagcaaatgcttttttaccaagagcccgagcctcgctctaagggacgcagtcctagaggcgtgccctttggggcttgaagagcacactgtgggacgcacgtgcttctgattaaaggaatctcagatctcaattacgcttccagtgtttgggtatagaaatagcttccacccatcatgtctcagccatgggctgttggtcagttcatgtggctcctggttctggtgtgtatgttgggggcgggggtctctccatggtggtgacctgcagtgatgccaggcagggccagagccacacagccaggaaagggaggcctttttggccgcacagccagtcccttcagtcgtgactacaggtcttgttttttccgctccgatgtgtccttagccagttcttggctccggttctgtagggacaggcactgaatctgcgcgcctcaaaacagcagcttcccttccgggggagggcatccaccctctcaggggatcctgcaggtggcccatttcctgcaggtgagaactcggaagggctgatgtcgtcatcagaggcctaagggcagctgagagttggataaaaccgtttccaaggaggaggctgagtaacccagttcaggacagccaagcgcattaggcttgattggggaaggtggcaggtggagttgggaggttgggactctccatcttttgcaccacggatgcctttctgtcgctgtctcactctggggcaggatcaagtctgctctctggagtggggctgcctgcagtgcagctctgcacacctgaacgtgttctttgtcacttgtttggaaatgatgtgattgaagatttcagagaggtcattggaggcttttctgtgccggcactgaatgttcatttgcatgaggaagttgcaaacgacttctgcaggctgagattcaaggcaggtggtattggggtccctcagcccacctgggccgtgacctcaagtgtccactgctgagtgtgagtggctttgcaggcctggtggtgggagagcctcaggctccctccttcttcgttcctgaccatgccctgggccccttcagtctgcctgcggctctgtggcatccctgccctgacactgggcacctgtgcccctagcaagcccacctggcacacgaggagggaggggtgggtggccatgtccttcctctagccacatgccctgctggccgctccattctgagctttgtgcagaaccgggtctgagctggagatttttctctgagaacctgcagttgtgctgcagccgcacgcaagggcccttcagccgctggctctggcttccctgactcctcagggcgtgttcacccccaggctttctcacctgcacacggttaggccattttcagtgctcgtgggcagtcacggacagcagcagaaactcctcagcccctttgttacttcagaacgcctgcccacatgcatcttctgagctcgtgttgtcctcatggccgtggggtcttgggtgcgaacaggagatgctgagctgtggtccaccgtccaaggtgctgcagaaagcagctaggctcttttaggatgtttctattctggttgctgccttcgtggtgtaacttttaagaacacttacgggaatgtgctcatagaaccatcacctgtcctgagaataaaactcctggaatcatgatcaagtccagtgttaacgtggcccaacctgtctgtacttctggggagagaccaggaacatcactggactcctcatccccgtaattatttagagaagatgcaagcagcagatagtctccatgcggctggtactttttttgttgttttttgagacagggtcttgctctgtcacctgggctggagtgcagagcggcgatcatggctccctgaggcctcaacctactaggctcaagctgtctgcccgccttagcctcccaagtagctgggaccacaggcacccaccaccaccatgcttggctaacttgtttttgtagagatggagttttgccatgttgctcaggttggtctcgaactcccgatctcaggtgatccacccgcctcggcctcccaaagtgctgggattacaggcgtgagcccctgcgccccagccttggggcctgtctttgaatgggaatgagactgtgcaaaccgtggactaccctgtgtcacccacagctcagtggcctgcctgccggccctcaggggctgctgaccgggagaccagccagagcacgagggggtcagggctgtgtgggttttggcctgattctgcatttggttgtttctgggggccatgtagcctgcctgcattaggaaagcgctgtgccatctgatcatgagcacctctgcaccccctggtaaggtgaccttgcagcaggagctgtgccctgcctgggtaggcacccactaggtaggaccggagcaatcctggcagccgccacctgcacccgtgcacttgtttctcctcacagtttcaagtaaatccgtttttgaaggct

SEQ ID NO: 133622 - DNA, 1227 bp, Homo sapiens
  Payload ID: 6114
  Gene Symbol: FBXO32
  Gene Name: F-box protein 32
  Uniprot ID: Q969P5
  ENST ID: ENST00000443022
  CDS Start-End: 193-981
agcactcccggagcctgcaacgcttgagatcctctccgcgcccgccaccccgcagggtgccccgcgccgttcccgccgccccgccgcccccgtcgcgggcccctgcaccccgagcatccgccccgggtggcacgtccccgagcccaccaggccggccccgtctccccatccgtctagtccgctcgcggtgccatgccattcctcgggcaggactggcggtcccccgggcagaactgggtgaagacggccgacggctggaagcgcttcctggatgagaagagcggcagtttcgtgagcgacctcagcagttactgcaacaaggaggtatacaataaggagaatcttttcaacagcctgaactatgatgttgcagccaagaagagaaagaaggacatgctgaatagcaaaaccaaaactcagtatttccaccaagaaaaatggatctatgttcacaaaggaagtactaaagagcgccatggatattgcaccctgggggaagctttcaacagactggacttctcaactgccattctggattccagaagatttaactacgtggtccggcctgccttcaaaggcctcaccttcactgacctgcctttgtgcctacaactgaacatcatgcagaggctgagcgacgggcgggacctggtcagcctgggccaggctgcccccgacctgcacgtgctcagcgaagaccggctgctgtggaagaaactctgccagtaccacttctccgagcggcagatccgcaaacgattaattctgtcagacaaagggcagctggattggaagaagatgtatttcaaacttgtccgatgttacccaaggaaagagcagtatggagatacccttcagctctgcaaacactgtcacatcctttcctggaagggcactgaccatccgtgcactgccaataacccagagagctgctccgtttcactttcaccccaggactttatcaacttgttcaagttctgaatcccagcacatgacaacacttcagaagggtccccctgctgactggagagctgggaatatggcatttggacacttcatttgtaaatagtgtacattttaaacattggctcgaaacttcagagataagtcatggagaggacattggaggggagaaatgcagttgctgactgggaatttaagaatgtgaacttctcactagaattggtatggaaaagcaaaatactgtaaataaactttttttctaac

SEQ ID NO: 133623 - DNA, 6744 bp, Homo sapiens
  Payload ID: 6114
  Gene Symbol: FBXO32
  Gene Name: F-box protein 32
  Uniprot ID: Q969P5
  ENST ID: ENST00000517956
  CDS Start-End: 193-1260
agcactcccggagcctgcaacgcttgagatcctctccgcgcccgccaccccgcagggtgccccgcgccgttcccgccgccccgccgcccccgtcgcgggcccctgcaccccgagcatccgccccgggtggcacgtccccgagcccaccaggccggccccgtctccccatccgtctagtccgctcgcggtgccatgccattcctcgggcaggactggcggtcccccgggcagaactgggtgaagacggccgacggctggaagcgcttcctggatgagaagagcggcagtttcgtgagcgacctcagcagttactgcaacaaggaggtatacaataaggagaatcttttcaacagcctgaactatgatgttgcagccaagaagagaaagaaggacatgctgaatagcaaaaccaaaactcagtatttccaccaagaaaaatggatctatgttcacaaaggaagtactaaagagcgccatggatattgcaccctgggggaagctttcaacagactggacttctcaactgccattctggattccagaagatttaactacgtggtccggctgttggagctgatagcaaagtcacagctcacatccctgagtggcatcgcccaaaagaacttcatgaatattttggaaaaagtggtactgaaagtccttgaagaccagcaaaacattagactaataagggaactactccagaccctctacacatccttatgtacactggtccaaagagtcggcaagtctgtgctggtcgggaacattaacatgtgggtgtatcggatggagacgattctccactggcagcagcagctgaacaacattcagatcaccaggcctgccttcaaaggcctcaccttcactgacctgcctttgtgcctacaactgaacatcatgcagaggctgagcgacgggcgggacctggtcagcctgggccaggctgcccccgacctgcacgtgctcagcgaagaccggctgctgtggaagaaactctgccagtaccacttctccgagcggcagatccgcaaacgattaattctgtcagacaaagggcagctggattggaagaagatgtatttcaaacttgtccgatgttacccaaggaaagagcagtatggagatacccttcagctctgcaaacactgtcacatcctttcctggaagggcactgaccatccgtgcactgccaataacccagagagctgctccgtttcactttcaccccaggactttatcaacttgttcaagttctgaatcccagcacatgacaacacttcagaagggtccccctgctgactggagagctgggaatatggcatttggacacttcatttgtaaatagtgtacattttaaacattggctcgaaacttcagagataagtcatggagaggacattggaggggagaaatgcagttgctgactgggaatttaagaatgtgaacttctcactagaattggtatggaaaagcaaaatactgtaaataaactttttttctaacaatttgccagcaagactataagggcaataattctatttcagcggtgaaaatggagtcctcttaatggtcacagaaactctcttatagttccctaggaagaaaaaggcaaaactcaaatacaaaataggacgctttgtttacaatgtgaaaatttgtttagaaaagaaaaaatgaagaaggaaaactatataggagaaattcctgggctttggggtttgatctggtgtttgttttgagaaggcgaaggaagcgccacccatcctaaacctgcatgggcacagagccttaccctacagagataccacacaatggtctacctctaaaagcgtagagtgccctctctgacaacgcatgtgatccagtaggcagtgtctgtttttctcgtaagtgttttcatcactataaaaagtgatttaaaatggaaagggatattggaggcaatcctctggtttcacacttccttttcaggcaaacagggccctccttagagttatctgttcaccagaacaacccaaaagcacatgttccttttttcctgtcatgttgtagctcatttgggggaaaagaaggccaacttaaaacagtcccaggggaggattgcttgagcccaggagtctgaggtttgcagtgagctatgattgtgccactgcactccagcctgtctccaaaacaaaacaaaacaaaacaaaagccgtcccagaggaagtcctgctgcagaaaagatgatagaattggtcacccaatcaatagctgtgaagacttccttattcctgctgaacttccttccttggatatcttcatggataagcctgtgtctgtggacagagtggggcccaagtgctgaggctcgaaagacaggttttacaatcagccaattaaacatcttaccagttgctgtaccccttgccaaggggatgagctgaggagcttcttttctttaggtccaacatcaaaatgagtccatctgagctagggctttttgcaaaggtgattaaaaatcaaggctggagttccagccaaatagggaggagaggtaccacaagttcatcttaaacttgcttccgggctgggtagttaaaacaggaagatcccaaggggatcttacgaggcaaatatcagcaggtaactgtggaagaaaggaaatctcaggacctaatgagttcgttgtaaaatattcctgggaatagatgggggatctactcccagttttttactttttacagaatattgttgctttcctacaacaatgtacatatatttgcagttgtatatgctttttttttttccaaataaacttgtcaccctgcatgcccttggcaaataagtgaagcagaaataggaacacagtccacattcaagttgaggaacagtgtatctttaagagctgagctttgggtgacctggaaagggggaaagatggctaagcatggagagaaacgaggcaagagacaagctatgatacaacaccgcttcagcccctgccctcaatagcacacaacccacatatcagctttctgaagagaaggaacctactgtttagtgctcctcactttgcaatgtttgtgctacgccagaatttctccagtttttttcattatcatccccctgagaaaaaaattacattgaatttaaattttccctaataagagaaattaaatatgaaagaataggattttgttgggtaagattgagctttggaaggtcacgaaccattattctatctaaggtgtgtgttttgttttgtttttttttgttttttttttgcaatccctctccccctgaaccaatttcacattgggaatgcaggacctagactgctgaataaaaagctacttcttctataattgtcaggttctctccaatttctcagcttcctcaaagacatggggtggagttgggtgtgccatcactgagagagctctggaacttttgactcttagtgacatttttagatttaggggttcatggccttccacatgttgccaccaactggtgatctctgccccttcatgctgatcaagaaagtagaaactcctcgtcgccttcaggtttgcagtcgcagaaacattgcctgctgtggactgtcagcacaaaactgggacactggtgtcatttagactgtcagcagtgcacatgattgtacgatagactccaggcaaccatgtgcatctgtgcaagatgacctctgccccaagagaagggttacggtctaattaaatgtttaccaagatggtaccagtgggctctccccgtgtcctttggtgttattggagctggtgtatgacagactcaaggaaattttttaaggaaaatgaagaagaaatcaacctttatggttctctttcattggaagaggagaataaggaaagaaatggcaggtagagagggagggggaaaggaatagaaatggcatgtctttgatgctgtggcttgtgtggggacaatgggaagagcacagcaggcacaacatatctgtgttagtgccacgtggtatctgttaagtatggccagagcctcacatataagtgaagagagttaagacaattcttgctctttgaacaataatagtctatagaatttctattggcaaaccatcccagacaacctgacctatcaaacaaaagcaaataatccctgtctcagaactgctggtctaaaagctagaaggggcatgataatggaaattgctagaaaagagagaatgctctactctctttcctgtgcctacctacccccatcctaaaccctgtaaaacagaatttcaaaatagatgtcaaatatgaagtaattcagacttccaaagaaggaaagagttctgcccagggcagtatgagcaaatccacagggatgttaagatttggtccaactcaaaggtttatgggcagtgagcctagagtctcttgagagtaaacccttgcatttgggacaaggagaatatgtgaagttcaggagtgctcacactagagcaagatccagaaaaaaaaaaatccaatggcattttaaactagattgcattatcactcaatgctgttactttgagcagacaaatcagttgaatgggagggcaaatggcagaaatgaacaaaagctattaggtgaaagcatccccaatgtatcagttgtgagatgatttttgtttaatgatgatcaggtttacattgaagtggcttggaagacgtatttcagagggactgggtttgtactgcaaaactctgaacactagagcaggttctactagcacttgggcagtaaggtagcgggtgtgtattatgctattgccatagttctcgtctttgtggattcacataccctttcccatgaggagcttgctactaacagcctcctgtttctgttgtttttatatgggagaagagaaagagcttggaatttcaattgtctaaacaattggtatgatttacaagaaggcaaaccattcaggagatgttcaacagtgtatcattcttagcattcaatacaatgtttattataaaatatacacctgagtttatgtttttctgccaggctgaagggcaataatgtcttgctatgcaaacactctattttatgtgtgaatttttttaactgtaattttatgtgtgaatttttttaactaaactctatcatcattttctatgttgacatcttttttttttttttaatctgtttccaactctgagtctgtgaactatctcttctgactggatgctggcctaaaatcctattagtgcttaaacagacctcaaaacactctgaacctgtaggccaatacagagatgttgttctttgatatatcttgggtccttgatggcttcaacaaacaaggtcataatttgtttaaattcagtgttttctgtagataccttcttctcagtttcattaagaagagtaaccatctttggttttccaaagaatggaaactcctaccctagactttagacttagagcgtctgcctttcacgatgagtaagagatccagaatgtttaggggatgtgcgtcagcccacctggtacagtggcaaagctgaatgcgaacttgaggcctcctgaggcctgaccttctatgcccccagccctccaccccaagcaccttttggtgtggctggaaacacatgacattggatgtgatttttctcaagcccttcactgtggaaggcatgggagactgcccagcattgggcatgtggctgttaacgtttccatttcaagtccctgattcttactggagaagttaaggagccacttaatgttttcacagacctctgattctgttgtgaatgtggcattccagtgagtacaacctgcttgctataaagaaagcagcatattttgacaattttatttcttccttgggtacttacatttttattacaaaaatggccgttataaaaaaagacagaagggctgggcagtggcttgctccctagaaactgagattccgaagcaggtgtttcctctcccctagactcagaggtacatttaatccatcttctccatttcctccttcaggaccagctatgagattcagtgcatttctagcccagcggatgttcattctccactaaacttcatcttttactaagcaaagggggattattccatgaggcagccaggagcaaggggccatgatattcatgactttgtctgctgggcatttttcaaagtgtccttgaattcactcagcaaacaaagctttctggagaatctctcaaaacttaggccctgctccatttggccaaaaatgatggctgctccaaaactctgaacttcttaaaactccatctgctacattatttctggagtttaaacatgactttttctgtctttgagtatagatgtgtttgtttaattaacgaagcacaagtctgttaagcagaaggctccaagctgtattctatacttgggaatccttggtgccatctttattctaccaagtgccaatcaccatggctaaagtgggcgtatattacagcctgtgtcctaagcttagaagctttaatgtacttttttaaatgaaaagtattagagggggttgaacattgtaactaaagcataaagttagaccaattacatgcagagatgtttatttaatattgtgtgagctgagtccttctgtataaattatttgcacacttttcttgcatgatgaactgattttttatagttgtttgtaccagacggtggcatatttttgtaaaaaacttttgacactgaattgcaataaatgtttttccaacaaca

SEQ ID NO: 133624 - DNA, 3853 bp, Homo sapiens
  Payload ID: 6115
  Gene Symbol: FBXO33
  Gene Name: F-box protein 33
  Uniprot ID: Q7Z6M2
  ENST ID: ENST00000298097
  CDS Start-End: 339-2006
tcttccggaagtcgcgccggtgcgcgccggactcctcccaccagcggcgacgtcaaactcagctcctaccacttctctgtctctgccgaccggcgcagggagggctgccttttccttacagtacgccttgaggcttccgggccgctgaagtttacgagcgagggcagtgcagttactcagtgtgccggcctcggacgcacgtgagtagagtttgagaagacagaggctggctcccggcaggccacgcccgcagaggcctttccccctctccacaacttgtgttctacttggttccgccgagacccacgacggttccgcccccttcttcctagtcattgatgttgttgttcttgtcagtgccgcagccccgaccgccgggagctcgaacccgagccggggccgcccgggtggcgcggtggcggcggctgcggctgcagcagctgcgacggctgcgggggctgctccgggtactgcgggggcggccgggagccggcagccggcggcggggccggatggctctgtgcgggcaggcggcgggcgctgcgtcgctgcccagcgagctgatcgtgcacatcttctcttttctgccggcgcccgaccggctgcgggcctcggcctcctgctcgcactggcgtgagtgcctcttctatccggccctgtggccccagctccgcatctgcctccgcgtctcgcccgcggagcagcctcggctggaattcctcatgcgcaagtgcggctggttcgtgcgagagctgcgtgttgaattcgccgccgagaactatctgagcggcggtggcccaggggacggaggtggcgcggacaccgggactggaggggaggaagtcgaggccctgcagctctcagctcgttggctggaagtgctgcgcacctacttggagctggtgctttgcgtgctggtcagcatccggaacaacaggaaccttcagaagtttagtctttttggagacataagtgttctacaacagcaaggaagtttgtcaaatacatacctcagcaaggtggaccctgatggcaaaaaaattaaacaaattcagcaactgtttgaagaaatcctgagtaatagtaggcaactgaaatggctgtcctgtgggtttatgctggaaatagtaaccccaacatcactgtcatctctctctaatgctgttgccaacaccatggagcacctcagtttactggacaataatattcctggtaacagcactcttattactgcagttgaactggagcgatttgtgaatctgcactcacttgccttggatttttgtgactttacagctgagatggcaagagtcttaactgatagcaaccatgtgcctttgcaacgactgtctcttctggttcacaatgtttctgtaatgcacaagtctctggacaacatgccaaatgatgagcattggaaagccctgtcacgaaagagcaccagctttcgggtctatataatggcttttgatatcaagagtgaagatatgttaaagattctgaaacccagtataccactagagaggattcattttgatagctatatcacttgtgtttcaggggctattgttgatcttatatccaggcaatatgacaagttcctcactcattttattttaatgaatgatgtgattgacacatctggttttccagatcttagtgacaaccgaaatgaagatccgttggttttattagcatggaggtgcacaaagctctctcttctggcaattcatggttacacggtgtgggcacacaacctcattgccattgctcgtcttcggggctctgatctgaaagtgcttgaagtcaccgaagaaagcattgattttgaccaaggtgaactggccgaccaggatgtagatccagtgcataaccttattgagcaggtatccctgggcctgggtcaaccttggcatgcagtcatggacatcgaatcactcagtgtcttcactgaaccaaatcgtcatttttacagagagatgcaaagcttcagtgaagacatttagcttttttttaatgtagaattcctgtggttacatatgcaagtagggtcctattatgtttttttttcagtagtgtgaattaatccttttgtgctgtgtttaatcagtattagctttatagaattatatatgtatattctacttcttgatcaaagaacgtagtcgggtattggtttagaagttcaaagtgacaatgtatagggctttcacggttaatggacttgttaccaaaccttaaggatatacagccgaagattgtctgaggttgctggctaactttatttttcactgagttactctgcctttttgacgtttttattctttgtgtgtcagagttcagagctcaggagccaaaatatttttatacatatatagatatatatccatagcctggtagatttatatgcaatgcactgcatccatgcattctgatagcatttcattaattttgatttcaaatggaagataaataatatcccaaatgaattatctgtaacagaaaagccaagactttaactttcattacatatctaatagttgatatcaccagttaccattttgaattttgtatagtactaggttagaacattgcttaatccttttaaaaaaaatgcatttacgtaaacacgaatactgaaattgttggattttttaactatatctgacataattttattcatcaattacattacacattcatttagcccagatttcaaatagtgggggaagaaagaaactgtatttcagagtaaaatctcctaaaggaaataaaaacacagagttgtaaatacacatgcttgcaaaaacattagtcgtgaaatccctagcaacaagtcactggatttttctctgtcagcacgcgtgtcagctgccaaagaatagacttaatgaagaagtgcccacatgctggcaggggccggcccactctggccagccagatactgctagattgtaatatttaaggtcgaatttcgacctgtggtacacagctgtgctgtggctcagtcagcaacctcagaactctgaaaaaacaaaacaaaaaaaaaaaaaaaagaaaaaaaaaacatgcacctgtttcactgtgaatagtgaatgtaaaggaaagaaaggaaaaactgaaagcttgttctatcacaggtatgagctgctatgatacatgaagaacattccatgaagtatgttttaaaaccttgttatatctgagaggctttaaaagcctattaactgtttcagggcaaccgcggtacagacgtggtctctgtgagacttccacctgaccccagttttaagtggtacgaatgttgtgcatttaatgttaaaggacagtctgcaataataaagtaagtagccaacctgggtgcccagcagtgctgagacctggctgctctattgtaagctttggaaacacaatttatgcaacagatgtccagatatgattctatttatggaaaaaagtttatatgtgttttacaaatggttttaccatcttatattaaaatgaccttttgacaggtgtgcactgttttgtctccagtgagcacataccatgcggattttatatgtacatcagtagtgtgaatccactggcacagtgtgtgtaaatgccagatgtggtgagattttatcttataaatgtgatcagataaaataactcctgacagaaactgtaaggaaaccagctgaatgtttgacctgatgactgatgttgtatggtttatgttaaatgtatattcttttaatcaatgaataaagcattaaaaatgatcattgtaatatattttattgtatatgaagcatgactacttttagtgttaaataaactgcaataatccttatattgtgtataataa

SEQ ID NO: 133625 - DNA, 405 bp, Homo sapiens
  Payload ID: 6115
  Gene Symbol: FBXO33
  Gene Name: F-box protein 33
  ENST ID: ENST00000554932
  CDS Start-End: 399-405
ctcccaccagcggcgacgtcaaactcagctcctaccacttctctgtctctgccgaccggcgcagggagggctgccttttccttacagtacgccttgaggcttccgggccgctgaagtttacgagcgagggcagtgcagttactcagtgtgccggcctcggacgcacgtgagtagagtttgagaagacagaggctggctcccggcaggcggcgggcgctgcgtcgctgcccagcgagctgatcgtgcacatcttctcttttctgccggcgcccgaccggctgcgggcctcggcctcctgctcgcactggcgtgagtgcctcttctatccggccctgtggccccagctccgcatctgcctccgcgtctcgcccgcggagcagcctcggctggaattcctcatgcgca

SEQ ID NO: 133626 - DNA, 534 bp, Homo sapiens
  Payload ID: 6115
  Gene Symbol: FBXO33
  Gene Name: F-box protein 33
  ENST ID: ENST00000554190
  CDS Start-End: 98-367
gcactggcgtgagtgcctcttctatccggccctgtggccccagctccgcatctgcctccgcgtctcgcccgcggagcagcctcggctggaattcctcatgcgcaagtgcggctggttcgtgcgagagctgcgtgttgaattcgccgccgagaactatctgagcggcggtggcccaggggacggaggtggcgcggacaccgggactggaggggaggaagtcgaggccctgcagctctcagctcgttggctggaagtgctgcgcacctacttggagctggtgctttgcgtgctggtcagcatccggaacaacaggttacacggtgtgggcacacaacctcattgccattgctcgtcttcggggctctgatctgaaagtgcttgaagtcaccgaagaaagcattgattttgaccaaggtgaactggccgaccaggatgtagatccagtgcataaccttattgagcaggtatccctgggcctgggtcaaccttggcatgcagtcatggacatcgaatcactcagtgtcttcactgaac

SEQ ID NO: 133627 - DNA, 3464 bp, Homo sapiens
  Payload ID: 6116
  Gene Symbol: FBXO34
  Gene Name: F-box protein 34
  Uniprot ID: Q9NWN3
  ENST ID: ENST00000313833
  CDS Start-End: 246-2381
ggatccgtggcccctcccccggccaaccgtcgattgggccggcgcgtgacgtcactccgttttagccaaacaaatgggtttcggggcgagcgttgggcgccgccgcgccgcgctgggtgctcggtccgactcagcggtggggagtgagccaggcctcccgccaccgctgctgccgccaccactgcgtcgggctggtgcagccccgggccaggccgcggccggggcaggagcgcaggggctttgttatgcacctaaagccatattggaagctccagaagaaagagcaccccccggaagtcagcagggaaacgcagagaactcctatgaaccaccaaaaggctgtaaatgatgaaacatgcaaagctagccacataacatcaagtgtctttccttcagcctctctcggtaaagcatcatctcgaaagccatttgggatcctttctccaaatgttctgtgcagtatgagtgggaagagtcctgtagagagcagcttgaatgttaaaaccaaaaagaatgcaccatctgcaacgatccaccagggcgaagaagaaggaccacttgatatctgggctgttgtgaaacctggaaataccaaggaaaaaattgcattctttgcatcccaccagtgtagtaacaggataggatctatgaaaataaaaagttcctgggatattgatgggagagctactaagagaaggaaaaaatcaggggatcttaaaaaagccaaggtacaggtggaaaggatgagggaggttaacagcaggtgctaccaacctgagccttttgcatgtggcattgagcactgttctgtgcactatgtgagtgacagtggggatggagtctatgctgggaggcctctgtcagttatacagatggttgccttcttggagcaaagagccagtgctctgctagctagctgttcaaaaaactgcacaaactcacctgcaattgtgaggttttctggccaatccagaggtgtgcctgcagtgtctgagtcctattctgccccaggagcttgtgaagaacccacagaaaggggaaatcttgaggttggtgaaccacagagcgaaccagtccgtgtccttgacatggtagccaagttggagtctgagtgcctgaagcggcagggccagcgtgagcctgggagcctctcaaggaataacagcttccgtcgaaatgtgggcagagtattgcttgcaaatagcactcaggctgatgaaggcaaaacaaagaaaggcgtcttggaggcacctgacactcaggtgaatcctgtggggtctgtatctgtggattgtggcccttcaagagctgatcgttgttctcctaaggaggaccaggcctgggacggtgcttctcaggactgccccccattgccagcaggagtgagtttccacatagacagtgcagagttagagccgggttcgcaaactgccgtgaaaaacagcaacagatatgatgtggaaatgacagatgaactcgttgggttacctttttcctctcatacctattcccaagcctctgaattgcccacagatgctgttgattgtatgagcagagagcttgtgtcccttactagccgaaatcctgatcaaagaaaagaatctttgtgcattagtatcactgtgtccaaggtagacaaagaccagccttccattttaaactcctgtgaagacccagttccagggatgttgttttttttgccacctggtcagcacttgtcagactattcccagttgaatgaaagcacaacaaaagagtcttcagaggccagccagcttgaagatgctgctgggggtgacagtgcatctgaggaaaaaagtgggtctgctgagccatttgtactgccagcctcttctgtggaaagtacattaccagtgcttgaggcatccagttggaagaagcaggtgtcgcatgacttcctggagaccaggtttaaaatccagcagcttttggagcctcagcagtacatggcttttctgccccaccacattatggtaaaaatcttcaggttacttcccaccaagagtttagtggcccttaaatgtacctgctgctatttcaagtttatcattgagtactacaatatcaggccagcagattctcgctgggttcgagatccacgctatagagaggatccttgcaaacagtgcaagaaaaagtatgtgaaaggggatgtgtccctgtgccgatggcaccccaagccctattgccaggcattgccctatgggccagggtattggatgtgctgccaccggtctcagaaaggattccctggctgtaagctggggcttcatgacaatcactgggttcctgcctgccacagctttaatcgggcaatccataagaaagcaaaagggactgaagctgaagaggaatactaaagtccatgtgagaggcaacaaaaggaccggtttctaaagctgcaaaacacctagatacaccgttcaaatgagcgtagccccctgagtcatcactctagaagaatctgtacatcatcaggactgcattgctcaggcattttctaaactctaaatttacgagctgtacaaaaaaattggtcttgttgtttatagtggcatctcatgtttgaacccgggtggtatcccacagttggattcagttggctgtgaataactgcctgttttcctaaatcaaacccatcctcaaaggatgaagactcaccaccatccaggacattcagaagagttcactgcagatgctgcaggtagtcctcaaaaatgggttccagaaatgttttgagcactggcaacatatttgaaataagtgaatattgtcctgtgaaaagaatagcaggacttttagatgaaaagtattcttaaaaagaaaagtcaggcaccccaccttagacctcgtatgcttgatcctgtgagattgatgtttgtggctggaggtggatttcatgccctgtggtgtttacagtgtatataatggttgtgttttcatggggctatgaaagtgcacgttaaacctgagcgcctttacctttagatgagtgctttggcccctctgtgaatagcacgattaaaatccagttgtatataatggacagctaacggaacaatataatcaccacaatgcagctaggatagtgttgcggctataattttgtgttttttttttttaattgtctagtcttaaatttgtacatcttgtataaaatatgaatgtttcccaaataaactatgaatgtttcctgtataatatatgaatgtttctgagaagaaactctaaatagttgaaaggctaacctgctcaaaggataccaaataatggtttaactggacaacctgaaaattagcatagaaaacaatcctttgttatattttagtgatccacaagattgagaaaatattatatagttagataataacattcttgtctactttatcctgtctggttacaaaattttttaaaacttaaataaaaacatgcatcttaaatgg

SEQ ID NO: 133628 - DNA, 2831 bp, Homo sapiens
  Payload ID: 6116
  Gene Symbol: FBXO34
  Gene Name: F-box protein 34
  Uniprot ID: Q9NWN3
  ENST ID: ENST00000440021
  CDS Start-End: 139-2274
gatgtcactgcaggcccgggcggggacctgggctcacggaagggccggggggacccgcagggtagaaaaaggaagttgtcttccacgaacgcttggaatcgcagtggatttgaatcgaaagttgttcggggctttgttatgcacctaaagccatattggaagctccagaagaaagagcaccccccggaagtcagcagggaaacgcagagaactcctatgaaccaccaaaaggctgtaaatgatgaaacatgcaaagctagccacataacatcaagtgtctttccttcagcctctctcggtaaagcatcatctcgaaagccatttgggatcctttctccaaatgttctgtgcagtatgagtgggaagagtcctgtagagagcagcttgaatgttaaaaccaaaaagaatgcaccatctgcaacgatccaccagggcgaagaagaaggaccacttgatatctgggctgttgtgaaacctggaaataccaaggaaaaaattgcattctttgcatcccaccagtgtagtaacaggataggatctatgaaaataaaaagttcctgggatattgatgggagagctactaagagaaggaaaaaatcaggggatcttaaaaaagccaaggtacaggtggaaaggatgagggaggttaacagcaggtgctaccaacctgagccttttgcatgtggcattgagcactgttctgtgcactatgtgagtgacagtggggatggagtctatgctgggaggcctctgtcagttatacagatggttgccttcttggagcaaagagccagtgctctgctagctagctgttcaaaaaactgcacaaactcacctgcaattgtgaggttttctggccaatccagaggtgtgcctgcagtgtctgagtcctattctgccccaggagcttgtgaagaacccacagaaaggggaaatcttgaggttggtgaaccacagagcgaaccagtccgtgtccttgacatggtagccaagttggagtctgagtgcctgaagcggcagggccagcgtgagcctgggagcctctcaaggaataacagcttccgtcgaaatgtgggcagagtattgcttgcaaatagcactcaggctgatgaaggcaaaacaaagaaaggcgtcttggaggcacctgacactcaggtgaatcctgtggggtctgtatctgtggattgtggcccttcaagagctgatcgttgttctcctaaggaggaccaggcctgggacggtgcttctcaggactgccccccattgccagcaggagtgagtttccacatagacagtgcagagttagagccgggttcgcaaactgccgtgaaaaacagcaacagatatgatgtggaaatgacagatgaactcgttgggttacctttttcctctcatacctattcccaagcctctgaattgcccacagatgctgttgattgtatgagcagagagcttgtgtcccttactagccgaaatcctgatcaaagaaaagaatctttgtgcattagtatcactgtgtccaaggtagacaaagaccagccttccattttaaactcctgtgaagacccagttccagggatgttgttttttttgccacctggtcagcacttgtcagactattcccagttgaatgaaagcacaacaaaagagtcttcagaggccagccagcttgaagatgctgctgggggtgacagtgcatctgaggaaaaaagtgggtctgctgagccatttgtactgccagcctcttctgtggaaagtacattaccagtgcttgaggcatccagttggaagaagcaggtgtcgcatgacttcctggagaccaggtttaaaatccagcagcttttggagcctcagcagtacatggcttttctgccccaccacattatggtaaaaatcttcaggttacttcccaccaagagtttagtggcccttaaatgtacctgctgctatttcaagtttatcattgagtactacaatatcaggccagcagattctcgctgggttcgagatccacgctatagagaggatccttgcaaacagtgcaagaaaaagtatgtgaaaggggatgtgtccctgtgccgatggcaccccaagccctattgccaggcattgccctatgggccagggtattggatgtgctgccaccggtctcagaaaggattccctggctgtaagctggggcttcatgacaatcactgggttcctgcctgccacagctttaatcgggcaatccataagaaagcaaaagggactgaagctgaagaggaatactaaagtccatgtgagaggcaacaaaaggaccggtttctaaagctgcaaaacacctagatacaccgttcaaatgagcgtagccccctgagtcatcactctagaagaatctgtacatcatcaggactgcattgctcaggcattttctaaactctaaatttacgagctgtacaaaaaaattggtcttgttgtttatagtggcatctcatgtttgaacccgggtggtatcccacagttggattcagttggctgtgaataactgcctgttttcctaaatcaaacccatcctcaaaggatgaagactcaccaccatccaggacattcagaagagttcactgcagatgctgcaggtagtcctcaaaaatgggttccagaaatgttttgagcactggcaacatatttgaaataagtgaatattgtcctgtgaaaagaatagcaggacttttagatgaaaagtattcttaaaaagaaaagtcaggcaccccaccttagacctcgtatgcttgatcctgtgagattgatgtttgtggctggaggtggatttcatgccctgtggtgtttac

SEQ ID NO: 133629 - DNA, 2512 bp, Homo sapiens
  Payload ID: 6116
  Gene Symbol: FBXO34
  Gene Name: F-box protein 34
  ENST ID: ENST00000555280
  CDS Start-End: 5-1738
atctatgaaaataaaaagttcctgggatattgatgggagagctactaagagaaggaaaaaatcaggggatcttaaaaaagccaaggtacaggtggaaaggatgagggaggttaacagcaggtgctaccaacctgagccttttgcatgtggcattgagcactgttctgtgcactatgtgagtgacagtggggatggagtctatgctgggaggcctctgtcagttatacagatggttgccttcttggagcaaagagccagtgctctgctagctagctgttcaaaaaactgcacaaactcacctgcaattgtgaggttttctggccaatccagaggtgtgcctgcagtgtctgagtcctattctgccccaggagcttgtgaagaacccacagaaaggggaaatcttgaggttggtgaaccacagagcgaaccagtccgtgtccttgacatggtagccaagttggagtctgagtgcctgaagcggcagggccagcgtgagcctgggagcctctcaaggaataacagcttccgtcgaaatgtgggcagagtattgcttgcaaatagcactcaggctgatgaaggcaaaacaaagaaaggcgtcttggaggcacctgacactcaggtgaatcctgtggggtctgtatctgtggattgtggcccttcaagagctgatcgttgttctcctaaggaggaccaggcctgggacggtgcttctcaggactgccccccattgccagcaggagtgagtttccacatagacagtgcagagttagagccgggttcgcaaactgccgtgaaaaacagcaacagatatgatgtggaaatgacagatgaactcgttgggttacctttttcctctcatacctattcccaagcctctgaattgcccacagatgctgttgattgtatgagcagagagcttgtgtcccttactagccgaaatcctgatcaaagaaaagaatctttgtgcattagtatcactgtgtccaaggtagacaaagaccagccttccattttaaactcctgtgaagacccagttccagggatgttgttttttttgccacctggtcagcacttgtcagactattcccagttgaatgaaagcacaacaaaagagtcttcagaggccagccagcttgaagatgctgctgggggtgacagtgcatctgaggaaaaaagtgggtctgctgagccatttgtactgccagcctcttctgtggaaagtacattaccagtgcttgaggcatccagttggaagaagcaggtgtcgcatgacttcctggagaccaggtttaaaatccagcagcttttggagcctcagcagtacatggcttttctgccccaccacattatggtaaaaatcttcaggttacttcccaccaagagtttagtggcccttaaatgtacctgctgctatttcaagtttatcattgagtactacaatatcaggccagcagattctcgctgggttcgagatccacgctatagagaggatccttgcaaacagtgcaagaaaaagtatgtgaaaggggatgtgtccctgtgccgatggcaccccaagccctattgccaggcattgccctatgggccagggtattggatgtgctgccaccggtctcagaaaggattccctggctgtaagctggggcttcatgacaatcactgggttcctgcctgccacagctttaatcgggcaatccataagaaagcaaaagggactgaagctgaagaggaatactaaagtccatgtgagaggcaacaaaaggaccggtttctaaagctgcaaaacacctagatacaccgttcaaatgagcgtagccccctgagtcatcactctagaagaatctgtacatcatcaggactgcattgctcaggcattttctaaactctaaatttacgagctgtacaaaaaaattggtcttgttgtttatagtggcatctcatgtttgaacccgggtggtatcccacagttggattcagttggctgtgaataactgcctgttttcctaaatcaaacccatcctcaaaggatgaagactcaccaccatccaggacattcagaagagttcactgcagatgctgcagatcagccactcttgatctggttttcatgtgggacacaaagctgtgactgcgtgaggggttaaagtgaccaagagcagagggcacacccttacttgatcatctgaagcaaaaaccagaaccagggaaactagaggaggagtcagggagctgctgctcctattcctggagtggttcacctctcccctgcccagtggatggtccagacccaaggaaggagtgaattgaaagctaaggaggggctcagagacagcttcttacacctcatgagccaacctctgctagcttttgactttccttctgcagcttcctcacttctctcaaccatcagagaattaaagagatagggcgttgttctgggtaaggctttgacttaaggtaatgtggctggtttcatctatctagaccactaaagctttctccgtatcagcaa

SEQ ID NO: 133630 - DNA, 2810 bp, Homo sapiens
  Payload ID: 6117
  Gene Symbol: FBXO36
  Gene Name: F-box protein 36
  Uniprot ID: Q8NEA4
  ENST ID: ENST00000283946
  CDS Start-End: 19-585
cggcggtggcgtcccaagatggcgtcgtggctgccggagactctctttgaaactgtaggacaaggcccgccgcctagcaaagactattaccagttactggtcacccggtctcaggtaatctttagatggtggaagatctctctaaggagtgagtatcgatcaacaaaacctggagaagcaaaagaaacccatgaagacttcctagagaattcacatcttcaaggtcaaactgccttaatatttggtgcaagaatattagactatgtcatcaatttgtgcaaaggtaaatttgacttccttgaacggctctcagacgatttgctcctgactatcatttcttatctggatcttgaagatattgccaggctttgtcaaacatcacacagatttgcaaagctgtgcatgtctgataaactgtgggaacagatagtccagtcgacctgcgacaccatcactcctgacgtgagggccctggcggaggacacaggctggagacagctgttcttcaccaacaagctccagctccagcggcagctccgcaagaggaaacaaaaatatggaaacctgagagaaaagcaaccttaggcacacattttcctaccagcagggagctcaggcatggctgtgtttctcttcagtgtccaaatctcttctgtctccttttcttaagaactaagaggttttgttgatgcgtggagccatttgaaactcgtaggggatttgcacacaaatgcagcagagtctggctccccagtgccttgctagagtcaccgtcattctgaggtcaaatcatggcccgaggacaagggctgtaagacagggagccccataggccatcatcatccttatcccacacccattataaaagaggtttctattgtatataaacaaacaataaatgattattagcaggtttttattagacatctattttatctaggcattagaaagggtaatggggcttttgaattttttcctggcattgtgtcgtctgcgtccagccatgaagctggtggctgagtgtccccaccaggaactgtgaagggcacgtaccacgggaggcactcagggtgggtgcagctgccttcccaactttgttctgctaagtccatattcagggccctatccttgtgagcccaggatgccagggtccatccccgcatgtagacagcttccgacctggtgctggagcatgactggagaagtgcaggcatcctgcttgcggaccttgctcaaagtacaacttcccaggactacttcacattgttaaataaacctataaacatttcttttcttttctttttttttttttttttgtattttctttttagtagaggtggagtttcgccatgtaggccaggctggtcttgaactcctgacctcaagtgatctacctgctctggcttccaaagtgctgggattacaggcatgagccactatgtctggctaaaacctataaacatttcttagagaaatgctgttccccaaaggaatgtgaacagctaccacttttaacaaggatatttaagaaaacagactatgagttaactaagtaaaaatgtaaatatggtttgcatgctgttaacatggcagaggggtaaaaagaatacagtcctggggagaaaggtcacttcactgagaaggcttacttaaaaatgtttttctccctgcactttcatgattattaagtacccctagaaaatgaactcatagcagcaaataatctaatgactccttttaggttacagagcaaagtagctttctacttccacatcacattataatatagccttataatttcttctttcctgcaaccttcactttcctacctaggaaaactcacctccggtgccagagaaacttcccaggatgcactagggccctgtgaacaatacagaagttgtggactctggctctttgtcccacctaagtccttccagaagggctctacagcatggcttagtgacattaaaaaaaaaaactgaacccatgttaatatcaaacaagattttaatcttcattcacacacccttaaaacccagtcacggggctccccggtgccagtttgagaccgtcaacctagccctctctgcttctcattgctggaggtacacacagtcaaaagttttccgtgactgtgaaatccagtgcaatctgcttcccagcagatgaggagcctgacgtggttatgtctggatttagtccaagaacagagcaaagctttaattgtcaagagacccaggcctcattctccacttaggagagtttgctagggcaggtacaggtaaaggtaaccagcaggcagctgagagcaagaaggcacgtgctctgcagagctctagctgccttggctctccctgagctcccagacttcactcatggcctaattttcaatgacagaacgtaggttttatcgtgaggatgcagacacaaccacaattacgtatgtcaacataacttcataaatatgtaactgtaacttattggtaacatcagtgcaagatgattaaagcttcatgtgtagtattttatcaacaaacagattctgaaagcttatggacatgcgcaatagttgattcagcttcaatcaataagaacataaatatggcaatttgaaaacactatgtatatacctactcacatatatattatacttacgatatatacttatatgtagtatataataatattacatataaaaatgttataaaaataaatgctaaagtaaataaaaaaagagccattaatatgttaactattgttaaataatagctaaaataatacagattattaaattattttaatactta

SEQ ID NO: 133631 - DNA, 3120 bp, Homo sapiens
  Payload ID: 6117
  Gene Symbol: FBXO36
  Gene Name: F-box protein 36
  Uniprot ID: Q8NEA4
  ENST ID: ENST00000373652
  CDS Start-End: 422-895
aattccccctcgggtcacccgggacctggagctggaaatttcacggatcagggttccctaagacccttggaagaggggacgatcgccccaagttagaaatccttctgccagctcataagcgtggttcaatttaaactagggttttggccccttgaccccaaccaagccccgccccttcctggttgtcttagcgacggcggtggcgtcccaagatggcgtcgtggctgccggagactctctttgaaactgtaggacaaggcccgccgcctagcaaagactattaccagttactggtcacccggtctcagaaaaattgagtttgcatagccgggcgcagtggcttacgcctgtaatcccagcactttgggaggccgagccaggtggatcacgacgtctggagttggagaccagcctgacaaacatggtaatctttagatggtggaagatctctctaaggagtgagtatcgatcaacaaaacctggagaagcaaaagaaacccatgaagacttcctagagaattcacatcttcaaggtcaaactgccttaatatttggtgcaagaatattagactatgtcatcaatttgtgcaaaggtaaatttgacttccttgaacggctctcagacgatttgctcctgactatcatttcttatctggatcttgaagatattgccaggctttgtcaaacatcacacagatttgcaaagctgtgcatgtctgataaactgtgggaacagatagtccagtcgacctgcgacaccatcactcctgacgtgagggccctggcggaggacacaggctggagacagctgttcttcaccaacaagctccagctccagcggcagctccgcaagaggaaacaaaaatatggaaacctgagagaaaagcaaccttaggcacacattttcctaccagcagggagctcaggcatggctgtgtttctcttcagtgtccaaatctcttctgtctccttttcttaagaactaagaggttttgttgatgcgtggagccatttgaaactcgtaggggatttgcacacaaatgcagcagagtctggctccccagtgccttgctagagtcaccgtcattctgaggtcaaatcatggcccgaggacaagggctgtaagacagggagccccataggccatcatcatccttatcccacacccattataaaagaggtttctattgtatataaacaaacaataaatgattattagcaggtttttattagacatctattttatctaggcattagaaagggtaatggggcttttgaattttttcctggcattgtgtcgtctgcgtccagccatgaagctggtggctgagtgtccccaccaggaactgtgaagggcacgtaccacgggaggcactcagggtgggtgcagctgccttcccaactttgttctgctaagtccatattcagggccctatccttgtgagcccaggatgccagggtccatccccgcatgtagacagcttccgacctggtgctggagcatgactggagaagtgcaggcatcctgcttgcggaccttgctcaaagtacaacttcccaggactacttcacattgttaaataaacctataaacatttcttttcttttctttttttttttttttttgtattttctttttagtagaggtggagtttcgccatgtaggccaggctggtcttgaactcctgacctcaagtgatctacctgctctggcttccaaagtgctgggattacaggcatgagccactatgtctggctaaaacctataaacatttcttagagaaatgctgttccccaaaggaatgtgaacagctaccacttttaacaaggatatttaagaaaacagactatgagttaactaagtaaaaatgtaaatatggtttgcatgctgttaacatggcagaggggtaaaaagaatacagtcctggggagaaaggtcacttcactgagaaggcttacttaaaaatgtttttctccctgcactttcatgattattaagtacccctagaaaatgaactcatagcagcaaataatctaatgactccttttaggttacagagcaaagtagctttctacttccacatcacattataatatagccttataatttcttctttcctgcaaccttcactttcctacctaggaaaactcacctccggtgccagagaaacttcccaggatgcactagggccctgtgaacaatacagaagttgtggactctggctctttgtcccacctaagtccttccagaagggctctacagcatggcttagtgacattaaaaaaaaaaactgaacccatgttaatatcaaacaagattttaatcttcattcacacacccttaaaacccagtcacggggctccccggtgccagtttgagaccgtcaacctagccctctctgcttctcattgctggaggtacacacagtcaaaagttttccgtgactgtgaaatccagtgcaatctgcttcccagcagatgaggagcctgacgtggttatgtctggatttagtccaagaacagagcaaagctttaattgtcaagagacccaggcctcattctccacttaggagagtttgctagggcaggtacaggtaaaggtaaccagcaggcagctgagagcaagaaggcacgtgctctgcagagctctagctgccttggctctccctgagctcccagacttcactcatggcctaattttcaatgacagaacgtaggttttatcgtgaggatgcagacacaaccacaattacgtatgtcaacataacttcataaatatgtaactgtaacttattggtaacatcagtgcaagatgattaaagcttcatgtgtagtattttatcaacaaacagattctgaaagcttatggacatgcgcaatagttgattcagcttcaatcaataagaacataaatatggcaatttgaaaacactatgtatatacctactcacatatatattatacttacgatatatacttatatgtagtatataataatattacatataaaaatgttataaaaataaatgctaaagtaaataaaaaaagagccattaatatgttaactattgttaaataatagctaaaataatacagattattaaattattttaatactta

SEQ ID NO: 133632 - DNA, 1911 bp, Homo sapiens
  Payload ID: 6117
  Gene Symbol: FBXO36
  Gene Name: F-box protein 36
  ENST ID: ENST00000409992
  CDS Start-End: 9-515
gtcccaagatggcgtcgtggctgccggagactctctttgaaactgtaggacaaggcccgccgcctagcaaagactattaccagttactggtcacccggtctcaggtaatctttagatggtggaagatctctctaaggagtgagtatcgatcaacaaaacctggagaagcaaaagaaacccatgaagacttcctagagaattcacatcttcaaggtaaatttgacttccttgaacggctctcagacgatttgctcctgactatcatttcttatctggatcttgaagatattgccaggctttgtcaaacatcacacagatttgcaaagctgtgcatgtctgataaactgtgggaacagatagtccagtcgacctgcgacaccatcactcctgacgtgagggccctggcggaggacacaggctggagacagctgttcttcaccaacaagctccagctccagcggcagctccgcaagaggaaacaaaaatatggaaacctgagagaaaagcaaccttaggcacacattttcctaccagcagggagctcaggcatggctgtgtttctcttcagtgtccaaatctcttctgtctccttttcttaagaactaagaggttttgttgatgcgtggagccatttgaaactcgtaggggatttgcacacaaatgcagcagagtctggctccccagtgccttgctagagtcaccgtcattctgaggtcaaatcatggcccgaggacaagggctgtaagacagggagccccataggccatcatcatccttatcccacacccattataaaagaggtttctattgtatataaacaaacaataaatgattattagcaggtttttattagacatctattttatctaggcattagaaagggtaatggggcttttgaattttttcctggcattgtgtcgtctgcgtccagccatgaagctggtggctgagtgtccccaccaggaactgtgaagggcacgtaccacgggaggcactcagggtgggtgcagctgccttcccaactttgttctgctaagtccatattcagggccctatccttgtgagcccaggatgccagggtccatccccgcatgtagacagcttccgacctggtgctggagcatgactggagaagtgcaggcatcctgcttgcggaccttgctcaaagtacaacttcccaggactacttcacattgttaaataaacctataaacatttcttttcttttctttttttttttttttttgtattttctttttagtagaggtggagtttcgccatgtaggccaggctggtcttgaactcctgacctcaagtgatctacctgctctggcttccaaagtgctgggattacaggcatgagccactatgtctggctaaaacctataaacatttcttagagaaatgctgttccccaaaggaatgtgaacagctaccacttttaacaaggatatttaagaaaacagactatgagttaactaagtaaaaatgtaaatatggtttgcatgctgttaacatggcagaggggtaaaaagaatacagtcctggggagaaaggtcacttcactgagaaggcttacttaaaaatgtttttctccctgcactttcatgattattaagtacccctagaaaatgaactcatagcagcaaataatctaatgactccttttaggttacagagcaaagtagctttctacttccacatcacattataatatagccttataatttcttctttcctgcaaccttcactttcctacctaggaaaactcacctccggtgccagagaaacttcccaggatgcactagggccctgtgaacaatacagaagttgtggactctggctctttgtcccacctaagtccttccagaagggctctacagcatggcttagtgacattaaaaaaaaaaa

SEQ ID NO: 133633 - DNA, 3680 bp, Homo sapiens
  Payload ID: 6118
  Gene Symbol: FBXO38
  Gene Name: F-box protein 38
  Uniprot ID: Q6PIJ6
  ENST ID: ENST00000296701
  CDS Start-End: 169-3000
atgcgagcggcggcggaagcggaagtgcctcagcggtaggggccggggaagtgtctgtagcgtccctccctctcaaccacaataacaggcggagggtcggcgtaggtactttgaactcaagtaaacaaaagggaagattttctcgttgatactggagactgcacaacaatggggccacgaaagaaaagtgtgaaaacatgtatcatgaataatgaaattccagaagaaatgacagcagatgaaacaaaggactatatgaatcaactttcacatgaagtactttgccatatttttaggtacctccctctgcaggatatcatgtgtatggaatgtctttcccggaagctaaaggaagcagtgaccctatatctgcgagttgtgagagttgtagatctctgtgcagggcggtggtgggaatacatgccaagtggctttacagatgccagttttctaacactattaaagaagatgccagatgttgaacagctatatggccttcaccctcgataccttgagaggcgaagagtaaggggccatgaggcttttagcattccaggagtcctagaagctttgcaggcatgcccaaacttagtgggtgtggaaacttctcatttggagttggtagaatccatttggacatatatgccccatgttcatattttggggaaatttcgtaatcgtaatggagcttttccaattcctcctgaaaataaactgaaaattcctataggagccaaaattcaaactttacatttagttggggtgaatgttcctgaaattccttgtatcccaatgctaaggcacctttatatgaagtgggtaagactcactaaaccacagccatttaaagacttcctttgtatcagcttaagaactttcgtcatgaggaactgtgcaggacccacaaattccttgaaatatgtccctttagtaacaggcttagcctctgcccgaaacttggaacacttagaaatggttcgagttcctttccttggaggtcttatccaacatgttgttgaagacagttggagatcaggtggttttagaaatttgcacactattgttctgggagcttgcaaaaatgctcttgaagtagatcttggttacctcatcattactgctgcccgtaggttacatgaagttcggatccagccttccctaaccaaagatggtgtcttttctgccctaaagatggcagagttggagtttccccagtttgaaacccttcatctaggatatgtagatgagtttttgctacagagcagaatggctaatgcggatctggtgaagtatggtttggctgatgtggtagaaaatcctggtatcatcactgatatagggatgaaagcagtcaatgaagttttttcctgtatcaaatatctggcaatttacaattgccctcatctacacaacccatacaattggatctcagaccactcaagatggactcgattggttgatatcaacctagtacggtgccatgctttgaagctggactcttttggccagtttattgaattattacccagcctagagtttatttcactggatcagatgtttcgtgaaccacccaagggttgtgctcgagttggtctgagtgcaggcacaggaattggtgtttcatcagctcttgttagcaaccagaactccaacaatgacgataataatgcccagaataacaatgccaacatccacgacaacaatcaccatcatccagatgactcagacgaggagaatgactttcggcaagatctgcagccaggagagcagcagtttgcagctgacgcattaaatgagatggaagacatcgtccaagaagatggagaggtggtggccgagagtggaaataatactccagctcacagccaggcaattattcctgtggatgttgatgaggaacaagcaggacccagtggtcttcagcgtgtagtaaaaccaacctcaattactgttcatgattcagagagtgatgatgaagaagatagtctagaactccaagaagtctggattcctaagaacggtactcggcgttactctgaacgtgaagaaaaaactggagagtcagtgcagtccagagaattgtcagaagtagccaaaacaaagccacgtcacgccatgaaacggaagcggacagcagataaatccactagtacaagtgatcctgtgatcgaggatgaccatgtgcaggttcttgtattaaaatccaagaatcttgttggagtcactatgaccaattgtggaatcacagatctagtgctaaaagactgtccaaagatgatgttcatccatgctaccaggtgcagggtactaaaacatttaaaggtagaaaatgcaccaattgtaaaccgatttgactatgcacagtgcaagaaactgaacatggatcaggtactagaccagatactaagaatgccacccgagagaaaccgcatcatatacctacgcccaatgcagcaggtggacactctaactttggagcagaagctatttagtggtccctacccctatcacatctgtattatccatgaattcagtaaccctcccaatgtccggaataaggtgcgcattcgcagctggatggacactatagcaaacatcaatcaagagctcattaaatatgaattcttccctgaagccactcgaagtgaagaagacttaaagaaataccccaagtacccctgggggagagaaatctatactttagaaggtgttgtggatggagctccatattccatgatttctgacttcccttggctgaggtcattacgagctgcagagcccaacagcttcgctcgatacgactttgaagacgatgaagaaagcactatctatgctcctagaaggaaaggacagctgtctgcagacatctgtatggaaacaataggagaggaaatttcagagatgcgtcagatgaagaagggtgtatttcagcgagtagtggcaatttttatccactattgtgatgtcaatggagagccagttgaagatgactacatttaattggtccctcctcctttccagctattttgtcagaaagcaagtagggccatccagctgccagagtgctccacagggacttgaggcatgcagttgggaggtcctggctcggtttgctatatagggaatatataaggaacatcgaaattgtatacaaagatttgtacataaaaaatatacaaagacgcttcctaaagtaccaactttatatcatatgtttatacaatttaatttaaaaattcattttaaggaagacagataatttgaaagacttttgtttttcttgacttaattcatgaagtatcattttttgactgagtctccatttacttcattcttaatgattattgtcatccctttaaatctgtgcctttttcttcttgagcgaagctgtttgagtaaacctgttgaagagtgtttgtgtcttttgtgcttttttgttgttattaaaacaccaactaaaccttatagtcaagacaaggctctatgtttctgtacaaagctgtagttctttcttagtattatagttgccatgtttcttaaaatcaagtaaaaagacttatgagcttaaaaaaaagtgagtttgagagggaaatggaaaagtttccagagtatttctagtaatttatttccacattgaattgtgtatatgctttatcttgaatataaaataaaagtttatt

SEQ ID NO: 133634 - DNA, 4424 bp, Homo sapiens
  Payload ID: 6118
  Gene Symbol: FBXO38
  Gene Name: F-box protein 38
  Uniprot ID: Q6PIJ6
  ENST ID: ENST00000340253
  CDS Start-End: 169-3735
atgcgagcggcggcggaagcggaagtgcctcagcggtaggggccggggaagtgtctgtagcgtccctccctctcaaccacaataacaggcggagggtcggcgtaggtactttgaactcaagtaaacaaaagggaagattttctcgttgatactggagactgcacaacaatggggccacgaaagaaaagtgtgaaaacatgtatcatgaataatgaaattccagaagaaatgacagcagatgaaacaaaggactatatgaatcaactttcacatgaagtactttgccatatttttaggtacctccctctgcaggatatcatgtgtatggaatgtctttcccggaagctaaaggaagcagtgaccctatatctgcgagttgtgagagttgtagatctctgtgcagggcggtggtgggaatacatgccaagtggctttacagatgccagttttctaacactattaaagaagatgccagatgttgaacagctatatggccttcaccctcgataccttgagaggcgaagagtaaggggccatgaggcttttagcattccaggagtcctagaagctttgcaggcatgcccaaacttagtgggtgtggaaacttctcatttggagttggtagaatccatttggacatatatgccccatgttcatattttggggaaatttcgtaatcgtaatggagcttttccaattcctcctgaaaataaactgaaaattcctataggagccaaaattcaaactttacatttagttggggtgaatgttcctgaaattccttgtatcccaatgctaaggcacctttatatgaagtgggtaagactcactaaaccacagccatttaaagacttcctttgtatcagcttaagaactttcgtcatgaggaactgtgcaggacccacaaattccttgaaatatgtccctttagtaacaggcttagcctctgcccgaaacttggaacacttagaaatggttcgagttcctttccttggaggtcttatccaacatgttgttgaagacagttggagatcaggtggttttagaaatttgcacactattgttctgggagcttgcaaaaatgctcttgaagtagatcttggttacctcatcattactgctgcccgtaggttacatgaagttcggatccagccttccctaaccaaagatggtgtcttttctgccctaaagatggcagagttggagtttccccagtttgaaacccttcatctaggatatgtagatgagtttttgctacagagcagaatggctaatgcggatctggtgaagtatggtttggctgatgtggtagaaaatcctggtatcatcactgatatagggatgaaagcagtcaatgaagttttttcctgtatcaaatatctggcaatttacaattgccctcatctacacaacccatacaattggatctcagaccactcaagatggactcgattggttgatatcaacctagtacggtgccatgctttgaagctggactcttttggccagtttattgaattattacccagcctagagtttatttcactggatcagatgtttcgtgaaccacccaagggttgtgctcgagttggtctgagtgcaggcacaggaattggtgtttcatcagctcttgttagcaaccagaactccaacaatgacgataataatgcccagaataacaatgccaacatccacgacaacaatcaccatcatccagatgactcagacgaggagaatgactttcggcaagatctgcagccaggagagcagcagtttgcagctgacgcattaaatgagatggaagacatcgtccaagaagatggagaggtggtggccgagagtggaaataatactccagctcacagccaggcaattattcctgtggatgttgatgaggaacaagcaggacccagtggtcttcagcgtgtagtaaaaccaacctcaattactgttcatgattcagagagtgatgatgaagaagatagtctagaactccaagaagtctggattcctaagaacggtactcggcgttactctgaacgtgaagaaaaaactggagagtcagtgcagtccagagaattgtcagtaagtggaaaaggcaagactccacttcgaaagaggtacaactcccatcagatgggccagtcgaagcagtttcccctcgaggaaagcagctgtgagaaaggctgtcaggtcaccagtgagcagatcaaagccgatatgaaagcagctagggatattcctgaaaagaaaaaaaacaaggatgtttatcccagctgcagcagcaccaccgccagcacagtgggaaactccagctcacacaacactgcttctcaaagccccgactttgtaaggacggtgaacagcggcggctcttccgagcctagccctacagaagtggatgtgtccaggcagtgtgcctgctcccccggtgggtcagaggactctgaggccatggaggagggagatgcagagagttctgtctgccccagatgctgctgtcacaggccccaggaatcccaaaggagaactagcaggtgttctgatgaggaacgtccttcaaccagccgagcctgtgttgtgaatggcccggatggtacgagatccgccttttcctttaggactctgccacaaggggggtcttcaggcccagcacatgatgagaggactaatgggagtggctctggggctacaggtgaggacaggagggggagctcccagcctgagagttgtgacgtgcagtctaatgaagactaccctcggaggcccctaaccagggccaggagcagactgtcccatgtactgctggtatctgagtcagaagtagccaaaacaaagccacgtcacgccatgaaacggaagcggacagcagataaatccactagtacaagtgatcctgtgatcgaggatgaccatgtgcaggttcttgtattaaaatccaagaatcttgttggagtcactatgaccaattgtggaatcacagatctagtgctaaaagactgtccaaagatgatgttcatccatgctaccaggtgcagggtactaaaacatttaaaggtagaaaatgcaccaattgtaaaccgatttgactatgcacagtgcaagaaactgaacatggatcaggtactagaccagatactaagaatgccacccgagagaaaccgcatcatatacctacgcccaatgcagcaggtggacactctaactttggagcagaagctatttagtggtccctacccctatcacatctgtattatccatgaattcagtaaccctcccaatgtccggaataaggtgcgcattcgcagctggatggacactatagcaaacatcaatcaagagctcattaaatatgaattcttccctgaagccactcgaagtgaagaagacttaaagaaataccccaagtacccctgggggagagaaatctatactttagaaggtgttgtggatggagctccatattccatgatttctgacttcccttggctgaggtcattacgagctgcagagcccaacagcttcgctcgatacgactttgaagacgatgaagaaagcactatctatgctcctagaaggaaaggacagctgtctgcagacatctgtatggaaacaataggagaggaaatttcagagatgcgtcagatgaagaagggtgtatttcagcgagtagtggcaatttttatccactattgtgatgtcaatggagagccagttgaagatgactacatttaattggtccctcctcctttccagctattttgtcagaaagcaagtagggccatccagctgccagagtgctccacagggacttgaggcatgcagttgggaggtcctggctcggtttgctatatagggaatatataaggaacatcgaaattgtatacaaagatttgtacataaaaaatatacaaagacgcttcctaaagtaccaactttatatcatatgtttatacaatttaatttaaaaattcattttaaggaagacagataatttgaaagacttttgtttttcttgacttaattcatgaagtatcattttttgactgagtctccatttacttcattcttaatgattattgtcatccctttaaatctgtgcctttttcttcttgagcgaagctgtttgagtaaacctgttgaagagtgtttgtgtcttttgtgcttttttgttgttattaaaacaccaactaaaccttatagtcaagacaaggctctatgtttctgtacaaagctgtagttctttcttagtattatagttgccatgtttcttaaaatcaagtaaaaagacttatgagcttaaaaaaaagtgagtttgagagggaaatggaaaagtttccagagtatttctagtaatttatttccacattgaattgtgtatatgctttatcttgaatataaaataaaagtttattaaaaacttt

SEQ ID NO: 133635 - DNA, 4132 bp, Homo sapiens
  Payload ID: 6118
  Gene Symbol: FBXO38
  Gene Name: F-box protein 38
  Uniprot ID: Q6PIJ6
  ENST ID: ENST00000394370
  CDS Start-End: 102-3443
ccctctcaaccacaataacaggcggagggtcggcgtaggtactttgaactcaagtaaacaaaagggaagattttctcgttgatactggagactgcacaacaatggggccacgaaagaaaagtgtgaaaacatgtatcatgaataatgaaattccagaagaaatgacagcagatgaaacaaaggactatatgaatcaactttcacatgaagtactttgccatatttttaggtacctccctctgcaggatatcatgtgtatggaatgtctttcccggaagctaaaggaagcagtgaccctatatctgcgagttgtgagagttgtagatctctgtgcagggcggtggtgggaatacatgccaagtggctttacagatgccagttttctaacactattaaagaagatgccagatgttgaacagctatatggccttcaccctcgataccttgagaggcgaagagtaaggggccatgaggcttttagcattccaggagtcctagaagctttgcaggcatgcccaaacttagtgggtgtggaaacttctcatttggagttggtagaatccatttggacatatatgccccatgttcatattttggggaaatttcgtaatcgtaatggagcttttccaattcctcctgaaaataaactgaaaattcctataggagccaaaattcaaactttacatttagttggggtgaatgttcctgaaattccttgtatcccaatgctaaggcacctttatatgaagtgggtaagactcactaaaccacagccatttaaagacttcctttgtatcagcttaagaactttcgtcatgaggaactgtgcaggacccacaaattccttgaaatatgtccctttagtaacaggcttagcctctgcccgaaacttggaacacttagaaatggttcgagttcctttccttggaggtcttatccaacatgttgttgaagacagttggagatcaggtggttttagaaatttgcacactattgttctgggagcttgcaaaaatgctcttgaagtagatcttggttacctcatcattactgctgcccgtaggttacatgaagttcggatccagccttccctaaccaaagatggtgtcttttctgccctaaagatggcagagttggagtttccccagtttgaaacccttcatctaggatatgtagatgagtttttgctacagagcagaatggctaatgcggatctggtgaagtatggtttggctgatgtggtagaaaatcctggtatcatcactgatatagggatgaaagcagtcaatgaagttttttcctgtatcaaatatctggcaatttacaattgccctcatctacacaacccatacaattggatctcagaccactcaagatggactcgattggttgatatcaacctagtacggtgccatgctttgaagctggactcttttggccagtttattgaattattacccagcctagagtttatttcactggatcagatgtttcgtgaaccacccaagggttgtgctcgagttggtctgagtgcaggcacaggaattggtgtttcatcagctcttgttagcaaccagaactccaacaatgacgataataatgcccagaataacaatgccaacatccacgacaacaatcaccatcatccagatgactcagacgaggagaatgactttcggcaagatctgcagccaggagagcagcagtttgcagctgacgcattaaatgagatggaagacatcgtccaagaagatggagaggtggtggccgagagtggaaataatactccagctcacagccaggcaattattcctgtggatgttgatgaggaacaagcaggacccagtggtcttcagcgtgtagtaaaaccaacctcaattactgttcatgattcagagagtgatgatgaagaagatagtctagaactccaagaagtctggattcctaagaacggtactcggcgttactctgaacgtgaagaaaaaactggagagtcagtgcagtccagagaattgtcagtaagtggaaaaggcaagactccacttcgaaagaggtacaactcccatcagatgggccagtcgaagcagtttcccctcgaggaaagcagctgtgagaaaggctgtcaggtcaccagtgagcagatcaaagccgatatgaaagcagctagggatattcctgaaaagaaaaaaaacaaggatgtttatcccagctgcagcagcaccaccgccagcacagtgggaaactccagctcacacaacactgcttctcaaagccccgactttgtaaggacggtgaacagcggcggctcttccgagcctagccctacagaagtggatgtgtccaggcagtgtgcctgctcccccggtgggtcagaggactctgaggccatggaggagggagatgcagagagttctgtctgccccagatgctgctgtcacaggccccaggaatcccaaaggagaactagcaggtgttctgatgaggaacgtccttcaaccagccgagcctgtgttgtgaatggcccggatgaagtagccaaaacaaagccacgtcacgccatgaaacggaagcggacagcagataaatccactagtacaagtgatcctgtgatcgaggatgaccatgtgcaggttcttgtattaaaatccaagaatcttgttggagtcactatgaccaattgtggaatcacagatctagtgctaaaagactgtccaaagatgatgttcatccatgctaccaggtgcagggtactaaaacatttaaaggtagaaaatgcaccaattgtaaaccgatttgactatgcacagtgcaagaaactgaacatggatcaggtactagaccagatactaagaatgccacccgagagaaaccgcatcatatacctacgcccaatgcagcaggtggacactctaactttggagcagaagctatttagtggtccctacccctatcacatctgtattatccatgaattcagtaaccctcccaatgtccggaataaggtgcgcattcgcagctggatggacactatagcaaacatcaatcaagagctcattaaatatgaattcttccctgaagccactcgaagtgaagaagacttaaagaaataccccaagtacccctgggggagagaaatctatactttagaaggtgttgtggatggagctccatattccatgatttctgacttcccttggctgaggtcattacgagctgcagagcccaacagcttcgctcgatacgactttgaagacgatgaagaaagcactatctatgctcctagaaggaaaggacagctgtctgcagacatctgtatggaaacaataggagaggaaatttcagagatgcgtcagatgaagaagggtgtatttcagcgagtagtggcaatttttatccactattgtgatgtcaatggagagccagttgaagatgactacatttaattggtccctcctcctttccagctattttgtcagaaagcaagtagggccatccagctgccagagtgctccacagggacttgaggcatgcagttgggaggtcctggctcggtttgctatatagggaatatataaggaacatcgaaattgtatacaaagatttgtacataaaaaatatacaaagacgcttcctaaagtaccaactttatatcatatgtttatacaatttaatttaaaaattcattttaaggaagacagataatttgaaagacttttgtttttcttgacttaattcatgaagtatcattttttgactgagtctccatttacttcattcttaatgattattgtcatccctttaaatctgtgcctttttcttcttgagcgaagctgtttgagtaaacctgttgaagagtgtttgtgtcttttgtgcttttttgttgttattaaaacaccaactaaaccttatagtcaagacaaggctctatgtttctgtacaaagctgtagttctttcttagtattatagttgccatgtttcttaaaatcaagtaaaaagacttatgagcttaaaaaaaagtgagtttgagagggaaatggaaaagtttccagagtatttctagtaatttatttccacattgaattgtgtatatgctttatcttgaatataaaataaaagtttattaaaaacttt

SEQ ID NO: 133636 - DNA, 3585 bp, Homo sapiens
  Payload ID: 6118
  Gene Symbol: FBXO38
  Gene Name: F-box protein 38
  Uniprot ID: Q6PIJ6
  ENST ID: ENST00000513826
  CDS Start-End: 66-2897
aggtactttgaactcaagtaaacaaaagggaagattttctcgttgatactggagactgcacaacaatggggccacgaaagaaaagtgtgaaaacatgtatcatgaataatgaaattccagaagaaatgacagcagatgaaacaaaggactatatgaatcaactttcacatgaagtactttgccatatttttaggtacctccctctgcaggatatcatgtgtatggaatgtctttcccggaagctaaaggaagcagtgaccctatatctgcgagttgtgagagttgtagatctctgtgcagggcggtggtgggaatacatgccaagtggctttacagatgccagttttctaacactattaaagaagatgccagatgttgaacagctatatggccttcaccctcgataccttgagaggcgaagagtaaggggccatgaggcttttagcattccaggagtcctagaagctttgcaggcatgcccaaacttagtgggtgtggaaacttctcatttggagttggtagaatccatttggacatatatgccccatgttcatattttggggaaatttcgtaatcgtaatggagcttttccaattcctcctgaaaataaactgaaaattcctataggagccaaaattcaaactttacatttagttggggtgaatgttcctgaaattccttgtatcccaatgctaaggcacctttatatgaagtgggtaagactcactaaaccacagccatttaaagacttcctttgtatcagcttaagaactttcgtcatgaggaactgtgcaggacccacaaattccttgaaatatgtccctttagtaacaggcttagcctctgcccgaaacttggaacacttagaaatggttcgagttcctttccttggaggtcttatccaacatgttgttgaagacagttggagatcaggtggttttagaaatttgcacactattgttctgggagcttgcaaaaatgctcttgaagtagatcttggttacctcatcattactgctgcccgtaggttacatgaagttcggatccagccttccctaaccaaagatggtgtcttttctgccctaaagatggcagagttggagtttccccagtttgaaacccttcatctaggatatgtagatgagtttttgctacagagcagaatggctaatgcggatctggtgaagtatggtttggctgatgtggtagaaaatcctggtatcatcactgatatagggatgaaagcagtcaatgaagttttttcctgtatcaaatatctggcaatttacaattgccctcatctacacaacccatacaattggatctcagaccactcaagatggactcgattggttgatatcaacctagtacggtgccatgctttgaagctggactcttttggccagtttattgaattattacccagcctagagtttatttcactggatcagatgtttcgtgaaccacccaagggttgtgctcgagttggtctgagtgcaggcacaggaattggtgtttcatcagctcttgttagcaaccagaactccaacaatgacgataataatgcccagaataacaatgccaacatccacgacaacaatcaccatcatccagatgactcagacgaggagaatgactttcggcaagatctgcagccaggagagcagcagtttgcagctgacgcattaaatgagatggaagacatcgtccaagaagatggagaggtggtggccgagagtggaaataatactccagctcacagccaggcaattattcctgtggatgttgatgaggaacaagcaggacccagtggtcttcagcgtgtagtaaaaccaacctcaattactgttcatgattcagagagtgatgatgaagaagatagtctagaactccaagaagtctggattcctaagaacggtactcggcgttactctgaacgtgaagaaaaaactggagagtcagtgcagtccagagaattgtcagaagtagccaaaacaaagccacgtcacgccatgaaacggaagcggacagcagataaatccactagtacaagtgatcctgtgatcgaggatgaccatgtgcaggttcttgtattaaaatccaagaatcttgttggagtcactatgaccaattgtggaatcacagatctagtgctaaaagactgtccaaagatgatgttcatccatgctaccaggtgcagggtactaaaacatttaaaggtagaaaatgcaccaattgtaaaccgatttgactatgcacagtgcaagaaactgaacatggatcaggtactagaccagatactaagaatgccacccgagagaaaccgcatcatatacctacgcccaatgcagcaggtggacactctaactttggagcagaagctatttagtggtccctacccctatcacatctgtattatccatgaattcagtaaccctcccaatgtccggaataaggtgcgcattcgcagctggatggacactatagcaaacatcaatcaagagctcattaaatatgaattcttccctgaagccactcgaagtgaagaagacttaaagaaataccccaagtacccctgggggagagaaatctatactttagaaggtgttgtggatggagctccatattccatgatttctgacttcccttggctgaggtcattacgagctgcagagcccaacagcttcgctcgatacgactttgaagacgatgaagaaagcactatctatgctcctagaaggaaaggacagctgtctgcagacatctgtatggaaacaataggagaggaaatttcagagatgcgtcagatgaagaagggtgtatttcagcgagtagtggcaatttttatccactattgtgatgtcaatggagagccagttgaagatgactacatttaattggtccctcctcctttccagctattttgtcagaaagcaagtagggccatccagctgccagagtgctccacagggacttgaggcatgcagttgggaggtcctggctcggtttgctatatagggaatatataaggaacatcgaaattgtatacaaagatttgtacataaaaaatatacaaagacgcttcctaaagtaccaactttatatcatatgtttatacaatttaatttaaaaattcattttaaggaagacagataatttgaaagacttttgtttttcttgacttaattcatgaagtatcattttttgactgagtctccatttacttcattcttaatgattattgtcatccctttaaatctgtgcctttttcttcttgagcgaagctgtttgagtaaacctgttgaagagtgtttgtgtcttttgtgcttttttgttgttattaaaacaccaactaaaccttatagtcaagacaaggctctatgtttctgtacaaagctgtagttctttcttagtattatagttgccatgtttcttaaaatcaagtaaaaagacttatgagcttaaaaaaaagtgagtttgagagggaaatggaaaagtttccagagtatttctagtaatttatttccacattgaattgtgtatatgctttatcttgaatataaaataaaagtttattaaaaactt

SEQ ID NO: 133637 - DNA, 1677 bp, Homo sapiens
  Payload ID: 6119
  Gene Symbol: FBXO39
  Gene Name: F-box protein 39
  Uniprot ID: Q8N4B4
  ENST ID: ENST00000321535
  CDS Start-End: 131-1459
ggggcgcccatggagttggcgtcggagcaacagctgcgcgggcggagcagaaagcaagtgattgctttcctttcctcatttttggaagccctgcctaacacacagctgcactgtacatcccagttcctggatggacgaagaaagtgaactgatccagccccaagaccagagctgctgggcctttctgcccgatttgtgtctgtgccgtgttttctggtggctaggagacagggacaggtccagggctgctcttgtctgcagaaagtggaaccagatgatgtattctgctgagctctggcggtacagaaccatcaccttcagcgggagaccttccagggtacatgcatctgaagttgagtcagctgtttggtatgttaagaagtttggtcgttatctggagcacctggaggtcaaattcatgaatccttacaatgctgtcttgaccaagaagttccaggtcaccatgcggggcctcctgtcttgtctgagtaagagcaacaaccgtctgaaatctctttccatccaatacctggagctggaccgcctggtatggaggaacagcatcaggagctcattcatcagcagcttgagcttcttcttaaagaagatgggcaaacgcctggattatctcaacctaaaaggggccaggctgaccgtggagcaaggctgccaaattctcgactccctcagctacatgaggaatgagaatgtgatctcagagctcaacatcgaggactatttcagccatcaccttgctgtctacaacagcccccagttcaaaaagaccatgtccacattccacaatcttgtgtccctgaacctcaactacaactgtatctccgacgagctgcttgagaacttgtgtgagaatgccagcaccctccggaccatcaacatcaaatgccacgttcatgacccccacggacaggtcatctggggtatgtcctgggccaagctggccaggcaggccaccaatctgaaggtgaacttcttctttgaacggatcatgaagtacgaacgcttggcccgaatcctcttgcaggagatcccgatcaggagcatcagtctgagaagctgctatttcagtgacccagactgttcaatgagacccactctgatagatctcctgcccaccttccggcacactctgcagaaattaacttgtgaattcaacaacaaccatgagtcactcgacgaggagctgcacctcctcatcatatcctgcaggaagttgttttacttcaaaatctgggctttccttgatgttagttttgtggagcggatcctgaagagtcagaaagaacggcagtgtgccctgcgtgtattcaaggcgagaatttatacaaacagatatgagacgaatgaagaggacaagaccctgcaggaaatttacaggaagtacagaaagctgatcgaatcagagcttagctattttgtcatcgtttactctgtgatgtaatgagcactctacagatgaagaaagctgggagcactttgaacttgaaaatcatttctcttagaactacacttgggcactgccggcccttttgctcctctctctcccctccactttttttttttgtcagctccatgacaacatgaccagctcagcaaaggctgagactgcccatgacctgaaggctccaggtggctttaaagcgctatgtttaccaacta

SEQ ID NO: 133638 - DNA, 1268 bp, Homo sapiens
  Payload ID: 6119
  Gene Symbol: FBXO39
  Gene Name: F-box protein 39
  ENST ID: ENST00000575022
  CDS Start-End: 1-111
aaaatctgggctttccttgatgttagttttgtggagcggatcctgaagagtcagaaagaacggcagtgtgccctgcgtgtattcaaggggatgatccagggaaaagaatgaatcaagccattgctgtggtatttggaccagtggccacttgccattgacttggttttacaaggcctcagaatcggttcggatgcaggaactgtgtttgacgtttatgtcgaagttctcatcaaagcctggaaaatgtggagcctcttttgcaagagtggagattgttgcctttaagccagatcttaaacactgttagctcattgtgaaaaacacaagtgccagtgattaacaaagaatgtttacttaatttacttcagatctggtctcagttaaaggttagctcatccttatcaggtggtcacagaaactagatcccagtagcagagtgacctttggaagctagaattgtagtcaatggacttaaagtgagatcgtgggagccagttcttcacttaattaagcagagttgaaagactttcttctttccagctccctattttccttccttgggctattttctgtaagtcagacttggtttgcctcaatactacatatgccctgtaaaaataaattaactacaagagactgttgactgtatggccaccagccctgccctggtgtgtgtcctttgcaacactagtgtctgaggtggagccctccattcctcgtgtttttcatccactccccctttccttcctctcccccgccagtagaggactgtttgcgcaagagaccaatggattagccagcaggtctaagcagctgcaaggataggtctctcttttgcccgggggagagagataccagcttgactcgtgatcaggtactttattccttatgatagggagctcagaatccagcatcagtgttcctattaatttcttgttagttttgtagctttgggtatctgcacttgtcaacagtaggctgtaagaatatttattggaaaccacaaaaatctcactagcctcctctatcccggagcctgggatggcaaagtgctacaccagaaaagggctatgtggatcacaaggacagtgtaggcctcatgactctgagataacagaacagaggcacagagaggctaagcaacttaccctaggtcacacagtaagaggaagagtgagccaggatttgaaccttggtgtgtctgacataaaggccagcatcccatctataaaatggagctagtaatcataccagcctcttcaggtttt

SEQ ID NO: 133639 - DNA, 917 bp, Homo sapiens
  Payload ID: 6119
  Gene Symbol: FBXO39
  Gene Name: F-box protein 39
  ENST ID: ENST00000572251
  CDS Start-End: 1-151
actcgacgaggagctgcacctcctcatcatatcctgcaggaagttgttttacttcaaaatctgggctttccttgatgttagttttgtggagcggatcctgaagagtcagaaagaacggcagtgtgccctgcgtgtattcaagggatcctgaaggattggcaagtctaacctgccctggtcacacatttaggaagttctggaagggatgatccagggaaaagaatgaatcaagccattgctgtggtatttggaccagtggccacttgccattgacttggttttacaaggcctcagaatcggttcggatgcaggaactgtgtttgacgtttatgtcgaagttctcatcaaagcctggaaaatgtggagcctcttttgcaagagtggagattgttgcctttaagccagatcttaaacactgttagctcattgtgaaaaacacaagtgccagtgattaacaaagaatgtttacttaatttacttcagatctggtctcagttaaaggttagctcatccttatcaggtggtcacagaaactagatcccagtagcagagtgacctttggaagctagaattgtagtcaatggacttaaagtgagatcgtgggagccagttcttcacttaattaagcagagttgaaagactttcttctttccagctccctattttccttccttgggctattttctgtaagtcagacttggtttgcctcaatactacatatgccctgtaaaaataaattaactacaagagactgttgactgtatggccaccagccctgccctggtgtgtgtcctttgcaacactagtgtctgaggtggagccctccattcctcgtgtttttcatccactccccctttccttcctctcccccgccagtagaggactgtttgcgcaagagaccaatggattagccagca

SEQ ID NO: 133640 - DNA, 1682 bp, Homo sapiens
  Payload ID: 6120
  Gene Symbol: FBXO4
  Gene Name: F-box protein 4
  Uniprot ID: Q9UKT5
  ENST ID: ENST00000281623
  CDS Start-End: 57-1220
ggaggctgacgcgctagcgtggctctaagacgcgtcacccacgctgcgggcaagccatggcgggaagcgagccgcgcagcggaacaaactcgccgccgccgcccttcagcgactggggccgcctggaggcggccatcctcagcggctggaagaccttctggcagtcagtgagcaaggagagggtggcgcgtacgacctcacgggaggaggtggatgaggcggccagcaccctgacgcggctgccgattgatgtacagctatatattttgtcctttctttcacctcatgatctgtgtcagttgggaagtacaaatcattattggaatgaaactgtaagagatccaattctgtggagatactttttgttgagggatcttccttcttggtcttctgttgactggaagtctcttccagatctagaaatcttaaaaaagcctatatctgaggtcactgatggtgcattttttgactacatggcagtctatagaatgtgctgtccatacacaagaagagcttcaaaatccagccgtcctatgtatggagctgtcacttcttttttacactccctgatcattcagaatgaaccacgatttgctatgtttggaccaggtttggaagaattgaatacctctttggtgttgagcttgatgtcttcagaggaactttgcccaacagctggtttgcctcagaggcagattgatggtattggatcaggagtcaattttcagttgaacaaccaacataaattcaacattctaatcttatattcaactaccagaaaggaaagagatagagcaagggaagagcatacaagtgcagttaacaagatgttcagtcgacacaatgaaggtgatgatcaacaaggaagccggtacagtgtgattccacagattcaaaaagtgtgtgaagttgtagatgggttcatctatgttgcaaatgctgaagctcataaaagacatgaatggcaagatgaattttctcatattatggcaatgacagatccagcctttgggtcttcgggaagaccattgttggttttatcttgtatttctcaaggggatgtaaaaagaatgccctgtttttatttggctcatgagctgcatctgaatcttctaaatcacccatggctggtccaggatacagaggctgaaactctgactggttttttgaatggcattgagtggattcttgaagaagtggaatctaagcgtgcaagatgattctcttttcagatcttgggaactgaaaccatttgaaatttattactaaggtcgtgatgtgaatatttgctcagtcagcccaccttgtcctgcctttttgcagataggctttcatttggacagctataactgctgtgttttttatattatttttactctttaccataaatcaattacaagaaaagagtttcagtcctagtatttagccccaaaatgaacctttaaacatttttttggtaatttttatattttctgtctttttaaaaatattaaattctggaaaaaacaagtttgtgcctctcattccctgagtttctattcttttgggtataaagattgccttagtgagaaatagcaaatttgctaaactttctattcagtcttttcaagggttcataagtggttatcagaaaagaaatttttatctattcttaataaatacactgcttaaagactgaaaaa

SEQ ID NO: 133641 - DNA, 1731 bp, Homo sapiens
  Payload ID: 6120
  Gene Symbol: FBXO4
  Gene Name: F-box protein 4
  Uniprot ID: Q9UKT5
  ENST ID: ENST00000296812
  CDS Start-End: 57-980
ggaggctgacgcgctagcgtggctctaagacgcgtcacccacgctgcgggcaagccatggcgggaagcgagccgcgcagcggaacaaactcgccgccgccgcccttcagcgactggggccgcctggaggcggccatcctcagcggctggaagaccttctggcagtcagtgagcaaggagagggtggcgcgtacgacctcacgggaggaggtggatgaggcggccagcaccctgacgcggctgccgattgatgtacagctatatattttgtcctttctttcacctcatgatctgtgtcagttgggaagtacaaatcattattggaatgaaactgtaagagatccaattctgtggagatactttttgttgagggatcttccttcttggtcttctgttgactggaagtctcttccagatctagaaatcttaaaaaagcctatatctgaggtcactgatggtgcattttttgactacatggcagtctatagaatgtgctgtccatacacaagaagagcttcaaaatccagccgtcctatgtatggagctgtcacttcttttttacactccctgatcattcagaatgaaccacgatttgctatgtttggaccaggtttggaagaattgaatacctctttggtgttgagcttgatgtcttcagaggaactttgcccaacagctggtttgcctcagaggcagattgatggtattggatcaggagtcaattttcagttgaacaaccaacataaattcaacattctaatcttatattcaactaccagaaaggaaagagatagagcaagggaagagcatacaagtgcagttaacaagatgttcagtcgacacaatgaaggtgatgatcaacaaggaagccggtacagtgtgattccacagattcaaaaagtgtgtgaagttgtagatgggttcatctatgttgcaaatgctgaagctcataaaagtaagtactcatatgtacatttttaagcacattgttcttttcaaagcaaatggaaaatacctttttagactttactgtggcttcttaagaatatgatggcttattttatcaatgtgattttctgacccttactattaatagtgtgttctcacacttttgtgtgtattaggatcacctgggaagcttgttaaacatgttaacaagctgattcctaccctggtggattttattcctagatttgggttgtgtgaatcagatttgggcatctgttttttccaagcacccagggaattctgatgcattccaaagtttggtactagagctatacaatatttttttgctttatgcttctgcatttttttgatactgacattttgtctgcttctggctttattcaaataatctatgcaaataactatgaaaaattttatctttgttttatccaaatagtaaagagatgtgatggtagggtgttaagtagattagttgagaacactattcatatattctgaataattgccattcagaatgctatttttgtgtgaaatcaaaatatcattgggccatgagctagtattataatatctttcccaaatcctttgtgaacaaggtagaatataaatacataatatattgtatatatattatagttctctaatacactggtttgaatttctattcaatttattttccctgtgatctgttaggcatgaaagcagttgcaattactttctgttattacagggctatctataaaaagaaaacttagaagcaaaa

SEQ ID NO: 133642 - DNA, 1284 bp, Homo sapiens
  Payload ID: 6120
  Gene Symbol: FBXO4
  Gene Name: F-box protein 4
  ENST ID: ENST00000509134
  CDS Start-End: 10-927
gggcaagccatggcgggaagcgagccgcgcagcggaacaaactcgccgccgccgcccttcagcgactggggccgcctggaggcggccatcctcagcggctggaagaccttctggcagtcagtgagcaaggagagggtggcgcgtacgacctcacgggaggaggtggatgaggcggccagcaccctgacgcggctgccgattgatgtacagctatatattttgtcctttctttcacctcatgatctgtgtcagttgggaagtacaaatcattattggaatgaaactgtaagagatccaattctgtggagatactttttgttgagggatcttccttcttggtcttctgttgactggaagtctcttccagatctagaaatcttaaaaaagcctatatctgaggtcactgatggtgcattttttgactacatggcagtctatagaatgtgctgtccatacacaagaagagcttcaaaatccagccgtcctatgtatggagctgtcacttcttttttacactccctgatcattcagaatgaaccacgatttgctatgtttggaccaggtttggaagaattgaatacctctttggtgttgagcttgatgtcttcagaggaactttgcccaacagctggtttgcctcagaggcagattgatggtattggatcaggagtcaattttcagttgaacaaccaacataaattcaacattctaatcttatattcaactaccagaaaggaaagagatagagcaagggaagagcatacaagtgcagttaacaagatgttcagtcgacacaatgaaggtgatgatcaacaaggaagccggtacagtgtgattccacagattcaaaaagtgtgtgaagttgtagatgggttcatctatgttgcaaatgctgaagctcataaaagtccaggatacagaggctgaaactctgactggttttttgaatggcattgagtggattcttgaagaagtggaatctaagcgtgcaagatgattctcttttcagatcttgggaactgaaaccatttgaaatttattactaaggtcgtgatgtgaatatttgctcagtcagcccaccttgtcctgcctttttgcagataggctttcatttggacagctataactgctgtgttttttatattatttttactctttaccataaatcaattacaagaaaagagtttcagtcctagtatttagccccaaaatgaacctttaaacatttttttggtaatttttatattttctgtctttttaaaaatattaaattctggaaaaaac

SEQ ID NO: 133643 - DNA, 719 bp, Homo sapiens
  Payload ID: 6120
  Gene Symbol: FBXO4
  Gene Name: F-box protein 4
  ENST ID: ENST00000513496
  CDS Start-End: 57-251
ggaggctgacgcgctagcgtggctctaagacgcgtcacccacgctgcgggcaagccatggcgggaagcgagccgcgcagcggaacaaactcgccgccgccgcccttcagcgactggggccgcctggaggcggccatcctcagcggctggaagaccttctggcagtcagtgagcaaggagagggtggcgcgtacgacctcacgggaggaggtggatgaggcggccagcaccctgacgcggctgccgctatagaatgtgctgtccatacacaagaagagcttcaaaatccagccgtcctatgtatggagctgtcacttcttttttacactccctgatcattcagaatgaaccacgatttgctatgtttggaccaggtttggaagaattgaatacctctttggtgttgagcttgatgtcttcagaggaactttgcccaacagctggtttgcctcagaggcagattgatggtattggatcaggagtcaattttcagttgaacaaccaacataaattcaacattctaatcttatattcaactaccagaaaggaaagagatagagcaagggaagagcatacaagtgcagttaacaagatgttcagtcgacacaatgaaggtgatgatcaacaaggaagccggtacagtgtgattccacagattcaaaaagtgtgtgaagttgtagatgggttcatctatgttgcaaatgctgaagctcataaaag

SEQ ID NO: 133644 - DNA, 831 bp, Homo sapiens
  Payload ID: 6120
  Gene Symbol: FBXO4
  Gene Name: F-box protein 4
  ENST ID: ENST00000504463
  CDS Start-End: 12-476
gcgggcaagccatggcgggaagcgagccgcgcagcggaacaaactcgccgccgccgcccttcagcgactggggccgcctggaggcggccatcctcagcggctggaagaccttctggcagtcagtgagcaaggagagggtggcgcgtacgacctcacgggaggaggtggatgaggcggccagcaccctgacgcggctgccgattgatgtacagctatatattttgtcctttctttcacctcatgatctgtgtcagttgggaagtacaaatcattattggaatgaaactgtaagagatccaattctgtggagatactttttgttgagggatcttccttcttggtcttctgttgactggaagtctcttccagatctagaaatcttaaaaaagcctatatctgaggtcactgatggtgcattttttgactacatggcagttagagacggggtttcaccgtgttacccaggatggtcttgatctcctgacctcgtgatccacccaccttggcctcccaaagtgctgggattacaggcgtgagccactgcgcccggccaaccctgagttatttctgttgctcaaataatacagatgaagaaactgaaattcagactctatagaatgtgctgtccatacacaagaagagcttcaaaatccagccgtcctatgtatggagctgtcacttcttttttacactccctgatcattcagaatgaaccacgatttgctatgtttggaccaggtttggaagaattgaatacctctttggtgttgagcttgatgtcttcagaggaactttgcccaacagctggtttgcctcagaggcagattgatg

SEQ ID NO: 133645 - DNA, 5929 bp, Homo sapiens
  Payload ID: 6121
  Gene Symbol: FBXO40
  Gene Name: F-box protein 40
  Uniprot ID: Q9UH90
  ENST ID: ENST00000338040
  CDS Start-End: 415-2544
ctgttctggccttgaaaatgatccttcttaaaaggattttcctccttcctcaagggaaagaaaacctattgatataaaacttcacttcccattcagtttcccctgctaaatgccactccagtagagactgagtgttgataaatacaggggaaggaaaaagtcgtaagctgagcctggtcacattgccccttgtgatatcgttttatttttaacttcgcaacacttggactatttctgttgaagttttctctcctttccctgccttcccaacagaacgctgtcctctactgcagctgatgcaacccagccacctcccggcaatccgcttacttgcaatcaagggttcaggtgcaagcagatgctgactcagcctgttccattaagagctaagaagcaagaagaaattggggcgccatggggaaagcccgcagatccccgccagggcaccacaggcattgtgagggatgcttcaaccgccactgccacattcctgtggaacccaacacctcctgcctggtaataagctgccacctgctctgtggtgccaccttccacatgtgcaaagaggcagagcaccagctcctctgccctttagagcaggttccgtgcctcaactccgaatatggctgccctctgtccatgtcccgccacaaactggccaagcacctgcaggtgtgccccgccagcgtggtctgctgctccatggagtggaaccgctggccaaatgtggactctgaaaccacccttcatgaaaacatcatgaaagagacccccagtgaggagtgtttggacacagccctggccctgcaggatcagaaggtcctcttcagatccttgaaaatggtggaacttttcccagaaactagagaggctactgaggaggaaccaactatgaatggtgaaaccagtgtggaggaaatgggaggagcagtgggtggagtggatatcggtttggtaccacatggtctgtcagcaactaatggggagatggcagagctaagtcaagaagaacgggaggtgctagccaaaaccaaagaagggatggacctggtcaagtttggccagtgggaaaatattttcagcaaagagcacgcagcctctgctttaacaaattcatcagcgagctgtgagagcaagaacaagaatgactccgagaaagaacagatttccagtggccataacatggtagaaggagagggcgctcccaaaaagaaagaaccacaggaaaatcagaagcagcaggacgttcgtacagccatggaaaccacagggcttgccccttggcaggatggtgttctggaaagactgaaaacagctgtggatgcaaaggactataacatgtatctagtgcacaatgggcggatgctgatacactttggtcagatgcctgcttgtacacccaaggagagagactttgtttatggcaagctggaggctcaggaagttaagactgtttacaccttcaaagttcctgtgagctactgtggaaagcgagctcgacttggagatgccatgttgagttgtaagccaagtgaacacaaggcagtggatacttcagatttggggatcactgtggaggacctgcccaaatcagatctcatcaagaccaccctccagtgtgctttggaaagagaactcaaaggccacgtcatctctgaatccagaagcattgatggactgttcatggattttgccacacaaacatacaactttgagccagaacagttttcctctgggacagtgctggctgacctaaccgctgccaccccagggggactccacgtggagctccacagcgagtgtgtgaccaggagacacaacaaaagcagctctgccttcactttcacttgcaacaaattcttcaggagggatgagttccccctgcacttcaagaatgtccacacagacattcagtcatgtctcaatggctggttccagcatcgatgccccctcgcctacttgggatgtacatttgttcaaaaccatttccgtcccccagggcaaaaggcaaaagtaatctatagccaggagctcaagacctttgccattaagccggaggttgctccagagctgagcgagggaaggaagaacaaccatcttttgggtcatggaggaaaaagccagaattctttaaccagcctgcccctggagattttgaagtacattgctgggttcttggacagcgtcagcctggcccagctctcccaggtgtctgtgctgatgaggaatatctgtgccactttgttacaagagagaggaatggtccttttgcaatggaagaaaaagaggtattcccatggaggcacctcctggagagtccacagagagatctggcagttcagcagcctcttctccaaaatcaagagctgggagtttaatgaagtcacctccatgtctgagcacctgaagtcctgtcctttcaacattgtagagcacaaaactgacccgattcttttgactagcatgtgtcagccccgtgagcaggcccgagagagcttagtctccacctttagaatcagaccacgaggaagatacgtctcctaaaaattcagatgccactcgatgcacccttcttggatttcttctcggagttcctgaagtaggacagagtgtgtggttttgaggactcccttctgtaaactgcctatttgcttatcggggtgtattggaacacgcaatgtccttcgaaacctcaacacgaggcctaagaatttcctaagccatgtcttgtaccatagtgccacattgatgacttgtttccttttttcttttcttttcttttcttttttctttctttctaaaatagattggtctgagaagaaaataagtaatttgaggccatttggaagatgggcccaatttcttaagtgatgagagagcacgaaattccataaccagtacaggcctgtgcttttacatgggctttttagttcacaaagcactttcaaatttatgggacaggaaatgcaggatgggactccccagggaacgcagggtgaagggaacaaagctggaggctctggagctgggtctgttttgacggtcaagtccagggctcattttggttattctactgcctctaggccagggtagtcctaacacagcctgacataggagagcccctggctgagcatggcagccttgaagacaccacaggccaaaacatgaggggcagaaatgggatcacagagtctgttgctagaatcttggcaacatacagcaggaaagccttgataaatcgggagtccaaaggagacaccatatttatggagaacattaggacaaaaagtcaccaacttactttgtaacattttaataatgacttaagggtcaagatttttttcttctgaaaattatgttctgagttaggcagaacatagccatggccctgggccaccctgtgctatctgaaatgacctcaatacactaatgccaacctcagcgtcatgccagaatgcacagggcagcccagggagatcacacctttggcaaagtccagacaaggcccactgcagttcctatggcgccagtcaccagctcctagacagcacttgggtaccccattggggtcttggagaggaagacatgtgaacataacggctccctgaaattgctcctacccatccatatttctggtcatgctttcagtctgacaaaaatggatgatactgctgtttttggtaacaaacagtgaatattcataagaacaaaagtaaaagaaaaaaagacacagtagaaactggcatcccctaaagcagggcttcttagccttggaactattgacatttttaaatggataattctttttttttttttctaggtggggaggggatggagttcactcttgttgcccaggctggagcgcaatgacatgatctcggctcaccgcaacctccgcctcctgggttcaagcgattctcctgcctcagcctcccgagtagctgggattactcgcctggctaattttgtatttttagtagagacgggctttctccatgttgttcaggctggtctcaaactcccgacctcaggtgactcgcccgccttggccttccaaagtgctgggtttacaggtgtgagccactgcgccctgcctgaactggataattctttgttgcaagggactgttctgtgtactacaggatacttggcagcatccttggcctatccattaaatgtcagtagcacccccacagtggcaacaatcaaaaatgtcaccagacattgctaaatattggggagcaaaatggctccccgttgaaaatccctaaaggatgtcatactagtgacaataagttaggatatgcttattttttagtacagcaaaatcttatcgcacatagctatccacaatagttatgatttaatgcagctctttatttatgaaataggttttagacatgtggtgattttaagttgggaaccagaaggaaatgattcgtttggtatggcttcatgtccttcagccacccccaagaatgtatcctttcagctctctttggttatacctgaagccaggagcgttgagttattagccttgtgtttatattcctctcactgtaattggtgtcattttcccagcagtcctagcagtcctcaagcaagtgggaaatcggaaaagaaaaggacaggcattgtagggaagcagaggataaagaatttagccaacaaaagaaacaatctagtcaatctgggtgcttttatttcctgggttctctctaaacatggctcagagctggtgtagatgaagtaggtgaaacctctgaaaagagtctagaaggcagtagagcaagtcccagaccagaaacatgctcatcttttcatcgtaatgtgccactcggtactatttggtaatgtcactctatttttcctaatcccatcctttggtttgtatttcatatttgtatataaggcaccattttctaaaaatatgactagggtgtgacctaaggttttattctgtgaagatgagtaactggaaagaagctaacactgcagtgggaaggaaggaagagagttgtccaggtggtagttcgacgtgttttgaatctagtccttcctacatggaggataaaagctcctaaagtccactctgggtttgtgattttaatagaaatagaaagggaaactatagaccaatggagatgaaaatcaggggctatcgacagatggaggagaaataaggtgctacatagagaaaggaagagggcagaaggctttcccttcccaaactgggtgagctggggaagccttggttcaggagagtggcactgcccacaactgctttgtgggttgtgcacttccagccgcactctccccctccagttgctgccttcagagccgtactgaagcacgagcttcaataagacaagcacacttcatagtgagagggcagcggtaccaaagcctttcagagagactatggattagacagaaatgatttgtgagaggaagctggagtgaacagcatgaacagcgagtgttacctgacagaggcaagacagctagaagtggcttcagatttagaaacagctgaggggagcaaagacggactgtgtacacagggagggaggatgtctatgggcagagcccttggtgagtatcatcaccaagaaaggcagtccagagtagagatcagccgaatatggaggctgaggtctgtagaactgggccagagaggaccttactgccttagtagcataagggtctggaaaagaagtttctatctcacaacaaaggaaaaagtgaaaagcaaggtggaacttgaagatacgtcacgaaaatcactataaaagtctgatttatgtgtgatgtcaaatcaaactgaaatgaagaatgagattgagtatatctgtggtgactgacctctgtatactagaaacctcaacatctctagaagaggaaataaaagctgctttgcactctgaaa

SEQ ID NO: 133646 - DNA, 6928 bp, Homo sapiens
  Payload ID: 6122
  Gene Symbol: FBXO41
  Gene Name: F-box protein 41
  Uniprot ID: Q8TF61
  ENST ID: ENST00000295133
  CDS Start-End: 1-2628
atggcctcgctggacctgccgtaccgctgcccccgctgcggggagcacaagcgcttccggagcctgtcgtcgctgcgcgcgcacctggagtacagccacacctacgagacgctctacatcctctccaagaccaacagcatctgcgacggcgccgccgccgccgcggccgccgccgccgctgcctcggggttcccgctggctcccgagcccgccgccctgctggccgtgcccggcgcccggcgagaggtcttcgagagcacttccttccagggcaaggagcaggcggccgggccgtcgcccgcggcgccgcacctgctgcaccaccaccatcaccacgctcccctcgcccacttccccggcgacctggtgcccgctagcctgccctgtgaggagttggccgagccgggccttgtgcccgccgcagcagcgcgctatgcgctgcgcgagatcgagatcccgctgggggagctgttcgcccgcaagtccgtggcgtcctcggcgtgctcgacgccgccgcctggccccggccccggcccttgccccgggcctgcctccgcttcgcccgcgtccccctcacccgctgatgtggcctacgaagagggcctggcgcgcctcaagatccgcgcgctggagaagctggaggtggaccggcggctggagcggctgagcgaggaggtggagcagaagatcgcgggccaggtgggccggctgcaggccgagctggagcgcaaggcggccgaactggagactgcgcggcaggagagtgcgaggctcgggcgcgagaaggaggagctggaggagcgcgcgtctgagctctcccgccaggtggacgtgagcgtagagctgctggcctcactcaagcaggacctggtgcacaaggaacaggagctgagccgcaagcagcaggaggtggtgcagatcgaccagttcctgaaggagacggcggcgcgggaggccagcgccaagctgcggctgcagcagttcattgaggagctccttgagcgggctgaccgtgccgagcggcagctgcaggtcatcagcagcagctgtggcagcacgcccagcgccagcctgggccgtggaggtgggggcggtggtgctggacccaatgcccggggcccaggcagaatgcgagaacaccacgtgggcccggccgtgcctaacacatatgcagtgtcacggcatggctcctctccgagcacaggggcctccagccgtgtgccagccgcatcccagagctcaggctgctatgacagtgacagtctggagctgcccaggccagaggagggggcccctgaggacagtggccctgggggcttgggcacacgggcccaggctgccaacgggggctcagagcggtcccagccccctcgcagctcaggcctgcggcgccaggccatccagaactggcagcgcagaccccgccgacacagcactgagggggaagagggtgatgtctccgacgttggctcccgaaccactgagtcagaggctgagggcccgttggatgcgccccgccccgggcctgctatggctgggccattgagcagctgccggctctcagcccgccccgagggaggcagtgggcggggtcggcgagcagagagggtcagcccctcacgctccaatgaggtcatcagcccagagatcctgaagatgcgagctgccctcttctgcatcttcacctacctggacacgcgcacactgctgcatgctgccgaggtctgccgggactggcgcttcgtggcccgccaccccgcagtctggacaagggtgctgcttgagaatgcccgtgtctgctccaagttcctggcaatgctggctcagtggtgcacccaggcccactctctgacgctgcagaacttgaagccccggcagcggggaaagaaggagagcaaggaggagtatgcccggagcacccggggctgcctggaagctgggctggagtccctgctgaaggcagctggggggaacctgctgatcctgcgcatctcccactgtccaaacatcctcaccgaccgctcgctctggctggccagctgctactgccgtgccctgcaggctgtcacgtacaggagtgccacagaccccgtgggccatgaggtcatttgggccctgggcgcaggctgcagagagatcgtctccctccaagtggcaccacttcacccctgccagcagcccacacgcttcagtaaccgctgcctgcagatgattggtcgctgttggccccacctgcgggccctgggggtcgggggtgccggctgtggggtgcagggcctggcatcactcgcgagaaactgcatgcggctgcaggtcctggagcttgaccacgtgtcagagatcacccaggaggtggcagcagaggtctgccgggaaggcctgaagggactggagatgctggtgctcacggcgactcccgtcacccctaaggccctactgcacttcaacagcatctgccggaacctcaagtccattgtggtccagattgggattgcggattatttcaaagagcccagcagccctgaggcccagaagctgtttgaggacatggtgacaaaactccaggctctgcgacggaggcccggcttctctaagattctgcacatcaaggtggaaggcggctgctaacccgggtagggggcggcagggcccctgccagccccacaccagggcactctctttggacctcagagggaccctggtttggactagacctttggaggccgagtgttatccctggcttctggagggggactgtcaagtctcctgtcctcctcctggagcagcagagcaacaggcctgacccagggcactgcctccccagtacaggggcttggacagaagctgccctccgacccccaccctaccccggctggagtagcctctggcacagccagtgaggagctgtcaccaccagcgcctggtgtcatcacctggaggatctgcaataaccacccagtggctcctcagctgttctggctggcctctccttcctgaggcccagcctcctggtcaggagcatctggggccccaagccaatgggggctccacaaggcagctcagacttggcaaggagggctcttctcctcaaccttgctgcagccttctgggggcaccccttcagacagcctgcccaggctgtggatccacatttcctgggggtaccacagccagacctaggggcctgggcacgtggtcagccaaaagctgggggcagcagtacagtggggtagtgggggtgggtttggaaaggaaacagtcacccagaacttctccccaggatgagaccacccttccaaggtgggggattgccagggggagaaaacttatttattgctgtaagacaggacccctcctcccaacctcataccccaccgcacaccagagctaaattcaaagctgaaaggcgcacgtttctatacctacattcattcctgagggaccctccagagggtcaaggtcccagccccaggcagccctgtcacagtgagaagtagttcctgtccttaaggaatttccttctaatccaggtgcttgggcaggaacccgatggccttcgggtcaccaaggctgtctgggagggaggcacagggccgccctctgtgctgaggccgtggaggaagccaggaggagggtggcttgctttgcttccttgtctaattagcttgcttgaagatgtggccttggcagggagccagacccatggggccaaggaagaggaagagcatcctcaatagactcactcccccttccttggtctccacgggccccgtggactgagggctgcattggggtcttctgcctaggggaagtgctggacctgagctggagccacttggcttagaagccacaggattcacttttcactggcctttgcagtccccaaaggatcaggtctcagaaccaaggctccaaaggctgaggtctccccagttcctcctctcagaactcccacagtagctcagaggccgggggtcctgccaactttcatttggaaagttctttcgaacatctaaactagatctatcttagggtttctttctctcctagataggatcagctcccagccctagccattaggctgctggtcctggcgggggatggggtcccctcgttacccagtccttcccagggacccaacttcctaacacaacctggcttggacatgaagaccctcccccaggttaccttgtaaagagtcctccagagctgggatcccatgggcgcagcagcacacccagctcccatggcgtcactccctagctctgtcccagcttttgctatcattgctgacttttcctcctgtggctcattctgtccctgccctttgaaaacctaaaataccaagggtgtcatgctggcaactccctgcccagtcctgcacaaagccttggctgtgtgtggcaccccttgcctcctaccccagagcagctggctccattggcttctccctgcaccagccctgtcctcaggggtcaggaaaaagcagcacagctttctttcctctcctccagaggcctggaagggaggtggaggtccagtaagggcctggctgccttggatttcttggtcctgccttgccaactgcaccctgtagctcctgctccctgtgaccccagaaccagaggtgctgccttccctgtctcctagacaaagcacaaagggatgccctgcttggcttgagcctgcccaactgaaggattttctctgccccagggaccttccatccctgaatacaaggctctaggcaacttctctctgggtggtacacactagaatgcctggcattagccctagaaaggaggttggggtgtatgggtagtgagctagggtgggagaaaggtggtgctgaaaggacagatgctagttgtagtttcactcactcattcattcattagtgcaacagtactgagcaccacctgcactagaggcagaggggtgaacaagatacccttctgcctggggggacgtccacttcccatgggtttggctatttccaggaaagcccctcagtcctccaccctgttctggctgtgtgtgaaggatgtgtgtgagcaggcccaatcctttgcagcaagaatgagaggtcagagtattccattgcacacgcaccctggggctgacagacttgtgccccctagccttcatgcatgcccaagcactggcagctttgcagcccctgccccaccagccccttgacgctcttcttttgttctctcctcggggatgagctctgctgctgagtagggagcttttgcttgctgggaggctctatgcatggatttttttggtgaccatacagctagggctgaggatgggaacagggacagagggcctggctatccctagaagcacttcatccatctttacccacccaaacgggatcccttcacatctcatacccagtaagatgcaagaaaggaatatctgagagcaagcagccctgctccaggggccccaggtatgtgtagaggcccagtgggggtggccacttggtgtttctaccaccccctgccatccagtctggccccagtacctacctgggaggttggtgtacttggcttaagtacttcatgctttattcaggctgcttccccacagcaccggcaggaaatgaaggtgcacttatatgcatccctgcaggaataaagagtgggtggcctgcccagcccagcaccacagcctttccccagccaggagagaccacctaaggatcaaggcagctcctgttttcttggttctgtgacactcgagtctgagccagcccctcaggaattgcctcaaaagagaaaaacaaaaaaaagtcctccttcccaaggcctgctactccaaggtttggctccatcccttgcctttgggtcctgcctatttccccactcctggtctcttatctttggggccaccagtggggagtcacccgggccccaatccctctaaggcgctaagttgaaggaggccttcccagagtgactattggtgccaaagtcccagttcctgttggacttggggtaaaaacaggagatggtgagtgggtgtaaggcccaaatgcccagagaagttaactcgaacccatgggacctgtcccagcctgtcagtccctgatgagtgtaacttccttcccctgggggcctggcccttctctccaacccagtggccatgctttctcacccagccttgtgcccggcctgcatttctgtatatattgctgtgtattgtgtgtatgtatgtattcctggacaagtgtgttcatctgcagcccttgcctgaggataaggtttaggattgggtaaagatcagaataccagggccagctaaggcaacgactccctccccaaacccttgggacctcagccagtcccaaggctgccctgacaatcaggcaggctccccaccgtgaggccaagcctcctctgccactgccagcatggcccaagggaggcttggccttgggcttgccagcctcagctctgccctgacaagggtcttgtatccagggcagaggcctgaggtgacccaggcttgctttgtggctgatgccagcaggcttggttctagtgggcaccactggtgggcaacctccataactggcccttaggccctaccttcctacacagctaggctataatgggcctgagtgagagggtagcttccccagccccaagcacaggcagaggggtggagagcaatttttggttttatttttgtttctgaagtggtgcctgtacctccagcccccagggggccttccctggccacacttctctgccccacccaggcatcgccatcccagcactttgctccatgtcacccgtaagatgccctttgctgaatgtacctgagtgtatgtatttaaaaggactcacatgggcatcagagaatttatggctctgtatccaataaaaaagatggtgaaactggtctatctgcc

SEQ ID NO: 133647 - DNA, 7336 bp, Homo sapiens
  Payload ID: 6122
  Gene Symbol: FBXO41
  Gene Name: F-box protein 41
  Uniprot ID: Q8TF61
  ENST ID: ENST00000521871
  CDS Start-End: 417-3044
gcgccccctcctccccctcctcctcctcctcctcctccatccttcctcccgccgggttcgtgcgcccctcccgctgcgactggctgggaggttcggccgcccccgccccgagagggaggcgggggcgctagccgcggcggccacccaaggctgcggaggggaacgagatccgaggccccaaggcggccctgcgtctggaccgggcacgcgggggctcttctgcgtccccagccctgggccgctgggcctggcctcgccgcggggtggaggaggtaaggcctcctcgccccaggccgcgggcgccctgagccttcctgaccccgcagggggcctcgcccgcggtcccccatgagcgcgcccggctgaccggcggggcggccgcggtggagcccgcgtgccgcgggggcggcggggccatggcctcgctggacctgccgtaccgctgcccccgctgcggggagcacaagcgcttccggagcctgtcgtcgctgcgcgcgcacctggagtacagccacacctacgagacgctctacatcctctccaagaccaacagcatctgcgacggcgccgccgccgccgcggccgccgccgccgctgcctcggggttcccgctggctcccgagcccgccgccctgctggccgtgcccggcgcccggcgagaggtcttcgagagcacttccttccagggcaaggagcaggcggccgggccgtcgcccgcggcgccgcacctgctgcaccaccaccatcaccacgctcccctcgcccacttccccggcgacctggtgcccgctagcctgccctgtgaggagttggccgagccgggccttgtgcccgccgcagcagcgcgctatgcgctgcgcgagatcgagatcccgctgggggagctgttcgcccgcaagtccgtggcgtcctcggcgtgctcgacgccgccgcctggccccggccccggcccttgccccgggcctgcctccgcttcgcccgcgtccccctcacccgctgatgtggcctacgaagagggcctggcgcgcctcaagatccgcgcgctggagaagctggaggtggaccggcggctggagcggctgagcgaggaggtggagcagaagatcgcgggccaggtgggccggctgcaggccgagctggagcgcaaggcggccgaactggagactgcgcggcaggagagtgcgaggctcgggcgcgagaaggaggagctggaggagcgcgcgtctgagctctcccgccaggtggacgtgagcgtagagctgctggcctcactcaagcaggacctggtgcacaaggaacaggagctgagccgcaagcagcaggaggtggtgcagatcgaccagttcctgaaggagacggcggcgcgggaggccagcgccaagctgcggctgcagcagttcattgaggagctccttgagcgggctgaccgtgccgagcggcagctgcaggtcatcagcagcagctgtggcagcacgcccagcgccagcctgggccgtggaggtgggggcggtggtgctggacccaatgcccggggcccaggcagaatgcgagaacaccacgtgggcccggccgtgcctaacacatatgcagtgtcacggcatggctcctctccgagcacaggggcctccagccgtgtgccagccgcatcccagagctcaggctgctatgacagtgacagtctggagctgcccaggccagaggagggggcccctgaggacagtggccctgggggcttgggcacacgggcccaggctgccaacgggggctcagagcggtcccagccccctcgcagctcaggcctgcggcgccaggccatccagaactggcagcgcagaccccgccgacacagcactgagggggaagagggtgatgtctccgacgttggctcccgaaccactgagtcagaggctgagggcccgttggatgcgccccgccccgggcctgctatggctgggccattgagcagctgccggctctcagcccgccccgagggaggcagtgggcggggtcggcgagcagagagggtcagcccctcacgctccaatgaggtcatcagcccagagatcctgaagatgcgagctgccctcttctgcatcttcacctacctggacacgcgcacactgctgcatgctgccgaggtctgccgggactggcgcttcgtggcccgccaccccgcagtctggacaagggtgctgcttgagaatgcccgtgtctgctccaagttcctggcaatgctggctcagtggtgcacccaggcccactctctgacgctgcagaacttgaagccccggcagcggggaaagaaggagagcaaggaggagtatgcccggagcacccggggctgcctggaagctgggctggagtccctgctgaaggcagctggggggaacctgctgatcctgcgcatctcccactgtccaaacatcctcaccgaccgctcgctctggctggccagctgctactgccgtgccctgcaggctgtcacgtacaggagtgccacagaccccgtgggccatgaggtcatttgggccctgggcgcaggctgcagagagatcgtctccctccaagtggcaccacttcacccctgccagcagcccacacgcttcagtaaccgctgcctgcagatgattggtcgctgttggccccacctgcgggccctgggggtcgggggtgccggctgtggggtgcagggcctggcatcactcgcgagaaactgcatgcggctgcaggtcctggagcttgaccacgtgtcagagatcacccaggaggtggcagcagaggtctgccgggaaggcctgaagggactggagatgctggtgctcacggcgactcccgtcacccctaaggccctactgcacttcaacagcatctgccggaacctcaagtccattgtggtccagattgggattgcggattatttcaaagagcccagcagccctgaggcccagaagctgtttgaggacatggtgacaaaactccaggctctgcgacggaggcccggcttctctaagattctgcacatcaaggtggaaggcggctgctaacccgggtagggggcggcagggcccctgccagccccacaccagggcactctctttggacctcagagggaccctggtttggactagacctttggaggccgagtgttatccctggcttctggagggggactgtcaagtctcctgtcctcctcctggagcagcagagcaacaggcctgacccagggcactgcctccccagtacaggggcttggacagaagctgccctccgacccccaccctaccccggctggagtagcctctggcacagccagtgaggagctgtcaccaccagcgcctggtgtcatcacctggaggatctgcaataaccacccagtggctcctcagctgttctggctggcctctccttcctgaggcccagcctcctggtcaggagcatctggggccccaagccaatgggggctccacaaggcagctcagacttggcaaggagggctcttctcctcaaccttgctgcagccttctgggggcaccccttcagacagcctgcccaggctgtggatccacatttcctgggggtaccacagccagacctaggggcctgggcacgtggtcagccaaaagctgggggcagcagtacagtggggtagtgggggtgggtttggaaaggaaacagtcacccagaacttctccccaggatgagaccacccttccaaggtgggggattgccagggggagaaaacttatttattgctgtaagacaggacccctcctcccaacctcataccccaccgcacaccagagctaaattcaaagctgaaaggcgcacgtttctatacctacattcattcctgagggaccctccagagggtcaaggtcccagccccaggcagccctgtcacagtgagaagtagttcctgtccttaaggaatttccttctaatccaggtgcttgggcaggaacccgatggccttcgggtcaccaaggctgtctgggagggaggcacagggccgccctctgtgctgaggccgtggaggaagccaggaggagggtggcttgctttgcttccttgtctaattagcttgcttgaagatgtggccttggcagggagccagacccatggggccaaggaagaggaagagcatcctcaatagactcactcccccttccttggtctccacgggccccgtggactgagggctgcattggggtcttctgcctaggggaagtgctggacctgagctggagccacttggcttagaagccacaggattcacttttcactggcctttgcagtccccaaaggatcaggtctcagaaccaaggctccaaaggctgaggtctccccagttcctcctctcagaactcccacagtagctcagaggccgggggtcctgccaactttcatttggaaagttctttcgaacatctaaactagatctatcttagggtttctttctctcctagataggatcagctcccagccctagccattaggctgctggtcctggcgggggatggggtcccctcgttacccagtccttcccagggacccaacttcctaacacaacctggcttggacatgaagaccctcccccaggttaccttgtaaagagtcctccagagctgggatcccatgggcgcagcagcacacccagctcccatggcgtcactccctagctctgtcccagcttttgctatcattgctgacttttcctcctgtggctcattctgtccctgccctttgaaaacctaaaataccaagggtgtcatgctggcaactccctgcccagtcctgcacaaagccttggctgtgtgtggcaccccttgcctcctaccccagagcagctggctccattggcttctccctgcaccagccctgtcctcaggggtcaggaaaaagcagcacagctttctttcctctcctccagaggcctggaagggaggtggaggtccagtaagggcctggctgccttggatttcttggtcctgccttgccaactgcaccctgtagctcctgctccctgtgaccccagaaccagaggtgctgccttccctgtctcctagacaaagcacaaagggatgccctgcttggcttgagcctgcccaactgaaggattttctctgccccagggaccttccatccctgaatacaaggctctaggcaacttctctctgggtggtacacactagaatgcctggcattagccctagaaaggaggttggggtgtatgggtagtgagctagggtgggagaaaggtggtgctgaaaggacagatgctagttgtagtttcactcactcattcattcattagtgcaacagtactgagcaccacctgcactagaggcagaggggtgaacaagatacccttctgcctggggggacgtccacttcccatgggtttggctatttccaggaaagcccctcagtcctccaccctgttctggctgtgtgtgaaggatgtgtgtgagcaggcccaatcctttgcagcaagaatgagaggtcagagtattccattgcacacgcaccctggggctgacagacttgtgccccctagccttcatgcatgcccaagcactggcagctttgcagcccctgccccaccagccccttgacgctcttcttttgttctctcctcggggatgagctctgctgctgagtagggagcttttgcttgctgggaggctctatgcatggatttttttggtgaccatacagctagggctgaggatgggaacagggacagagggcctggctatccctagaagcacttcatccatctttacccacccaaacgggatcccttcacatctcatacccagtaagatgcaagaaaggaatatctgagagcaagcagccctgctccaggggccccaggtatgtgtagaggcccagtgggggtggccacttggtgtttctaccaccccctgccatccagtctggccccagtacctacctgggaggttggtgtacttggcttaagtacttcatgctttattcaggctgcttccccacagcaccggcaggaaatgaaggtgcacttatatgcatccctgcaggaataaagagtgggtggcctgcccagcccagcaccacagcctttccccagccaggagagaccacctaaggatcaaggcagctcctgttttcttggttctgtgacactcgagtctgagccagcccctcaggaattgcctcaaaagagaaaaacaaaaaaaagtcctccttcccaaggcctgctactccaaggtttggctccatcccttgcctttgggtcctgcctatttccccactcctggtctcttatctttggggccaccagtggggagtcacccgggccccaatccctctaaggcgctaagttgaaggaggccttcccagagtgactattggtgccaaagtcccagttcctgttggacttggggtaaaaacaggagatggtgagtgggtgtaaggcccaaatgcccagagaagttaactcgaacccatgggacctgtcccagcctgtcagtccctgatgagtgtaacttccttcccctgggggcctggcccttctctccaacccagtggccatgctttctcacccagccttgtgcccggcctgcatttctgtatatattgctgtgtattgtgtgtatgtatgtattcctggacaagtgtgttcatctgcagcccttgcctgaggataaggtttaggattgggtaaagatcagaataccagggccagctaaggcaacgactccctccccaaacccttgggacctcagccagtcccaaggctgccctgacaatcaggcaggctccccaccgtgaggccaagcctcctctgccactgccagcatggcccaagggaggcttggccttgggcttgccagcctcagctctgccctgacaagggtcttgtatccagggcagaggcctgaggtgacccaggcttgctttgtggctgatgccagcaggcttggttctagtgggcaccactggtgggcaacctccataactggcccttaggccctaccttcctacacagctaggctataatgggcctgagtgagagggtagcttccccagccccaagcacaggcagaggggtggagagcaatttttggttttatttttgtttctgaagtggtgcctgtacctccagcccccagggggccttccctggccacacttctctgccccacccaggcatcgccatcccagcactttgctccatgtcacccgtaagatgccctttgctgaatgtacctgagtgtatgtatttaaaaggactcacatgggcatcagagaatttatggctctgtatccaataaaaaagatggtgaaactggtc

SEQ ID NO: 133648 - DNA, 3293 bp, Homo sapiens
  Payload ID: 6122
  Gene Symbol: FBXO41
  Gene Name: F-box protein 41
  Uniprot ID: Q8TF61
  ENST ID: ENST00000520530
  CDS Start-End: 290-2917
ggggcgctagccgcggcggccacccaaggctgcggaggggaacgagatccgaggccccaaggcggccctgcgtctggaccgggcacgcgggggctcttctgcgtccccagccctgggccgctgggcctggcctcgccgcggggtggaggagcctcctcgccccaggccgcgggcgccctgagccttcctgaccccgcagggggcctcgcccgcggtcccccatgagcgcgcccggctgaccggcggggcggccgcggtggagcccgcgtgccgcgggggcggcggggccatggcctcgctggacctgccgtaccgctgcccccgctgcggggagcacaagcgcttccggagcctgtcgtcgctgcgcgcgcacctggagtacagccacacctacgagacgctctacatcctctccaagaccaacagcatctgcgacggcgccgccgccgccgcggccgccgccgccgctgcctcggggttcccgctggctcccgagcccgccgccctgctggccgtgcccggcgcccggcgagaggtcttcgagagcacttccttccagggcaaggagcaggcggccgggccgtcgcccgcggcgccgcacctgctgcaccaccaccatcaccacgctcccctcgcccacttccccggcgacctggtgcccgctagcctgccctgtgaggagttggccgagccgggccttgtgcccgccgcagcagcgcgctatgcgctgcgcgagatcgagatcccgctgggggagctgttcgcccgcaagtccgtggcgtcctcggcgtgctcgacgccgccgcctggccccggccccggcccttgccccgggcctgcctccgcttcgcccgcgtccccctcacccgctgatgtggcctacgaagagggcctggcgcgcctcaagatccgcgcgctggagaagctggaggtggaccggcggctggagcggctgagcgaggaggtggagcagaagatcgcgggccaggtgggccggctgcaggccgagctggagcgcaaggcggccgaactggagactgcgcggcaggagagtgcgaggctcgggcgcgagaaggaggagctggaggagcgcgcgtctgagctctcccgccaggtggacgtgagcgtagagctgctggcctcactcaagcaggacctggtgcacaaggaacaggagctgagccgcaagcagcaggaggtggtgcagatcgaccagttcctgaaggagacggcggcgcgggaggccagcgccaagctgcggctgcagcagttcattgaggagctccttgagcgggctgaccgtgccgagcggcagctgcaggtcatcagcagcagctgtggcagcacgcccagcgccagcctgggccgtggaggtgggggcggtggtgctggacccaatgcccggggcccaggcagaatgcgagaacaccacgtgggcccggccgtgcctaacacatatgcagtgtcacggcatggctcctctccgagcacaggggcctccagccgtgtgccagccgcatcccagagctcaggctgctatgacagtgacagtctggagctgcccaggccagaggagggggcccctgaggacagtggccctgggggcttgggcacacgggcccaggctgccaacgggggctcagagcggtcccagccccctcgcagctcaggcctgcggcgccaggccatccagaactggcagcgcagaccccgccgacacagcactgagggggaagagggtgatgtctccgacgttggctcccgaaccactgagtcagaggctgagggcccgttggatgcgccccgccccgggcctgctatggctgggccattgagcagctgccggctctcagcccgccccgagggaggcagtgggcggggtcggcgagcagagagggtcagcccctcacgctccaatgaggtcatcagcccagagatcctgaagatgcgagctgccctcttctgcatcttcacctacctggacacgcgcacactgctgcatgctgccgaggtctgccgggactggcgcttcgtggcccgccaccccgcagtctggacaagggtgctgcttgagaatgcccgtgtctgctccaagttcctggcaatgctggctcagtggtgcacccaggcccactctctgacgctgcagaacttgaagccccggcagcggggaaagaaggagagcaaggaggagtatgcccggagcacccggggctgcctggaagctgggctggagtccctgctgaaggcagctggggggaacctgctgatcctgcgcatctcccactgtccaaacatcctcaccgaccgctcgctctggctggccagctgctactgccgtgccctgcaggctgtcacgtacaggagtgccacagaccccgtgggccatgaggtcatttgggccctgggcgcaggctgcagagagatcgtctccctccaagtggcaccacttcacccctgccagcagcccacacgcttcagtaaccgctgcctgcagatgattggtcgctgttggccccacctgcgggccctgggggtcgggggtgccggctgtggggtgcagggcctggcatcactcgcgagaaactgcatgcggctgcaggtcctggagcttgaccacgtgtcagagatcacccaggaggtggcagcagaggtctgccgggaaggcctgaagggactggagatgctggtgctcacggcgactcccgtcacccctaaggccctactgcacttcaacagcatctgccggaacctcaagtccattgtggtccagattgggattgcggattatttcaaagagcccagcagccctgaggcccagaagctgtttgaggacatggtgacaaaactccaggctctgcgacggaggcccggcttctctaagattctgcacatcaaggtggaaggcggctgctaacccgggtagggggcggcagggcccctgccagccccacaccagggcactctctttggacctcagagggaccctggtttggactagacctttggaggccgagtgttatccctggcttctggagggggactgtcaagtctcctgtcctcctcctggagcagcagagcaacaggcctgacccagggcactgcctccccagtacaggggcttggacagaagctgccctccgacccccaccctaccccggctggagtagcctctggcacagccagtgaggagctgtcaccaccagcgcctggtgtcatcacctggaggatctgcaataaccacccagtggctcctcagctgttctggctggcctctccttcctgaggcccag

SEQ ID NO: 133649 - DNA, 6202 bp, Homo sapiens
  Payload ID: 6123
  Gene Symbol: FBXO42
  Gene Name: F-box protein 42
  Uniprot ID: Q6P3S6
  ENST ID: ENST00000375592
  CDS Start-End: 218-2371
agcagcagctgcggcggcggcggcgtttgagtggaggaagatggcggctccgggcggctcggggtcccgccagctgtgaggagccccgagcacggctgtcgcggcctgaggcagagcgcctctgctctggccctgtccctggctccctcattaccgtcgccagcggagcgaacccgagagcgtggagcgggctgggccagctgttgagtggaatgtcatggccagctcctcggacagtgaagatgacagtttcatggctgtggaccaggaagaaactgtgctggaagggacaatggatcaagatgaggagccccacccagtattggaggctgaggagactagacataataggtccatgtcggagctgccagaagaggttttggagtatatcctgtcctttctctcaccgtatcaggaacacaaaactgcggcccttgtctgcaaacagtggtatcgacttatcaaaggtgtagcccatcagtgttatcatggtttcatgaaggctgtccaggaaggaaacattcagtgggagagccgtacctatccttatcctggaaccccaatcactcagcgcttctcgcacagtgcatgctattatgatgctaatcagtctatgtatgtgtttggaggctgtacccagagcagctgcaatgctgctttcaatgacctctggagacttgacctaaacagcaaagagtggatccgacctttggcttcagggtcctatccttcccccaaagctggagcaactctggtcgtgtacaaggacttgctagtgctgtttggtggctggacgcggccaagcccttatcccctacaccagccagagagattctttgatgaaatacacacttactcaccctctaaaaattggtggaactgcattgtgacaacccatgggccacctcccatggctggccactcctcctgtgtgatagatgataaaatgattgtctttggtggctctttaggatcccggcaaatgagcaatgatgtctgggtccttgaccttgagcagtgggcgtggtccaagccgaacatctctggccccagtcctcatcctcgaggtggccaatctcagattgtcatagatgatgcaactatcttaatcctcggagggtgtggcggtcccaatgctctattcaaggatgcttggttgttgcacatgcattctggtccttgggcctggcagccactcaaggtagaaaatgaagagcatggggccccagaactgtggtgccatccagcttgccgggtgggacagtgtgtggtggtcttcagccaggctcctagtgggagagccccactcagccccagtttgaactctcgcccatcacctatcagtgccactcctccagctctcgttcctgaaacccgagagtaccgctctcagtctccagtaagaagcatggatgaagctccttgtgttaacggccgctggggaacactgagacccagggctcaaaggcagactccttcaggttcccgggaagggagcctttccccagccagaggagacggctctcctatcctcaatggtgggagtttgtctccaggaacggcagctgtgggtggctcttctttggacagtcctgtacaggccatatctccaagtactccatctgctcctgaaggatacgacctgaaaataggactttctttggccccccgacgaggatcactaccagatcagaaagatctgagattaggatccatagatctgaattgggatctgaaacccgcttccagtagtaatcccatggatggcatggacaataggacagttgggggaagtatgagacaccctcctgaacagacaaatggtgtgcataccccacctcacgtggccagtgcccttgcaggggccgtctccccaggtgccctgcgtcggagtctggaagccatcaaagcgatgtcctccaaaggcccctcggcctctgcagcactaagtcctcctcttgggtcttctccaggctctcctgggagccagagtttgagcagtggagaaacagtgcccatccctcgcccagggcctgcccaaggagatggacattccttacctcccattgctcgccgcctgggccaccaccctccacagtccctaaatgttggcaaacccctataccagagtatgaactgcaagcccatgcagatgtacgtgctggacattaaagacaccaaggagaaggggcgggtcaaatggaaagtatttaatagcagttctgtggttggacctcctgaaaccagcctgcataccgtggtacaaggcaggggtgaactcatcatatttggaggactcatggacaagaaacagaatgtgaagtactatccaaaaacaaacgccttgtactttgtacgagcaaagagataatgtgttctaaacccctttccttttctgtggcttttaatttggaattttccagtgtgtaagcatttggactgagaattgggaaaacaaaattactcccagaagccaaaactctttaattcccaaccgaagtcactccaggctgggatcaaatctccattaagaaaaaaaattatatataaatatatatatatatattatatagccaactctgttgacaaaaaaagggagagatttccatcctggttcagataaagttgttgctgtgttttaacaggggctgggctgcctttttctaccttgctggtaactagaccaagaagttagagaatagactaacatcagtaacttcccaaaagaaactgaagagccccctgtaaatctttatgtggccttcttggagttaaaaaatgaaagggcatatgtaagttgcaaaggtggagggttttagactctcatgcttcaggtgctgtcggggtaaaagtaactgtttttccccttctcttaaaaccacagaggacctgtgacagctctgcagaaatgccagtgcctggccccctcttgccttttatggctgaggaaagttacccaacaaaggattttattccacatttgtgtgccgggtcattgtgaaataatgtttatgcagccaacatctgaccgcctagtagtgtccattggtctttggagtgcttcttgtgtgtctcagaaaacattttgtgtctgattgtggaaatttctgacaatcaatcatatttggtggcaagttgccaaaaaacatatttattctcctctttcttcccttagaacatggtacttggaaactgccttttccattcacttacaggctgcttttttcttctaccttttttcttttcttttttttttttcatatgtggtgaagtcctaaaacctgtctgactttctgtttcttttacaaagctcaggtgcctacagaaatcagaagctgcttagaaatacttgtggaaccctttccctggtgtcactagggggccagtagggaattctaagatgccaatattgtgagaaatctttgaagcaagcatcaaaagatactgttttttccctatgggcttctttttacttccaaagcacattgagcacactcatcccatatttgtagaatgtggaaattgattctggaagggaattccaataacagttctttttagaaatgtttttttccttgtggtgacatatattcctcttcctggctattggcaggtgatggagttgagaatcatgtacttgacttcttgacgcatggctgacctcagaaacagctccatcctttgcacttgtcttcttcatgtgtcacccaaatagggcttgggtttttactttcacttcatttctgagattaaggtgtaaccaagtagagcatttctttgcttgatacagaaagttactagtctcaaccatggcctgggcataggagatgtcaaaataagtttatttcaaatggcaccatttaaatagggatttttggtgatttctcatcagtggaaagaggatttttgttttgcctttgttttgttttgaaatttaaatcctaatttcaaaacatcaccttgccaccctgacactcctctttttattattagcgtttctcaggcacaaagcctgctgcagctggccctgggtcctggctttcagccagcatctggcagcctaagtgtactgataagtgtgttttctcctgttacatcatgctgaatcctttcccttagccattagcttttatgatgtggtcttcgtaggaaagccaccctggtgccaagcctagcttgtggggaggggtatgtgttccagaaactgctctttgtgttcccttcaatgaggaaacaacatgtgtctacttatgtggcatccaactgcttggagctccacacttccctttcgcgactcaggctctggtgctgttgccaatccttgcttggcaaagactgttcgatcatgtggggtccttatttacaagggaaagctgggccagaaggctagcaattcaggtgttaccgctattgctgtaccttgtgttaggacattgtgtttgtgcatggactgtgcctccaaactcagtagttcctatctaaatataaagtatattagaaacctgaaagtacagaatctcaaccttacagtctttcccttagtcctgtggccttcctaagccagctgttaacgtgttgattccttccacttcccccaagtaggcaggcaacagatatgttgattgtcttagaaagtaatctggttcctctgaactccattgaattccagtttgacgcatactgcctggaaccagactgtttgcttacagctttttaagaaaaatctgccttgtctgcccccattatggttggtcttggtagctcctgggcactgtgggcgtgtaccatgggaaagtgattcaacacagtgaaggtgattgtctcctcaggcctcctgaagccacctgtgcggtgggacttcacgtgtctcggccaaggcgagcatttccacaatgccgtggatgctgcagtcaggccagattgaaccatgaccccatttttcacatgataccaattttgtcttaaaattcactgagaaaaatgagactaaattttttttaaccctcaggagcacctgaagcaaatatttatccgtatttattgaaaattcattttgtttctacttgaagctttaaccccttccattcctgcaagtgtgccttttgagagctcccatggcctagtgacttcactggtcaccttgtccatcttacttaagaattttagtctctccctaccctcttggacagagcttcctgttctcttatttcacaggttatacagcagagcgggttttgtgttttcattcctatttccacccttcatttggttggtggactccacaacctcaccctaccctacactttgggagcacaaatttggtgttgaaacaagcttaaatttcattttagggcatactgggcttactctcctcccagctgtctgtggattgatttgattttaatgttcgagttttacagcaacagctgaaaaccatgaactattctaggaactgtgttggaactctttaaaataaagaaaagaggaggaggaggaggaagaaagaaaaccaacttaagaagccttgactttggaggacagaaagccaccagccaatggagaacaaagagatgtttccctttcctttctttcaccttgtcattctgggtttccttctgcttcactctttccttcccccttaaaagtggtattcctggttggtctgtctgtctgtccttgtccttgtggtgatcctggcatggtgatatgctccactttgcattatccatggtctcttaccagcgcacaagtcagtggggaggatctaaccacgcctggtggtgaggaagctgaatttccaggcctgcgtcccatgtagcctctccatgaactgcagaaggcatgttctgcatggttaccagtaagtggctccctctcaccgtgttcattgtcaaatgagagcaaactttaggtgttggctccattgtacactctacttgctctgctcccctccctccaaccagggttcatgtcagtgcacaccccatgtgccctggcgaagctggtgctgtgagtgatgtttcccatacaactcagggatgccaggtggcttaccctgagatagtcattttgggcacataacagtgtaggaatgaaacatggatttcattgatatttaaatctgtcaatttcattttttgttaatgttttcccctgatgactttttagcaatttaacaaataaaatggacaattgtcttaac

SEQ ID NO: 133650 - DNA, 945 bp, Homo sapiens
  Payload ID: 6123
  Gene Symbol: FBXO42
  Gene Name: F-box protein 42
  ENST ID: ENST00000444116
  CDS Start-End: 50-945
gtctttcagttaggacgggagagggaggagggagtcaggtttattttcaatgtcttcccctcctcagattgtcatagatgatgcaactatcttaatcctcggagggtgtggcggtcccaatgctctattcaaggatgcttggttgttgcacatgcattctggtccttgggcctggcagccactcaaggtagaaaatgaagagcatggggccccagaactgtggtgccatccagcttgccgggtgggacagtgtgtggtggtcttcagccaggctcctagtgggagagccccactcagccccagtttgaactctcgcccatcacctatcagtgccactcctccagctctcgttcctgaaacccgagagtaccgctctcagtctccagtaagaagcatggatgaagctccttgtgttaacggccgctggggaacactgagacccagggctcaaaggcagactccttcaggttcccgggaagggagcctttccccagccagaggagacggctctcctatcctcaatggtgggagtttgtctccaggaacggcagctgtgggtggctcttctttggacagtcctgtacaggccatatctccaagtactccatctgctcctgaaggatacgacctgaaaataggactttctttggccccccgacgaggatcactaccagatcagaaagatctgagattaggatccatagatctgaattgggatctgaaacccgcttccagtagtaatcccatggatggcatggacaataggacagttgggggaagtatgagacaccctcctgaacagacaaatggtgtgcataccccacctcacgtggccagtgcccttgcaggggccgtctccccaggtgccctgcgtcggagtctggaagccatcaaagcgatgtcctccaaaggcccctcggcctctgcagcactaagtcctcctct

SEQ ID NO: 133651 - DNA, 1153 bp, Homo sapiens
  Payload ID: 6123
  Gene Symbol: FBXO42
  Gene Name: F-box protein 42
  ENST ID: ENST00000456164
  CDS Start-End: 258-1153
ctttgctgtgtcatttctcaagagaatcctgcattttatgtggttgacattcatgttaatatttgatcaacaaagaatgtatcctttcaggtgaattatcagtaatttattcacagggatcagaattgatatgtttttaggagaatggagaggttatggtaactagaatattcccatttgggagctaggtaggctattctcatataccagtgaagcatagaaagtcagaaacctgtgtctttgtaggtttattttcaatgtcttcccctcctcagattgtcatagatgatgcaactatcttaatcctcggagggtgtggcggtcccaatgctctattcaaggatgcttggttgttgcacatgcattctggtccttgggcctggcagccactcaaggtagaaaatgaagagcatggggccccagaactgtggtgccatccagcttgccgggtgggacagtgtgtggtggtcttcagccaggctcctagtgggagagccccactcagccccagtttgaactctcgcccatcacctatcagtgccactcctccagctctcgttcctgaaacccgagagtaccgctctcagtctccagtaagaagcatggatgaagctccttgtgttaacggccgctggggaacactgagacccagggctcaaaggcagactccttcaggttcccgggaagggagcctttccccagccagaggagacggctctcctatcctcaatggtgggagtttgtctccaggaacggcagctgtgggtggctcttctttggacagtcctgtacaggccatatctccaagtactccatctgctcctgaaggatacgacctgaaaataggactttctttggccccccgacgaggatcactaccagatcagaaagatctgagattaggatccatagatctgaattgggatctgaaacccgcttccagtagtaatcccatggatggcatggacaataggacagttgggggaagtatgagacaccctcctgaacagacaaatggtgtgcataccccacctcacgtggccagtgcccttgcaggggccgtctccccaggtgccctgcgtcggagtctggaagccatcaaagcgatgtcctccaaaggcccctcggcctctgcagcactaagtcctcctct

SEQ ID NO: 133652 - DNA, 2886 bp, Homo sapiens
  Payload ID: 6124
  Gene Symbol: FBXO43
  Gene Name: F-box protein 43
  Uniprot ID: Q4G163
  ENST ID: ENST00000428847
  CDS Start-End: 318-2444
gaccgttacccacccgcccgccatagctcctcgggggagtcagtgccaggctgcagcacacgctgccttttcaggaacccgaatttgggaagtttactcatgtctaagtccagctggagaaaacaaggatattaagataactattttctggagggctgaaggaaattcaaaatgatttagaccttctcaagtgttaggaataatccctgcggcatgcaccctgtgtacccttcgactttgagcaatcatgatgctgctgcacctttcaattaattgtgcaaactaaagttttcctctttaagtggcattattttggcatgagttttaaagacaaagatgagagaatttcttgtttggaagcctacgtaactttgacatctaagagctcaagatttactgatgaaacagagattttgaagatgtcgcaaaggcactcaggtcaagctggcactgaagcaggaaatggggcggactctcctccaattgtcaactccaagtactccaccttcagagatttttgttccacatcttcatttcaagatagtggctacaatgagttaaaatcttgtagctttgataatatagataaagaatatcttggaaagaaagaaaaaggcccaacattactctatgagcaccctgaaacttcaggcctgggcttaacacatcctttagaatctcccactcaaaaaaagaaatgtatcttgcctagaaaggaaaaggataaaaccccagaactttgtgaaacacctaaaatcagtgggaaaaaatgtttacctcgcagaaggttgaatgtatctttcgctcttctaaaaggggactttgaatcacaaaatagttctttagaaagtagtataagccaagttatcaacttagaaaaaaatattccaagcagtgcttcaggtttttccagggcaaataattttagccctttagttactagcactttaaaaacagaagaagtgacttcatgcagtcaaaaattgaggcttaatttttctcagcaaaagacttccacaattgatgattccaaagatgattgtagcctatttgaagttgaatgtatatctccaattcagggcaataattttaaagactctatcacacatgactttagtgatagcagtttatgcattaatgatgagaatgcatgtccagagctcctgggctcctctgttagtggaacaacttgtggaacagatgaggacatatttgtgactccgataagtaatcttgtggcaaacattagatttaacgcaagtcaaatactttctccttcacctgaagtgagaggcagtatttcaacgcctgaagacagtggttttaactcacttagcttggagaaatcagaagattccctgtctgaccaggagggttcttttcaagaactactgcagaaacataaggggactcccaaagttggggacaccataagaaagacaagacatcttggaaggtcgagaagactgtccacccttcgggaacaaagctcgcagtcagagacagaagaggaaaagcagattgtccaccctgactctgaaaaaagagcagcagctgcttctgccatctcagagggtcagctgagtagtgatgagagtggggatttgacctttagcttaaagaatttatcaaagaccccagccttgcaattggtacatgagctgttcatgaaaagcaagaggaaaagattacaggaaaatagtggacatgaattcttagagcaaggggatggggagaaaatagctgtactgcagtgtatacttgcaggactgatcggcaagaaaatgggtatagaaaaactggacatcttaacagaattaaaatatagaaatttaaagcatattcttgctatggttttagagtccttgaccgcagagagcctatgcagtgtttggaaagtaagcagaaattggcgtgaaattgttgttcaagataaaaatgcaaatcggaggaggaaattttatatcacacaactgaaaacagattctgagggggctgtattaaatgtcgaggatgctgccactcggctccagcttttaaatcgctcagctttaagatctgtgcaggcacaggctaggatacctggttctcagagagagcaagggtcaacattatctccctggggagaagttttgacacctctagcaagctcttctgttactcacttaagtagtaaacaggaagaatatgttaaggttgccaaaacactttttactgatgaagcattaaaaccttgcccaaggtgccagtcccctgctaagtaccagccatataagaaaaggggactgtgtagccgaacagcctgtggttttgacttttgtgtgttatgtctgtgtgcttatcatgggtctgaagaatgtagtagaggagcagcaaagccaagaaatagaaaagatgctctcccaggaagtgcccagagtaagcggaatttaaaacgcctctgaagagactaaatatagaactcccccatgcagtgttctatttatctgacttaaaattatgaatattttgaatacatgcaaatcttcccattaatgacaggtgatgattaatttcctattttgtatatattataatcgatgtcattgtatgttttctttaaagttgttttgaaaaaattttattttactatgtcattttacccattttaataacttggtattttaaataaagaattttcattgttgttatatgtatgtactttattgttttatgtaacattttaaatttgtgcatttcatcactcttgacatgttcttcaatcattttttaaaaaatagtttttcagataatattaaagattttgaactctagacagatggccttatagatttggaaaatgagtacttgactgaaatgaaatataaataaaatattttcagaagt

SEQ ID NO: 133653 - DNA, 3082 bp, Homo sapiens
  Payload ID: 6124
  Gene Symbol: FBXO43
  Gene Name: F-box protein 43
  ENST ID: ENST00000517806
  CDS Start-End: 666-776
ggcagcggccccacgcgaagctggcgtgggggttgccatagcccgcatcccagggggcgaggccgaggcttctccccggcccatccagcggctgctgcccggctcctctcccacctgtccgcttcggcgcctcgcccggccccgcggcctccaggcaggcggcgggaccccaggcgagtgcccgttagcgggtctcccggcggcccggccccgcgtcgccctgtgtcttccaggtgctgggcctagggaggcgcgcggcagccctcactcctccgctcctggtgacgccagcccatcccctgctgcccttggctttctgggcctagcggatctttgacgccctggtgagaccgttacccacccgcccgccatagctcctcgggggagtcagtgccaggctgcagcacacgctgccttttcaggaacccgaatttgggaagtttactcatgtctaagtccagctggagaaaacaaggatattaagataactattttctggagggctgaaggaaattcaaaatgatttagaccttctcaagtgttaggaataatccctgcggcatgcaccctgtgtacccttcgactttgagcaatcatgatgctgctgcacctttcaattaattgtgcaaactaaagttttcctctttaagtggcattattttggcatgagttttaaagacaaagatgagagaatttcttgtttggaagcctacgtaactttgacatctaagagctcaagatttactgatggtaagagtttccactttaacaaatgaagaacatttgggtttaataaacagagattttgaagatgtcgcaaaggcactcaggtcaagctggcactgaagcaggaaatggggcggactctcctccaattgtcaactccaagtactccaccttcagagatttttgttccacatcttcatttcaagatagtggctacaatgagttaaaatcttgtagctttgataatatagataaagaatatcttggaaagaaagaaaaaggcccaacattactctatgagcaccctgaaacttcaggcctgggcttaacacatcctttagaatctcccactcaaaaaaagaaatgtatcttgcctagaaaggaaaaggataaaaccccagaactttgtgaaacacctaaaatcagtgggaaaaaatgtttacctcgcagaaggttgaatgtatctttcgctcttctaaaaggggactttgaatcacaaaatagttctttagaaagtagtataagccaagttatcaacttagaaaaaaatattccaagcagtgcttcaggtttttccagggcaaataattttagccctttagttactagcactttaaaaacagaagaagtgacttcatgcagtcaaaaattgaggcttaatttttctcagcaaaagacttccacaattgatgattccaaagatgattgtagcctatttgaagttgaatgtatatctccaattcagggcaataattttaaagactctatcacacatgactttagtgatagcagtttatgcattaatgatgagaatgcatgtccagagctcctgggctcctctgttagtggaacaacttgtggaacagatgaggacatatttgtgactccgataagtaatcttgtggcaaacattagatttaacgcaagtcaaatactttctccttcacctgaagtgagaggcagtatttcaacgcctgaagacagtggttttaactcacttagcttggagaaatcagaagattccctgtctgaccaggagggttcttttcaagaactactgcagaaacataaggggactcccaaagttggggacaccataagaaagacaagacatcttggaaggtcgagaagactgtccacccttcgggaacaaagctcgcagtcagagacagaagaggaaaagcagattgtccaccctgactctgaaaaaagagcagcagctgcttctgccatctcagagggtcagctgagtagtgatgagagtggggatttgacctttagcttaaagaatttatcaaagaccccagccttgcaattggtacatgagctgttcatgaaaagcaagaggaaaagattacaggaaaatagtggacatgaattcttagagcaaggggatggggagaaaatagctgtactgcagtgtatacttgcaggactgatcggcaagaaaatgggtatagaaaaactggacatcttaacagaattaaaatatagaaatttaaagcatattcttgctatggttttagagtccttgaccgcagagagcctatgcagtgtttggaaagtaagcagaaattggcgtgaaattgttgttcaagataaaaatgcaaatcggaggaggaaattttatatcacacaactgaaaacagattctgagggggctgtattaaatgtcgaggatgctgccactcggctccagcttttaaatcgctcagctttaagatctgtgcaggcacaggctaggatacctggttctcagagagagcaagggtcaacattatctccctggggagaagttttgacacctctagcaagctcttctgttactcacttaagtagtaaacaggaagaatatgttaaggttgccaaaacactttttactgatgaagcattaaaaccttgcccaaggtgccagtcccctgctaagtaccagccatataagaaaaggggactgtgtagccgaacagcctgtggttttgacttttgtgtgttatgtctgtgtgcttatcatgggtctgaagaatgtagtagaggagcagcaaagccaagaaatagaaaagatgctctcccaggaagtgcccagagtaagcggaatttaaaacgcctctgaagagactaaatatagaactcccccatgcagtgttctatttatctgacttaaaattatgaatattttgaatacatgcaaatcttcccattaatgacaggtgatgattaatttcctattttgtatatattataatcgatgtcattgtatgttttctttaaagttgttttgaaaaaattttattttactatgtcattttacccattttaataacttggtattttaaataaagaattttcattgttgtta

SEQ ID NO: 133654 - DNA, 1896 bp, Homo sapiens
  Payload ID: 6125
  Gene Symbol: FBXO44
  Gene Name: F-box protein 44
  Uniprot ID: Q9H4M3
  ENST ID: ENST00000251546
  CDS Start-End: 238-912
agcgctgcgggctgcgcgagtcccggggcggcgagtcccggcgctgtccgcgtctgtgtcggtcccggcgaccgcgcctcttaaaggcccccgacccgacccgccccgccccgcctctggccccgcgcccggccgccccgcagtcccagcagtctgctcgaggcccggggctgcgggttcctcagcggaccgaggaggctgggaaagctacaggagggtgtccagaagccacaagccatggctgtggggaacatcaacgagctgcccgagaacatcctgctggagctgttcacgcacgtgcccgcccgccagctgctgctgaactgccgcctggtctgcagcctctggcgggacctcatcgacctcgtgaccctctggaaacgcaagtgcctgcgagagggcttcatcactgaggactgggaccagcccgtggccgactggaagatcttctacttcttacggagcctgcacaggaacctcctgcacaacccgtgcgctgaagaggggttcgagttctggagcctggatgtgaatggaggcgatgagtggaaggtggaggatctctctcgagaccagaggaaggaattccccaatgaccaggttcgcagccaggccagattgcgggtccaagtaccagctgtgcgttcagctcctgtcgtccgcgcacgcgcctctggggaccttccagccagacccggcgaccatccagcagaagagcgatgccaagtggagggaggtctcccacacattctccaactacccgcccggcgtccgctacatctggtttcagcacggcggcgtggacactcattactgggccggctggtacggcccgagggtcaccaacagcagcatcaccatcgggcccccgctgccctgacaccccctgagcccccatctgctgaaccctgactggtaaacaactgctgtcagaaaagggctgggcttgggaaggggaggtggaggccaggtgtccccagacctctaacccttgcccctagcagcctcttctttgtggagcctctcagtgtgggcagccctcgcatgctggggtcgggccagctctccccgaaaggtcttgacctgaatgatggccggggaagcctgcgtgtgcccctttcagagacggagcacctgagatgtgggaggtgcagcatgttcccctgggcccctcagaaagtcgagcttggaggccagcctggatctgtctctcccttcccctcctgggaccattctacctgtgttctttgaccctcggagcagggacaggcaagacaactggcaagcttgcagctgccctgatggtgcaggtgcagggaggtgaccatgtaactctgaccaatctgggaagtggagggtgggctcatgggccgtgctctgcccctgtctgctgctcccagtctctcgctctgcctgcctgctcagaagaggtggctttggcccagaggctcaggccgggactgagatggacagacccagggtggggtggggtccaggtcgggtgtggactgtcctcactgtcagtggagccccagaagctagatgggtaccaggtggggttaggttcccagaggactgagggaatcctgtacaggatgtcccagggtagatggggagcaggattgggacctgctctgacagctggacacatgagccctggatgagtatggtagggggtttgaagaatcccctgtccacctcccaaatccaggcccggccccctctggcttggagagcattccaagcccccaccccacccctagaactgccattcccaagacctctgtctcccagccaaccacccttggaacttgcctcttgtcctgctggaaagatagcagtgttctcctgacttcgccctactgcatgcagccaaataaaaggtgtgcccagtct

SEQ ID NO: 133655 - DNA, 2903 bp, Homo sapiens
  Payload ID: 6125
  Gene Symbol: FBXO44
  Gene Name: F-box protein 44
  Uniprot ID: Q9H4M3
  ENST ID: ENST00000251547
  CDS Start-End: 83-850
ggcggtgcagcttgggcggcccaacggatcgtgccgcggcggccgagcgcagctacaggagggtgtccagaagccacaagccatggctgtggggaacatcaacgagctgcccgagaacatcctgctggagctgttcacgcacgtgcccgcccgccagctgctgctgaactgccgcctggtctgcagcctctggcgggacctcatcgacctcgtgaccctctggaaacgcaagtgcctgcgagagggcttcatcactgaggactgggaccagcccgtggccgactggaagatcttctacttcttacggagcctgcacaggaacctcctgcacaacccgtgcgctgaagaggggttcgagttctggagcctggatgtgaatggaggcgatgagtggaaggtggaggatctctctcgagaccagaggaaggaattccccaatgaccaggtcaagaaatacttcgttacttcatattacacctgcctcaagtcccaggtggtggacctcaaggccgaagggtattgggaggagctgatggataccacacggccggacatcgaggtcaaggactggttcgcagccaggccagattgcgggtccaagtaccagctgtgcgttcagctcctgtcgtccgcgcacgcgcctctggggaccttccagccagacccggcgaccatccagcagaagagcgatgccaagtggagggaggtctcccacacattctccaactacccgcccggcgtccgctacatctggtttcagcacggcggcgtggacactcattactgggccggctggtacggcccgagggtcaccaacagcagcatcaccatcgggcccccgctgccctgacaccccctgagcccccatctgctgaaccctgactggtaaacaactgctgtcagaaaagggctgggcttgggaaggggaggtggaggccaggtgtccccagacctctaacccttgcccctagcagcctcttctttgtggagcctctcagtgtgggcagccctcgcatgctggggtcgggccagctctccccgaaaggtcttgacctgaatgatggccggggaagcctgcgtgtgcccctttcagagacggagcacctgagatgtgggaggtgcagcatgttcccctgggcccctcagaaagtcgagcttggaggccagcctggatctgtctctcccttcccctcctgggaccattctacctgtgttctttgaccctcggagcagggacaggcaagacaactggcaagcttgcagctgccctgatggtgcaggtgcagggaggtgaccatgtaactctgaccaatctgggaagtggagggtgggctcatgggccgtgctctgcccctgtctgctgctcccagtctctcgctctgcctgcctgctcagaagaggtggctttggcccagaggctcaggccgggactgagatggacagacccagggtggggtggggtccaggtcgggtgtggactgtcctcactgtcagtggagccccagaagctagatgggtaccaggtggggttaggttcccagaggactgagggaatcctgtacaggatgtcccagggtagatggggagcaggattgggacctgctctgacagctggacacatgagccctggatgagtatggtagggggtttgaagaatcccctgtccacctcccaaatccaggcccggccccctctggcttggagagcattccaagcccccaccccacccctagaactgccattcccaagacctctgtctcccagccaaccacccttggaacttgcctcttgtcctgctggaaagatagcagtgttctcctgacttcgccctactgcatgcagccaaataaaaggtgtgcccagtctaacctgtgccctgtggtttctggaaggaaaggcagactttaggtggtcctgcctggacctgcagatggtacaatggcatggcttctgtctaaggtacagaggggttggcatttcaggaaccaggccatcacagaaacaggttcatgggcagacccctcagtgagctgcaggtatctcacctggcagccgtccagtactgctggcttcctctggaggcccagccacaggctggggttggggtgtgtggacatctctgggcagctcttgagtccaccttgtgccagatcagcagtgccacccaggctctgcctcctggtgttactctttgccaacagctttacggacattggatgaagccgaagcatttagaatggtgcctggcacacagttggtgcgtgatatggttaagctttgtgtccccacccacatctcatcttgaatggtaatcctgggtgtttagggagagacctggtgggaagtgattggattatgggagcggttttcccccatgctgttctcatgatagtgagtgagttctcacgagatctgatggttttacaagtgacggtttccccggctccctcctgccgccatgtgaagaaggtcgttgcttccccttcaccttccaccaccatgattgtaagttccttttttcttttcttttcttttttttttttttttttttgagatggagtctcgctctgtcgcccaggctggagtgcagtggcgcaatctcagctcactgcaagctctgcctcccaggttcgcgccattcacctgcctcagcctctggagtagctgagactacaggcgcccaccaccatgcccggctaattttgtttgtatttttagtagagatggagtttcaccatgttggccagggtggtctcaatctcctgacctcgtgatccacccacctcgacctcccaaagtgctgagattacaggcgtgagccaccgcgcccagcgattgtttcttgaggcttccccagccatatggaactataagtcaattaaacctctttccttttataaatc

SEQ ID NO: 133656 - DNA, 822 bp, Homo sapiens
  Payload ID: 6125
  Gene Symbol: FBXO44
  Gene Name: F-box protein 44
  Uniprot ID: Q9H4M3
  ENST ID: ENST00000376760
  CDS Start-End: 104-778
gcttgggcggcccaacggatcgtgccgcggcggccgagcgcagctccttggaccgccccagtgacccctggagctacaggagggtgtccagaagccacaagccatggctgtggggaacatcaacgagctgcccgagaacatcctgctggagctgttcacgcacgtgcccgcccgccagctgctgctgaactgccgcctggtctgcagcctctggcgggacctcatcgacctcgtgaccctctggaaacgcaagtgcctgcgagagggcttcatcactgaggactgggaccagcccgtggccgactggaagatcttctacttcttacggagcctgcacaggaacctcctgcacaacccgtgcgctgaagaggggttcgagttctggagcctggatgtgaatggaggcgatgagtggaaggtggaggatctctctcgagaccagaggaaggaattccccaatgaccaggttcgcagccaggccagattgcgggtccaagtaccagctgtgcgttcagctcctgtcgtccgcgcacgcgcctctggggaccttccagccagacccggcgaccatccagcagaagagcgatgccaagtggagggaggtctcccacacattctccaactacccgcccggcgtccgctacatctggtttcagcacggcggcgtggacactcattactgggccggctggtacggcccgagggtcaccaacagcagcatcaccatcgggcccccgctgccctgacaccccctgagcccccatctgctgaaccctgactggtaaacaactgctgtcagaaaagggctgggcttgggaaggg

SEQ ID NO: 133657 - DNA, 1734 bp, Homo sapiens
  Payload ID: 6125
  Gene Symbol: FBXO44
  Gene Name: F-box protein 44
  Uniprot ID: Q9H4M3
  ENST ID: ENST00000376762
  CDS Start-End: 74-748
gcttgggcggcccaacggatcgtgccgcggcggccgagcgcagctacaggagggtgtccagaagccacaagccatggctgtggggaacatcaacgagctgcccgagaacatcctgctggagctgttcacgcacgtgcccgcccgccagctgctgctgaactgccgcctggtctgcagcctctggcgggacctcatcgacctcgtgaccctctggaaacgcaagtgcctgcgagagggcttcatcactgaggactgggaccagcccgtggccgactggaagatcttctacttcttacggagcctgcacaggaacctcctgcacaacccgtgcgctgaagaggggttcgagttctggagcctggatgtgaatggaggcgatgagtggaaggtggaggatctctctcgagaccagaggaaggaattccccaatgaccaggttcgcagccaggccagattgcgggtccaagtaccagctgtgcgttcagctcctgtcgtccgcgcacgcgcctctggggaccttccagccagacccggcgaccatccagcagaagagcgatgccaagtggagggaggtctcccacacattctccaactacccgcccggcgtccgctacatctggtttcagcacggcggcgtggacactcattactgggccggctggtacggcccgagggtcaccaacagcagcatcaccatcgggcccccgctgccctgacaccccctgagcccccatctgctgaaccctgactggtaaacaactgctgtcagaaaagggctgggcttgggaaggggaggtggaggccaggtgtccccagacctctaacccttgcccctagcagcctcttctttgtggagcctctcagtgtgggcagccctcgcatgctggggtcgggccagctctccccgaaaggtcttgacctgaatgatggccggggaagcctgcgtgtgcccctttcagagacggagcacctgagatgtgggaggtgcagcatgttcccctgggcccctcagaaagtcgagcttggaggccagcctggatctgtctctcccttcccctcctgggaccattctacctgtgttctttgaccctcggagcagggacaggcaagacaactggcaagcttgcagctgccctgatggtgcaggtgcagggaggtgaccatgtaactctgaccaatctgggaagtggagggtgggctcatgggccgtgctctgcccctgtctgctgctcccagtctctcgctctgcctgcctgctcagaagaggtggctttggcccagaggctcaggccgggactgagatggacagacccagggtggggtggggtccaggtcgggtgtggactgtcctcactgtcagtggagccccagaagctagatgggtaccaggtggggttaggttcccagaggactgagggaatcctgtacaggatgtcccagggtagatggggagcaggattgggacctgctctgacagctggacacatgagccctggatgagtatggtagggggtttgaagaatcccctgtccacctcccaaatccaggcccggccccctctggcttggagagcattccaagcccccaccccacccctagaactgccattcccaagacctctgtctcccagccaaccacccttggaacttgcctcttgtcctgctggaaagatagcagtgttctcctgacttcgccctactgcatgcagccaaataaaaggtgtgcccagtctaa

SEQ ID NO: 133658 - DNA, 959 bp, Homo sapiens
  Payload ID: 6125
  Gene Symbol: FBXO44
  Gene Name: F-box protein 44
  ENST ID: ENST00000376768
  CDS Start-End: 103-873
tccaggcaagcgcaggtccaggcggtgcagcttgggcggcccaacggatcgtgccgcggcggccgagcgcagctacaggagggtgtccagaagccacaagccatggctgtggggaacatcaacgagctgcccgagaacatcctgctggagctgttcacgcacgtgcccgcccgccagctgctgctgaactgccgcctggtctgcagcctctggcgggacctcatcgacctcgtgaccctctggaaacgcaagtgcctgcgagagggcttcatcactgaggactgggaccagcccgtggccgactggaagatcttctacttcttacggagcctgcacaggaacctcctgcacaacccgtgcgctgaagaggggttcgagttctggagcctggatgtgaatggaggcgatgagtggaaggtggaggatctctctcgagaccagaggaaggaattccccaatgaccagcacctgcctcaagtcccaggtggtggacctcaaggccgaagggtattgggaggagctgatggataccacacggccggacatcgaggtcaaggactggttcgcagccaggccagattgcgggtccaagtaccagctgtgcgttcagctcctgtcgtccgcgcacgcgcctctggggaccttccagccagacccggcgaccatccagcagaagagcgatgccaagtggagggaggtctcccacacattctccaactacccgcccggcgtccgctacatctggtttcagcacggcggcgtggacactcattactgggccggctggtacggcccgagggtcaccaacagcagcatcaccatcgggcccccgctgccctgacaccccctgagcccccatctgctgaaccctgactggtaaacaactgctgtcagaaaagggctgggcttgggaaggggaggtggaggccaggtgtccccagacctctaacccttgcccc

SEQ ID NO: 133659 - DNA, 3320 bp, Homo sapiens
  Payload ID: 6125
  Gene Symbol: FBXO44
  Gene Name: F-box protein 44
  Uniprot ID: Q9H4M3
  ENST ID: ENST00000376770
  CDS Start-End: 499-1266
gcgggccggggcggggcctcgctttccaggcaagcgcaggtccaggcggtgcagcttgggcggcccaacggatcgtgccgcggcggccgagcgcaggcaggagatcatgtcctctgagatcttgagaaggtggctggagccctttggacctccgcgggaggcagtgataattagcctcctcctcccatcatgttctgaggatgggagagaggatggtgacggcaccggaggcctggggtgctctgcccggctgcgcattatatccccattaaagactggcctactgaaaaaggctggccctggaatcaaagaagatccgggcttcttccccctctgcccttatttttgaccttgggcagtgccttccacctctattgtgagaggccagagaaaaaaatcagagctcaccttttattaaagtacctgatgtgtcccaagctccttggaccgccccagtgacccctggagctacaggagggtgtccagaagccacaagccatggctgtggggaacatcaacgagctgcccgagaacatcctgctggagctgttcacgcacgtgcccgcccgccagctgctgctgaactgccgcctggtctgcagcctctggcgggacctcatcgacctcgtgaccctctggaaacgcaagtgcctgcgagagggcttcatcactgaggactgggaccagcccgtggccgactggaagatcttctacttcttacggagcctgcacaggaacctcctgcacaacccgtgcgctgaagaggggttcgagttctggagcctggatgtgaatggaggcgatgagtggaaggtggaggatctctctcgagaccagaggaaggaattccccaatgaccaggtcaagaaatacttcgttacttcatattacacctgcctcaagtcccaggtggtggacctcaaggccgaagggtattgggaggagctgatggataccacacggccggacatcgaggtcaaggactggttcgcagccaggccagattgcgggtccaagtaccagctgtgcgttcagctcctgtcgtccgcgcacgcgcctctggggaccttccagccagacccggcgaccatccagcagaagagcgatgccaagtggagggaggtctcccacacattctccaactacccgcccggcgtccgctacatctggtttcagcacggcggcgtggacactcattactgggccggctggtacggcccgagggtcaccaacagcagcatcaccatcgggcccccgctgccctgacaccccctgagcccccatctgctgaaccctgactggtaaacaactgctgtcagaaaagggctgggcttgggaaggggaggtggaggccaggtgtccccagacctctaacccttgcccctagcagcctcttctttgtggagcctctcagtgtgggcagccctcgcatgctggggtcgggccagctctccccgaaaggtcttgacctgaatgatggccggggaagcctgcgtgtgcccctttcagagacggagcacctgagatgtgggaggtgcagcatgttcccctgggcccctcagaaagtcgagcttggaggccagcctggatctgtctctcccttcccctcctgggaccattctacctgtgttctttgaccctcggagcagggacaggcaagacaactggcaagcttgcagctgccctgatggtgcaggtgcagggaggtgaccatgtaactctgaccaatctgggaagtggagggtgggctcatgggccgtgctctgcccctgtctgctgctcccagtctctcgctctgcctgcctgctcagaagaggtggctttggcccagaggctcaggccgggactgagatggacagacccagggtggggtggggtccaggtcgggtgtggactgtcctcactgtcagtggagccccagaagctagatgggtaccaggtggggttaggttcccagaggactgagggaatcctgtacaggatgtcccagggtagatggggagcaggattgggacctgctctgacagctggacacatgagccctggatgagtatggtagggggtttgaagaatcccctgtccacctcccaaatccaggcccggccccctctggcttggagagcattccaagcccccaccccacccctagaactgccattcccaagacctctgtctcccagccaaccacccttggaacttgcctcttgtcctgctggaaagatagcagtgttctcctgacttcgccctactgcatgcagccaaataaaaggtgtgcccagtctaacctgtgccctgtggtttctggaaggaaaggcagactttaggtggtcctgcctggacctgcagatggtacaatggcatggcttctgtctaaggtacagaggggttggcatttcaggaaccaggccatcacagaaacaggttcatgggcagacccctcagtgagctgcaggtatctcacctggcagccgtccagtactgctggcttcctctggaggcccagccacaggctggggttggggtgtgtggacatctctgggcagctcttgagtccaccttgtgccagatcagcagtgccacccaggctctgcctcctggtgttactctttgccaacagctttacggacattggatgaagccgaagcatttagaatggtgcctggcacacagttggtgcgtgatatggttaagctttgtgtccccacccacatctcatcttgaatggtaatcctgggtgtttagggagagacctggtgggaagtgattggattatgggagcggttttcccccatgctgttctcatgatagtgagtgagttctcacgagatctgatggttttacaagtgacggtttccccggctccctcctgccgccatgtgaagaaggtcgttgcttccccttcaccttccaccaccatgattgtaagttccttttttcttttcttttcttttttttttttttttttttgagatggagtctcgctctgtcgcccaggctggagtgcagtggcgcaatctcagctcactgcaagctctgcctcccaggttcgcgccattcacctgcctcagcctctggagtagctgagactacaggcgcccaccaccatgcccggctaattttgtttgtatttttagtagagatggagtttcaccatgttggccagggtggtctcaatctcctgacctcgtgatccacccacctcgacctcccaaagtgctgagattacaggcgtgagccaccgcgcccagcgattgtttcttgaggcttccccagccatatggaactataagtcaattaaacctctttccttttataaatca

SEQ ID NO: 133660 - DNA, 994 bp, Homo sapiens
  Payload ID: 6125
  Gene Symbol: FBXO44
  Gene Name: F-box protein 44
  ENST ID: ENST00000425796
  CDS Start-End: 499-994
gcgggccggggcggggcctcgctttccaggcaagcgcaggtccaggcggtgcagcttgggcggcccaacggatcgtgccgcggcggccgagcgcaggcaggagatcatgtcctctgagatcttgagaaggtggctggagccctttggacctccgcgggaggcagtgataattagcctcctcctcccatcatgttctgaggatgggagagaggatggtgacggcaccggaggcctggggtgctctgcccggctgcgcattatatccccattaaagactggcctactgaaaaaggctggccctggaatcaaagaagatccgggcttcttccccctctgcccttatttttgaccttgggcagtgccttccacctctattgtgagaggccagagaaaaaaatcagagctcaccttttattaaagtacctgatgtgtcccaagctccttggaccgccccagtgacccctggagctacaggagggtgtccagaagccacaagccatggctgtggggaacatcaacgagctgcccgagaacatcctgctggagctgttcacgcacgtgcccgcccgccagctgctgctgaactgccgcctggtctgcagcctctggcgggacctcatcgacctcgtgaccctctggaaacgcaagtgcctgcgagagggcttcatcactgaggactgggaccagcccgtggccgactggaagatcttctacttcttacggagcctgcacaggaacctcctgcacaacccgtgcgctgaagaggggttcgagttctggagcctggatgtgaatggaggcgatgagtggaaggtggaggatctctctcgagaccagaggaaggaattccccaatgaccaggttcgcagccaggccagattgcgggtccaagtaccagctgtgcgttcagctcctgtcgtccgcgcacgcgcctctggggaccttccagccagacccggcgaccatccagcagaagagcgatgccaagtggagg

SEQ ID NO: 133661 - DNA, 942 bp, Homo sapiens
  Payload ID: 6125
  Gene Symbol: FBXO44
  Gene Name: F-box protein 44
  ENST ID: ENST00000475435
  CDS Start-End: 1-446
tgcacaggaacctcctgcacaacccgtgcgctgaagaggggttcgagttctggagcctggatgtgaatggaggcgatgagtggaaggtggaggatctctctcgagaccagaggaaggaattccccaatgaccaggttcgcagccaggccagattgcgggtccaagtaccagctgtgcgttcagctcctgtcgtccgcgcacgcgcctctggggaccttccagccagacccggcgaccatccagcagaagagcgatgccaagtggagggaggtctcccacacattctccaactacccgcccggcgtccgctacatctggtttcagcacggcggcgtggacactcattactgggccggctggtacggcccgagggtcaccaacagcagcatcaccatcgggcccccgctgccctgacaccccctgagcccccatctgctgaaccctgactgctttacggacattggatgaagccgaagcatttagaatggtgcctggcacacagttggtgcgtgatatggttaagctttgtgtccccacccacatctcatcttgaatggtaatcctgggtgtttagggagagacctggtgggaagtgattggattatgggagcggttttcccccatgctgttctcatgatagtgagtgagttctcacgagatctgatggttttacaagtgacggtttccccggctccctcctgccgccatgtgaagaaggtcgttgcttccccttcaccttccaccaccatgattgtaagttccttttttcttttcttttcttttttttttttttttttttgagatggagtctcgctctgtcgcccaggctggagtgcagtggcgcaatctcagctcactgcaagctctgcctcccaggttcgcgccattcacctgcctcagcctctggagtagctgagactacaggcgcccaccaccatgccc

SEQ ID NO: 133662 - DNA, 769 bp, Homo sapiens
  Payload ID: 6125
  Gene Symbol: FBXO44
  Gene Name: F-box protein 44
  ENST ID: ENST00000471895
  CDS Start-End: 1-399
caagtcccaggtggtggacctcaaggccgaagggtattgggaggagctgatggataccacacggccggacatcgaggtcaaggactggttcgcagccaggccagattgcgggtccaagtaccagctgtgcgttcagctcctgtcgtccgcgcacgcgcctctggggaccttccagccagacccggcgaccatccagcagaagagcgatgccaagtggagggaggtctcccacacattctccaactacccgcccggcgtccgctacatctggtttcagcacggcggcgtggacactcattactgggccggctggtacggcccgagggtcaccaacagcagcatcaccatcgggcccccgctgccctgacaccccctgagcccccatctgctgaaccctgactgctttacggacattggatgaagccgaagcatttagaatggtgcctggcacacagttggtgcgtgatatggttaagctttgtgtccccacccacatctcatcttgaatgtgacggtttccccggctccctcctgccgccatgtgaagaaggtcgttgcttccccttcaccttccaccaccatgatttagagatggagtttcaccatgttggccagggtggtctcaatctcctgacctcgtgatccacccacctcgacctcccaaagtgctgagattacaggcgtgagccaccgcgcccagcgattgtttcttgaggcttccccagccatatggaactataagtcaattaaacctctttccttttataaa

SEQ ID NO: 133663 - DNA, 5899 bp, Homo sapiens
  Payload ID: 6126
  Gene Symbol: FBXO45
  Gene Name: F-box protein 45
  Uniprot ID: P0C2W1
  ENST ID: ENST00000311630
  CDS Start-End: 298-1158
ggcggagccgctggcgcgccgcggagaggccgggcgagtcgggcggtttcggcgcccgcgctgagccgcggaggaggggcggaggacgcccctgcagccggtgcgtctgccctcagtgaggcggggcgcgcggcggacgcccccgggcaggggcgggagtggtggaggcgccggcggttggcactgacaggggcggtgagcgagccgctccggtctccgggcgaggcttggccttccgagcagagacggcgggaagcggcggcggcagcggcggccctagggccggctggtgaggcgatggcggcgccggccccgggggctggggcagcctcgggcggcgctggctgtagcggcggcggcgcgggcgcgggcgcgggctcgggctctggggccgcgggggccgggggccggctgcccagccgggtgctggagttggtgttctcttacctggagctgtccgagctgcggagctgcgccctggtgtgcaagcactggtaccgctgcctgcacggcgatgagaacagcgaggtgtggcggagcctgtgcgcccgcagcctggcagaagaggctctgcgcacggacatcctgtgcaacctgcccagctacaaggccaagatacgtgcttttcaacatgccttcagcactaatgactgctccaggaatgtctacattaagaagaatggctttactttacatcgaaaccccattgctcagagcactgatggtgcaaggaccaagattggtttcagtgagggccgccatgcatgggaagtgtggtgggagggccctctgggcactgtggcagtgattggaattgccacaaaacgggcccccatgcagtgccaaggttatgtggcattgctgggcagtgatgaccagagctggggctggaatctggtggacaataatctactacataatggagaagtcaatggcagttttccacagtgcaacaacgcaccaaaatatcagataggagaaagaattcgagtcatcttggacatggaagataagactttagcttttgaacgtggatatgagttcctgggggttgcttttagaggacttccaaaggtctgcttatacccagcagtttctgctgtatatggcaacacagaagtgactttggtttaccttggaaaacctttggacggatgacagtggctttcttgtgatgacagacagaatggaggagagatctgcttatgggaagtagaaccatgaagtgactgtcacacatgcatgtccaagaaacatcctgaaaacacatgaagtcgtaaactggagaagcagctctacagcagagattatcttcgtgtttcctctttctactgggccagaaaaatcctcagggttgcagttggttgagtgggcagttgacatatgcatgttgcacccgatgttgtctctaagttagcaatgtgttatttccagctttaaaggtgagattgtagagatgctgtcaaagggataaggaaatagcaagatttttaagtagtgtgtttgtgaagactgatcccattttacaactgcctgttctttctccagtccttttttttccagccagcttgactattagaaaagtatgaaactggttgggttttatttaatatttttaatatattgagaagcatggtctgcctggactgcacttctctaaaagtgagatataaaattgtgcagctattttaaaagttgtatataatatgtgtgtaaaaaaaaaaaactgtaaaaaagaaaggacaaacaggttgttttgttctagttctaatttcttaaaaaccactacatggttacaaaattggaataacatttggggacaactgggttaactacaaagaagaggattttaagaggagatgtgttgtattgactcattttgtattatttttggcttacagttcccatagctgttagagtctggtttgtttttgtttttactctcaaaatcatagtaaagatctctcagtctcctggctaaagattgaaggaaggcaaatctatttctaattatacatatatcagtaaggatgatctcaacataatagtaatgtgtatcttttggtatccagttttatttttggccttctaagaaagtgtctcataacacagaacattgccatttgctcttgtaggcctcaaatatgaaagctattagtcatagagcctaggaaaaaaagaattgattaatggtccttttattttgtaaccttataaatgctgtagatattatcaaaaaaattttaatttcatattgtttacatcatgcaactaatctaagcctcaaactcgttattggggctataaagaaaacgtttacttacccagctgaaacaggttaagaatattcttaatctcattatagataattgcccccatgggacttgaaatacaacaccttgtgctgaaaacttcaggttggcaatatttgaaggtttcgttgtagaagagtttaacattaactcctattttgacttacaaatcttgtttctcatcactaaaatgcttttgaattaataatccaacccacatgagctgagagtttttcttttgttagaaaagaaacagacatctttctgtatgaaagtataaattgtatggttttagatacataagaattgacaaaagcgagcgaaatctttgtacttctgagttcttgctgtatgtatgttttgttttaaatctgattagggacacccagcagctggccgggattcttggattgctccttgggagttaagattgtcaatactcctgtgaagcaagggatttcagccatagaacaaagatttattgttgccacctgaaaagtttacaagtatttattgtgtatttgatacattgcttgaaaagatgaaatctgttaaagattcttttcgatgtccaggttaagaagaaacctccttgtattgagtgaaattatatgttaaatgtattagagaatgtaggtggtatagaaattgatttttcttggtgtagaacaactcagttcggcaaagtttaaaatttgattaaacaagagaagtggttcaggttgaagatggacttgttaggaagtgatcaagtcctttaagtacttgtttctttttcaggttgtgatgtggccattccgaattttgttgagagtttggtttataattgtctcttttgtcttgttagtaaacattcatttgcaacagttttgaaggtgctgagtggaaaaccgaaacacatggttattgcgtattggacctagaatgaaataattgcctcaatatttaacaacaagccattcttatctcaaagatttaaattcccgaatgtcccattcgcaaatcatatgcaattgaagtgagcagcatgagcatctgggtcatgagggccttcatttacgtaaatttgtcactaaaacccagtagtagctctacaaaatcttaaactgctgcagtgctcaaggagatggaatatctttgtcattggtgctgaggagagcatttcggtagaagacagttgcgcctgaagattgagtgtaaatcattcaaaccagtggttctcagtgttggctgtatacactttgtagtcactttggaatgttggaagacacatcgatgcttgggttccgtatgccaagattctgatgttggtctggaatatgagctggtcataaggatttttaaaaactttctggtcatttcaatatgctgccaaggttgagaaccactgttgtaaaattcaccttgagttttctcatctgcaaaatagaaaaaaaaaaatccttgctccctcccttcactacctcacaaggatattgagggtaaaggagaaaataatgggaaagtgcttgtgccgtggatgaaaagtgctattaaaagtcaaaggagtgttctgtttcaattcatagtatgatcagggaaagtgtaactgagtatactttgttgacttgggaaacctggagcactttctttggttggttaacgaagcatgcagatgtggaagcagacgttactattatccctactatggtcttctgtcatactgagacaggctgttttaattacctggttttacataggaaagaagaaatattaaggcttaaagtttgtaatgatcaatggctcataattcattaaatcttttcatacaaggaatttgtggttaatgtcatttcatagttgccattattttctcattatttgacttaaatgttaagccatttatttcatctccctcattcacataaagtgtagatatggattcaataagacaccaaaagaaagtaagatttacccagttaatatttaaaatcattgttcagtgattaggcattttctgccttttagaattatttgactggagaaagagtttcaaaaatagcagagccctaaaccataaagaaactactactgtataatgaacttttgtttgtttttggagacagggtttcactctactgcctaggcaggtcttgaactcctgggctcaagcagtcttcctgcctcagcctcccaagtagctgggattacaggtgtatgccactatacccagctttaacttttaaatccccaaactatgtagattgtcatattaatattaatttttttttgttattttgaagaagtgagtaatttgaagagatagaaacttagggagtggtgtgtgtgtttcttttttggagacagagtcacgcaggctggagtgcacgatcttgactcactgcaacctttgccacccaggttcaagcaattctcgtgcctcagcctcccgagtagcatgtgccaccacacctggctaatttttttcttttttcttttagacggagtcttgctctgttgcccaggctggagtgcggtggtgtgatctcagttcactgcaacctttgcctcccgggttcaagtgattctcctgcctcagtctcccgagtagctgggattacaggcacctgccaccatgcctggctaatttttgtatttttaatagagacggggtttcaccatgttggccaggctggtctcgaactcctgaccttgtgatccacccacctcagcctcccaaagtgctgggattacaggcatgagccactgttcccgggcctaatctttgtatttttagtagagggggtttatgccatgttggccaggctggtcttgaactcctggccaacaccacccacctcgcctcccaaagtgctggggttacaggcgcgagccaccgtgccaggccagaaatttaaggagttttaaaggttagcattgaaaagattactttccagaaattgagaccaccacagttccacaattgggactgtggtagataatcaggaccacttggaagcctttattaggaacagcccacacccagcccaaatgctgtcctcaaaaacattcctcagtttctctagctgaatgtaatctctccttgaaatttccctagttttatatatctatagttgactcatgctgtatttatttataccttgtttaaaattatttattgattatttattggtgtcatatcgcccctaaactgggacaggatctctaacggactcatctttgtgccacaacatgtaagcccaataggcaggtgctcacatatttgctgaaggaacagagaaagaactgcggagaaagacaaaagctcctctgaagttttagactatagaagcaaaaattatagtagcaaaagatgaatgagaaattctgttctagtcccagtgaagcaggaaggaaagggttgcaaacttgaggctggtaaggaagaaataattactgtgaatgcatttagccactcccctctactcaaaaatactggtaaactctgatttttatatttgtttagaatttaaattagaattctgtatctttattttttggaattctgttgttttgccttagtttcttaataaaaagttaaacattaa

SEQ ID NO: 133664 - DNA, 3689 bp, Homo sapiens
  Payload ID: 6126
  Gene Symbol: FBXO45
  Gene Name: F-box protein 45
  ENST ID: ENST00000440469
  CDS Start-End: 397-720
aaacagtcacatccggggccgagaggaaccgcgaacgagctgggcgtgcgcccttgcttcgtgccctcaacccgcatggcggagccgctggcgcgccgcggagaggccgggcgagtcgggcggtttcggcgcccgcgctgagccgcggaggaggggcggaggacgcccctgcagccgatacgtgcttttcaacatgccttcagcactaatgactgctccaggaatgtctacattaagaagaatggctttactttacatcgaaaccccattgctcagagcactgatggtgcaaggaccaagattggtttcagtgagggccgccatgcatgggaagtgtggtgggagggccctctgggcactgtggcagtgattggaattgccacaaaacgggcccccatgcagtgccaaggttatgtggcattgctgggcagtgatgaccagagctggggctggaatctggtggacaataatctactacataatggagaagtcaatggcagttttccacagtgcaacaacgcaccaaaatatcagataggagaaagaattcgagtcatcttggacatggaagataagactttagcttttgaacgtggatatgagttcctgggggttgcttttagaggacttccaaaggtctgcttatacccagcagtttctgctgtatatggcaacacagaagtgactttggtttaccttggaaaacctttggacggatgacagtggctttcttgtgatgacagacagaatggaggagagatctgcttatgggaagtagaaccatgaagtgactgtcacacatgcatgtccaagaaacatcctgaaaacacatgaagtcgtaaactggagaagcagctctacagcagagattatcttcgtgtttcctctttctactgggccagaaaaatcctcagggttgcagttggttgagtgggcagttgacatatgcatgttgcacccgatgttgtctctaagttagcaatgtgttatttccagctttaaaggtgagattgtagagatgctgtcaaagggataaggaaatagcaagatttttaagtagtgtgtttgtgaagactgatcccattttacaactgcctgttctttctccagtccttttttttccagccagcttgactattagaaaagtatgaaactggttgggttttatttaatatttttaatatattgagaagcatggtctgcctggactgcacttctctaaaagtgagatataaaattgtgcagctattttaaaagttgtatataatatgtgtgtaaaaaaaaaaaactgtaaaaaagaaaggacaaacaggttgttttgttctagttctaatttcttaaaaaccactacatggttacaaaattggaataacatttggggacaactgggttaactacaaagaagaggattttaagaggagatgtgttgtattgactcattttgtattatttttggcttacagttcccatagctgttagagtctggtttgtttttgtttttactctcaaaatcatagtaaagatctctcagtctcctggctaaagattgaaggaaggcaaatctatttctaattatacatatatcagtaaggatgatctcaacataatagtaatgtgtatcttttggtatccagttttatttttggccttctaagaaagtgtctcataacacagaacattgccatttgctcttgtaggcctcaaatatgaaagctattagtcatagagcctaggaaaaaaagaattgattaatggtccttttattttgtaaccttataaatgctgtagatattatcaaaaaaattttaatttcatattgtttacatcatgcaactaatctaagcctcaaactcgttattggggctataaagaaaacgtttacttacccagctgaaacaggttaagaatattcttaatctcattatagataattgcccccatgggacttgaaatacaacaccttgtgctgaaaacttcaggttggcaatatttgaaggtttcgttgtagaagagtttaacattaactcctattttgacttacaaatcttgtttctcatcactaaaatgcttttgaattaataatccaacccacatgagctgagagtttttcttttgttagaaaagaaacagacatctttctgtatgaaagtataaattgtatggttttagatacataagaattgacaaaagcgagcgaaatctttgtacttctgagttcttgctgtatgtatgttttgttttaaatctgattagggacacccagcagctggccgggattcttggattgctccttgggagttaagattgtcaatactcctgtgaagcaagggatttcagccatagaacaaagatttattgttgccacctgaaaagtttacaagtatttattgtgtatttgatacattgcttgaaaagatgaaatctgttaaagattcttttcgatgtccaggttaagaagaaacctccttgtattgagtgaaattatatgttaaatgtattagagaatgtaggtggtatagaaattgatttttcttggtgtagaacaactcagttcggcaaagtttaaaatttgattaaacaagagaagtggttcaggttgaagatggacttgttaggaagtgatcaagtcctttaagtacttgtttctttttcaggttgtgatgtggccattccgaattttgttgagagtttggtttataattgtctcttttgtcttgttagtaaacattcatttgcaacagttttgaaggtgctgagtggaaaaccgaaacacatggttattgcgtattggacctagaatgaaataattgcctcaatatttaacaacaagccattcttatctcaaagatttaaattcccgaatgtcccattcgcaaatcatatgcaattgaagtgagcagcatgagcatctgggtcatgagggccttcatttacgtaaatttgtcactaaaacccagtagtagctctacaaaatcttaaactgctgcagtgctcaaggagatggaatatctttgtcattggtgctgaggagagcatttcggtagaagacagttgcgcctgaagattgagtgtaaatcattcaaaccagtggttctcagtgttggctgtatacactttgtagtcactttggaatgttggaagacacatcgatgcttgggttccgtatgccaagattctgatgttggtctggaatatgagctggtcataaggatttttaaaaactttctggtcatttcaatatgctgccaaggttgagaaccactgttgtaaaattcaccttgagttttctcatctgcaaaatagaaaaaaaaaaatccttgctccctcccttcactacctcacaaggatattgagggtaaaggagaaaataatgggaaagtgcttgtgccgtggatgaaaagtgctattaaaagtcaaaggagtgttctgtttcaattcatagtatgatcagggaaagtgtaactgagtatactttgttgacttgggaaacctggagcactttctttggttggttaacgaagcatgcagatgtggaagcagacgttactattatccctactatggtcttctgtcatactgagacaggctgttttaattacctggttttacataggaaagaagaaatattaaggcttaaagtttgtaatgatcaatggctcataattcattaaatcttttcatacaaggaa

SEQ ID NO: 133665 - DNA, 3001 bp, Homo sapiens
  Payload ID: 6127
  Gene Symbol: FBXO46
  Gene Name: F-box protein 46
  Uniprot ID: Q6PJ61
  ENST ID: ENST00000317683
  CDS Start-End: 135-1946
agaggagcgagtgggggaaacccgcgtagccgagggagatgcagcgcgcggcgatggtggcatgtggagcctcccaccaccacctaggtcctgagatgcgctgaagcccagcctgtctgccatcatcccccagcatggaccgtgggagcctcctgcccttccagctatggtgcccccggccctttggcacctactcacagaaccagccacgcccgccttctgcggccctcaagccatcagcctgccctgagcctggtggcggggccgagccagaccatgggcctgcccactcagagaacacaccacccgccttggccactgaggtccctgcctcccagccggctccgctcctctcagcagcagctgctggtgatgagggtcgagtcctcctggacacgtggtatgtcatcaagcccgggaatacaaaggagaaggtggccttctttgtggcccaccagtgtggtgggggcagccgggccagctccatgaaggtcaaggggcactggggcagcgatagctccaaggccaagcggcggaggcgctgtcttgaccccaccaaggctcctcctgacccagggggccgggagggcccccctgctgctgaggagggccccgcctcagccggtgaggacgtggacctgctctctgtggccgagatggtggccctggtggaacagcgggcagccctggccctgcagagctacccacgaccgaccaccccagcgcctgtagtctttgtgtccgccgagcaaggtggaccggccaagggggtgggatctgaacggcggtccggtggtggggactgcagccgtgtagccgaggccgtggcccactttgaagcgcagagggacagccctcccaccaagggcctccgcaaggaagagcggcccgggccaggccctggggaggtgcgcatcgccttccgcatctccaacggccgggagccccgtgcaccagacagcggcctgcccagtgggggcgggggcaggcctggttgtgcctaccctggcagcccaggtcctggggcccgagccaaggacaagatcacatgtgacttataccagctcatcagcccctcgcgggatgccctccccagcaacgtggagttcctgctggccagggcggatgaggccagtgagggtgacagcccggcacccgccaggcctgaggacactcccccggcgccccctccgccccctgcccgggactgcggagcgtcaggcttccacgtggacgtggtggtgacgggcgtggtagatgagtgcatcttctttggcaaggacggcaccaagaacgtgaaggaggagactgtgtgcctgacggtcagcccggaggaaccgccgcctccgggccagctcttctttctccagaaccgcgggccggacgggcccccggagccacccccggccgactccccggccactgcgcccggcccagacgatgccgagggcacggcggacacctccctgtgccgcttgtaccggcacgtgtcgcacgacttcctagagatccgcttcaagattcagcggctgctggagccgcgacagtacatgctgctgctgcccgagcacgtgctggtcaagatcttcagcttcctgcccacgcgcgcgctggccgccctcaagtgcacctgccaccacttcaagggcatcatcgaggcgtttggcgtgcgggccacagactcgcgctggagccgagacccgctctaccgcgatgatccgtgcaaacagtgccgcaagagatacgagaagggcgacgtgtcgctctgccgctggcaccccaagccctaccaccatgacctgccttacggacgttcctactggatgtgctgccgtcgagccgaccgcgagactcccggctgccgcctgggcctccacgataacaactgggtgctgccctgcaatgggccaggcgggggccgggccggccgggaggaggggaggtgaagccgggggaggggaggggagagcccaccacgcccacccctcccctctccccccgggagccgagggtccggactgggccgcctgcccattcccctactccaggcagcattgatccctcaccggaactgagctggggttcagcaggggtgacccaggaaagccctctgcttgatcctgttgattttctactcttcagaaccagggccgtggaccctctgagaagggtgttttttttttttttatcagcatctcactttcttctccattcagccccaaccccctccctgccatgctttccaccccaaggacccaccagcagggagcagacggcagctaattttggtaccacttaagggtccccccattctggcccccatcctctccctcaccccaattctttctcgctggagctgttatttcccaagaagccgcatcgcccaaggttggcacctctcctaacctgccacacgacagctctcacctctctaggaattgggggctgtcaggtcacaggtgggatctggcatttttttatgacagtccatttctagatggtttgcctattaaagaagtgggggggaaatactgttttctccttaacctcaagctaccagtctctcctcttccgcgtagaggaagaggggggcagacaaaaaaaaagctgaagtataaaaaccctcctcctcccgttattatttaagctactgccatcaaccccacccccataaagctgtgaagccctttgcctcgcttttgacagcgtgggggggccccgtgggcagggacttcggatttgcatttctgggttgtttttccttccactctggggtctcgttcaggcattggggtctcctcaccccagccacatgtttctttaagaatcctttggtcaaccaggaccttgatttttcaggcattttggtctggggtatttttgtttgttctctctgttttttgttttcttttttttctttccatcgtggttctggaagcttctagcgtgtggcatctgaccaattttgaattggtcctttctataaaatcaatatttataa

SEQ ID NO: 133666 - DNA, 628 bp, Homo sapiens
  Payload ID: 6127
  Gene Symbol: FBXO46
  Gene Name: F-box protein 46
  ENST ID: ENST00000591686
  CDS Start-End: 589-628
ggcatgtggaagtttcaaggtttaaagggtcattttggttttgagctgtctggagggagatgagccagagaaagattgaggcatatgttacttagtaggttcaaactgcagtgaaagtgatcatgtcggactcatgcgcaagattgcctccagattaggtcattcacatcaagtcattccaaaataaaatagtcattaacagagccctaaattgaagagtccagaaatcaagttgagagcctctttttgctccggacccactgtaatcttagctatgtcacccttccccactctgagcctctgtttatctgtgtgcagcttgaggagaaagctaggctagaacaggcaccctcgtgttttctttctttttttttcccaagatgggttctctctcagtcacccaggctggagtgcagtggtatgatcacagcatcacagctcactgcagcctccacctcctgggctcaagcgatactcccacctcagcctcccaactagctgggactacaggtggcatgtggagcctcccaccaccacctaggtcctgagatgcgctgaagcccagcctgtctgccatcatcccccagcatggaccgtgggagcctcctgcccttccagctatggtgcc

SEQ ID NO: 133667 - DNA, 654 bp, Homo sapiens
  Payload ID: 6127
  Gene Symbol: FBXO46
  Gene Name: F-box protein 46
  ENST ID: ENST00000586899
  CDS Start-End: 103-654
ctctcatcagctgtgtgacctagggtggcatgtggagcctcccaccaccacctaggtcctgagatgcgctgaagcccagcctgtctgccatcatcccccagcatggaccgtgggagcctcctgcccttccagctatggtgcccccggccctttggcacctactcacagaaccagccacgcccgccttctgcggccctcaagccatcagcctgccctgagcctggtggcggggccgagccagaccatgggcctgcccactcagagaacacaccacccgccttggccactgaggtccctgcctcccagccggctccgctcctctcagcagcagctgctggtgatgagggtcgagtcctcctggacacgtggtatgtcatcaagcccgggaatacaaaggagaaggtggccttctttgtggcccaccagtgtggtgggggcagccgggccagctccatgaaggtcaaggggcactggggcagcgatagctccaaggccaagcggcggaggcgctgtcttgaccccaccaaggctcctcctgacccagggggccgggagggcccccctgctgctgaggagggccccgcctcagccggtgaggacgtggacctgctctctgtggccgagatggtggccctggtggaacagcgggcagcc

SEQ ID NO: 133668 - DNA, 2302 bp, Homo sapiens
  Payload ID: 6128
  Gene Symbol: FBXO47
  Gene Name: F-box protein 47
  Uniprot ID: Q5MNV8
  ENST ID: ENST00000378079
  CDS Start-End: 201-1559
ggtagggctgcagctccggagcctacgggagtgtgaccctctcgcctcctggcgggaagctcttgaggagatattttcttttctaaacactaagaaatttgaggatggtggggcaaaacgactaactcccactttcctgtgactctgtagccggaaaaactgtcaaaatctgtggataaatttgtgagacaagaagaagaatggcatccagaataaatacaaatttcactttgattcccaaccagaaacttagacgtagtaatcgtcaaaccagctgttattccaagacccttggctcaggctttcaacccatatcaacatttggaaattttaaagccttaccattggaaatattccagataattttaaaatatttgtcagtgaaggatatcagcatgctaagcatggtgtccaaaacagtcagccaacacattattaattatatctcaacctcatcaggaagcaaaagacttttactacaggactttcataaccttgagctgcctgacaggagacaagactctgctatactggagcactacagatctctaggtctactgtttaaaagatgcacattgctgctacccaccaaggaaaggctaaaatacattcacaagatactcacagaagtttcctgctttaaattcaatggctgtgcagctcctatgcagtgtttaggattaacatgttatggcatgtttttacagaccttaacagcaggttgggatgaacttgagtgccatcgcgtttataatttcttatgcgaactgactaatctctgccgcaagatacaaatggctgtctgcagcaaaccaggaagtgcccaaaaactggagttaagaatcagactcttctgtaggaatgtcctccttgatcattggacacatcgaagtgattctgctttttggttgacgcgaatattaaaaccatggccaatggtgaatcaggcaagattactgtatatcatctttgggccaatatctcctcaagatggacaggtggtttggcaggaaatgatagaagaacctacagatgaattcagtctgaaaggtttggctgatgccattaagttactatatgacgctagcactaaagagtggacagcagatgatgttatcagtcttgtagatgaactatcagtggttccccgtgagtggcttctagagaataatgcacgtctcctaatgctaagtggaaacaacatctgtttcagtttcatggctagtaaagctgtgaatggacgcaccattgaactggcaaggctcgtagtctttttggctttggtgtgtgagaaagaactgtactgcatggattggacagttaaaatgatgcaaaaagtctgcaaagtctttagcactccagtggaaagaaagaacttcctgcagaatgtggcaaatgcatttgcatgtgttataatggaaatgctgcaatcaattatgtctggagaccgtgatgaagatgacagaagctttttgaatttgttccatcttgtacatgctcaggctaacttccataaggaggtcctgtatttgaccatgaatactcctctgtctacctaaatcctcagaaagccttgcctttagagaacgtcactgaacgaatgattagaggagtgctactttttcactcaaaaaatagcatccatgggactttttatcatctaagtaacctaagaattcaaaagctggatagaattttagaagcaactacgtacatcattattaatataaaaataacaggcagcctcaagaatgtgctgagatttctctggaaaacaagctctgcctctccgggttttagtcaacctaacaccaaaccaaaatagaatgttagctgttcaagaatctgggaccagccaacctgtatgtatgcatttttgaagcaagagaaaattccattttatagttagacccaaattcactaaatagtgtgtatgttcactttgtttaagttgtatagacatagcccagaatgttttgtgaagatttgcaatatggtgttttggaatgtgtagaatacaaatcacagtttttactaccttcttggcatatgcttacaaagaacattatattttgttcatgttttacatgaactaatggataaaaaacaaagtatacatatatgtctatatatatatatagacacacacacacagacatatatttccttctttaaggtaatcatacaaaaggtctatacatacaggaaggtatatattgtctcaatgcaatcaaatcatcttttactggggattcaaataaaatgtagcaaataagagaaaaataaaatgaaagaaaatagc

SEQ ID NO: 133669 - DNA, 5666 bp, Homo sapiens
  Payload ID: 6129
  Gene Symbol: FBXO48
  Gene Name: F-box protein 48
  Uniprot ID: Q5FWF7
  ENST ID: ENST00000377957
  CDS Start-End: 409-876
cgaattccggtggatttaaatcgcgggaggagaagctaccgcggcctaaagacctctgttgaacacagactgcagttccagccaccacagctaatctggatcatgaatgggagccaccgtggtcttggcaagtccgaaaacatagctgagtagctcgtctagaaaagagatttgtgttcagctgagttaaaagaagtatttacctcaaacctctcctcttgcacaaccaacccccgttataaaaggaagtgcaaaatggaataaactgattttaagtgaatacaagctgtctttatatacaaaagtaactcaaggatggtgatgtacccagtcatgctttcaactgatttgggaagcctacaccattcaccttaggttacatatgaggataacttaaaacattaagctatgcataaaaactccaagagaaacaataatttaagagtttctcacacagaagcgaactctgtggatgctgagaaggaaaaaaatgagagtcaaaacaacttttttgaactgctgcctgcagaaatcacttttaaaattttcagtcagctggacattcggagtctgtgcagggcttcattgacatgcaggagctggaatgacacaataagaaacagtgactctttatggaaacctcactgcatgactgtaagagctgtgtgccgaagagaaatagatgatgatctagaaagtggttattcctggagggtgatactgctgaggaattaccagaagagtaaagtgaaacacgaatggctaagtggcagatacagcaacatttgttctcccattagcctaccagaaaaaatcatgtacccaatggatgcagatacatggggggaaattctagaagcagaactggaaagataaggggaaaaaaaatcacaaatctcaggtctttgaaagtttaaaacttaaatgactcttaggttgcaaaagcgatatctttattcgttcattttgttgttcacctttttaaaagaaaatgaaatggaactattataaaagtaaagctttatttttgttttgcactttagtaaaatttttctggttttattgtaatgtggaaaaatcatgaaatgttatttttataagaaataatatactgatagagtgatttccaaatacaatgtttcatgtatttgtgttaatatatttgcaatactaaatgtaagagtgatttgtatgttcagcttaatgataattcaaaatttcaggaagccactttaaactgacttaaagattcattaagtggtggttataactaggctcatgggaagactagctaagtgaaattaatagcaatacatttaaattaatacattgacattttaatgactttaacatttctatttcagtggaatcagattgaaatgtcaaatagtgaaactatttttaatgtgttaagcctgtggtttagttttaagttaatgtcatctcagggctaaagtttgtccaattgagattcccattaattttatataaacctggaacggctctcaggagctgaaagtaagtggaaagtttccagaacactttaccatcagaatgccacactagcctggtaaaactctctttctgacagccttatagcaccatctagtgtgctattcttagatagcaagacaaaggactttcagctcctttttgttttctccatattaaaaagaaaactgttattctaaagaatccttaacacttgtctttgttaaagtttataactttttaggaacctttattttaacttttaaaaacttttgtttctcttttttcataaaaacagattatatgctactcactataacaaattgtttattctgaatctgtggttaccaccatagtaaaaaagtgtctacaaactgctttagttagtgtggggttttcttcttaaaaactgttctctatagcattaaatataagaatccaggaaaccaatatttaacaaataggcaaatattagaaagatgccccactatatgcaaattctgtatgttgaatcaagcagtagataattaattgtctcctactatcttcttagagttggaagagtccttgaaaatcaggcagtcaagtgtccaggactattcagtaattttctcaataggaacactgtcagtcagccagcccaagctgaaatcctgtacttctactaatagcatctctgttatgtcacagaacagtccagttgtagtctaggcttgcactgaagaccacctctctgtaacgtttgccttctagccccacttccaccctctagaaccaggctgattcagtccttcctgtctatgattgccagatatttgaagactgatagcctgtctcttcctatgtcttctctccaattccactgatgatcatagagtataatttctagacccaacaacattctcttctgcccatttactcttaacaaaagaaaggggctgtgcgccatggctcacgcctgtaatcccagcactttgggagaccaaggtgggtggatcacctcaggtcagaagttcaagaccagcctggtcaacatggtgaaaccctgtctctactaaatatacaaaaattagccgggcgtggtggcaggtgcctgtaatcccagctacttgggaggctgaggcaggagaatcgcttaaacctggcaggcagaggttgcagtgagcagagatcacgccactgcgctccagcctgggcaacaagagtgaaacttcgtctcaaaaaaaaaggaagaaagaaaggtatcctactaattttatttcataaaagataagaaagcacttggaaattttcaaagtatgggaaaaattaaagctataagcattttgctgaatagcatctgtgtacaatagtaaatgtacacatatatttttagctgtttttttgtaatggatgtttattatttttgtccagcccccttacaatctatcatcatcatctgttaatagaagttatcctaattagggagactcacccttctcacttccaaccaagtgtgtggttttttttggccggggtggggggcagttttttgtttttgtttttttgttttgttttttgagatgaagtctcactctgtcacccaggctggagtgcagtggcatgatcttggcccactgcaacctccacctcccaggttcaagcaactctctgtgtcagcctcccgagcagccaggattataggcgcccgccaccatgcccagctaatttttgtatttttagtagaaacggggtttcaccatcttggcctcctgaccttgtgatctacctgcctcagcctcctaaagtgctgggattataggcatgagccaccgcacccagctgggttttttgttttcttgtttttttttttttacattatcctgtttttcccagcctccgtgtttagtccaaggatggaaacatgacccaatccccccttttcataagttggaagaaagaagccctttcctctttgctgatgaaactgttccctgccacacaaagaaaacggatcttggccgggcgcggtggctcacgcctgtaatcccagcactttgggaggccgaggcgggtggatcatgaggtcaggagatcgagaccatcctggctaacaaggtgaaaccccgtctctactaaaaatacaaaaaattagccgggcgcggtggcgggcgcctgtagtcccagctactcgggaggctgaggcaggagaatggcgtgaacccgggaggcggagcttgcagtgagccgagattgcgccactgcagtccgcagtccggcctgggcgacagagcgagactccgtctcaaaaaaaaaaaaaaaaaaaagaaaacgaaaacggatcttaagtaagagaatgtggagccaccaggggaaagaacaattgcagggaaagaggcctgattatattccagaccctggtcccagccattccttatctgcttacctaaattaattcaaattgagtttcaccatcatactgggacccccacctgatgtggtttcgttgcccatttttcaaatatgtattatttgtggcttacattaacatcttagatttcactctgacttcctcaccagtcagtcttaatctgctataatatggccatcactccatatggttgaaactgttggtatccaaattacaagtgacttaatgtctaaatccactggatgcattctacttgttaatatatttgacacacataaacactcacactgacacacataagtacttcttaaaactctctcctccatgggttggaactatagtctcttggacttttctttccctactctaacccgtcttctcagtttcctccaaagactcgctttccttcacctactcattacatgttagtgttcccccaaagttccacctgttgtcatctcgtctctatactctaacatccttggtgatcccatctacaactcctatgtcagctaccattgttggtgctaatgccgtctatgtccgtgtcccaacatcagatctccatgagatgttccagaaatacatatgctattatcttttggatttttatccaaagatagtataagtatatatatatatatataaaatatttgatatatccaaagatagtttatatataagcacctgaatcaaaacttaccatctcataaaagtagttcttcctccagttcctatctcagtgaatggcatgtcctgttagaaaatcaccatattttacttttctccatcattctccaagtccagccgagtcaattcttacttgattttatcatccaaatatctaagtaattcacctcttccccatctttatctctgcctcattacttaattcttgtccttatttgacattgggatttctaaaataacctcttactggtgttcctgcctccagttccttccttttactgttagcagtgtagtctttgttaaaccccaaatttagcacgtcaccctaacttaaactcctgactgcatacaggtagaaatcaaaattccccactaaagcccatagggcctttaatgatgtggtctggcctacctctccagcctgttctctaaccactgtcccaccctatatctttctgttcagtcttacaaaactatttcataaaaattttctcacttctctgcctttgcacaggctgtttgatatacctggagtaatccccaccattgattcttttcttggcaaaaatctattgtaaaacttatcatcttggcctggaaacaatccataacttctactgttctggattaagtgactttttagatgttcttgtagttctttgtatagacctctctcaaaactgtcatatgacattaaattgtctattttatttgtgtgtttgcccctttacactgtgaacttcttaatggcagggaccattttttatttatttttgtgtcttcaaaacctggcacacactagatgctctataaagatttgttaaattatttctatagttatttattttaatcctacacagaatgtataaaaataatttactatattgttagtgaagaagattgtatcaaaatgcagtatacaatccttaaggtatgtgggatgcttgatagtaatacaaatgtatgaataattgttccagtcttctccaaacctgtaagagggaaataggaaaataaaaatgttttgttttattgttttgaactcttgaaaataaacttaacctcaaaaatatca

SEQ ID NO: 133670 - DNA, 2037 bp, Homo sapiens
  Payload ID: 6130
  Gene Symbol: FBXO5
  Gene Name: F-box protein 5
  Uniprot ID: Q9UKT4
  ENST ID: ENST00000229758
  CDS Start-End: 60-1403
gttgctcagctgcccccggagcggttcctccacctgaggcagactccacgtcggctggcatgagccggcgcccctgcagctgcgccctacggccaccccgctgctcctgcagcgccagccccagcgcagtgacagccgccgggcgccctcgaccctcggatagttgtaaagaagaaagttctaccctttctgtcaaaatgaagtgtgattttaattgtaaccatgttcattccggacttaaactggtaaaacctgatgacattggaagactagtttcctacacccctgcatatttggaaggttcctgtaaagactgcattaaagactatgaaaggctgtcatgtattgggtcaccgattgtgagccctaggattgtacaacttgaaactgaaagcaagcgcttgcataacaaggaaaatcaacatgtgcaacagacacttaatagtacaaatgaaatagaagcactagagaccagtagactttatgaagacagtggctattcctcattttctctacaaagtggcctcagtgaacatgaagaaggtagcctcctggaggagaatttcggtgacagtctacaatcctgcctgctacaaatacaaagcccagaccaatatcccaacaaaaacttgctgccagttcttcattttgaaaaagtggtttgttcaacattaaaaaagaatgcaaaacgaaatcctaaagtagatcgggagatgctgaaggaaattatagccagaggaaattttagactgcagaatataattggcagaaaaatgggcctagaatgtgtagatattctcagcgaactctttcgaaggggactcagacatgtcttagcaactattttagcacaactcagtgacatggacttaatcaatgtgtctaaagtgagcacaacttggaagaagatcctagaagatgataagggggcattccagttgtacagtaaagcaatacaaagagttaccgaaaacaacaataaattttcacctcatgcttcaaccagagaatatgttatgttcagaaccccactggcttctgttcagaaatcagcagcccagacttctctcaaaaaagatgctcaaaccaagttatccaatcaaggtgatcagaaaggttctacttatagtcgacacaatgaattctctgaggttgccaagacattgaaaaagaacgaaagcctcaaagcctgtattcgctgtaattcacctgcaaaatatgattgctatttacaacgggcaacctgcaaacgagaaggctgtggatttgattattgtacgaagtgtctctgtaattatcatactactaaagactgttcagatggcaagctcctcaaagccagttgtaaaataggtcccctgcctggtacaaagaaaagcaaaaagaatttacgaagattgtgatctcttattaaatcaattgttactgatcatgaatgttagttagaaaatgttaggttttaacttaaaaaaaattgtattgtgattttcaattttatgttgaaatcggtgtagtatcctgaggtttttttccccccagaagataaagaggatagacaacctcttaaaatatttttacaatttaatgagaaaaagtttaaaattctcaatacaaatcaaacaatttaaatattttaagaaaaaaggaaaagtagatagtgatactgagggtaaaaaaaaattgattcaattttatggtaaaggaaacccatgcaattttacctagacagtcttaaatatgtctggttttccatctgttagcatttcagacattttatgttcctcttactcaattgataccaacagaaatatcaacttctggagtctattaaatgtgttgtcacctttctaaagctttttttcattgtgtgtatttcccaagaaagtatcctttgtaaaaacttgcttgttttccttatttctgaaatctgttttaatatttttgtatacatgtaaatatttctgtattttttatatgtcaaagaatatgtctcttgtatgtacatataaaaataaattttgctcaataaaattgtaa

SEQ ID NO: 133671 - DNA, 2221 bp, Homo sapiens
  Payload ID: 6130
  Gene Symbol: FBXO5
  Gene Name: F-box protein 5
  Uniprot ID: Q9UKT4
  ENST ID: ENST00000367241
  CDS Start-End: 382-1587
gtaaatcctagagaggcgggctaagctggactggggggagggtccgtcttccggaaagtctggattcccggacgagccgagttgctgctcaccgaactcccgttcgagagatgatcgaagaaagtcggctaccatttgtacccatcaaagatctccagatggaagccagcgctgaatttgggctgagattaggacttgcaggaggccggtccagaagacggcggaaggaatcttggcgggcgcacgcatgcgtgatagaccctccacacgtgtggccgggccgcggcctccccgtgctcggaggtcccgcccccggccgtagcatctttccggacgtggggagccggttgtaaagaagaaagttctaccctttctgtcaaaatgaagtgtgattttaattgtaaccatgttcattccggacttaaactggtaaaacctgatgacattggaagactagtttcctacacccctgcatatttggaaggttcctgtaaagactgcattaaagactatgaaaggctgtcatgtattgggtcaccgattgtgagccctaggattgtacaacttgaaactgaaagcaagcgcttgcataacaaggaaaatcaacatgtgcaacagacacttaatagtacaaatgaaatagaagcactagagaccagtagactttatgaagacagtggctattcctcattttctctacaaagtggcctcagtgaacatgaagaaggtagcctcctggaggagaatttcggtgacagtctacaatcctgcctgctacaaatacaaagcccagaccaatatcccaacaaaaacttgctgccagttcttcattttgaaaaagtggtttgttcaacattaaaaaagaatgcaaaacgaaatcctaaagtagatcgggagatgctgaaggaaattatagccagaggaaattttagactgcagaatataattggcagaaaaatgggcctagaatgtgtagatattctcagcgaactctttcgaaggggactcagacatgtcttagcaactattttagcacaactcagtgacatggacttaatcaatgtgtctaaagtgagcacaacttggaagaagatcctagaagatgataagggggcattccagttgtacagtaaagcaatacaaagagttaccgaaaacaacaataaattttcacctcatgcttcaaccagagaatatgttatgttcagaaccccactggcttctgttcagaaatcagcagcccagacttctctcaaaaaagatgctcaaaccaagttatccaatcaaggtgatcagaaaggttctacttatagtcgacacaatgaattctctgaggttgccaagacattgaaaaagaacgaaagcctcaaagcctgtattcgctgtaattcacctgcaaaatatgattgctatttacaacgggcaacctgcaaacgagaaggctgtggatttgattattgtacgaagtgtctctgtaattatcatactactaaagactgttcagatggcaagctcctcaaagccagttgtaaaataggtcccctgcctggtacaaagaaaagcaaaaagaatttacgaagattgtgatctcttattaaatcaattgttactgatcatgaatgttagttagaaaatgttaggttttaacttaaaaaaaattgtattgtgattttcaattttatgttgaaatcggtgtagtatcctgaggtttttttccccccagaagataaagaggatagacaacctcttaaaatatttttacaatttaatgagaaaaagtttaaaattctcaatacaaatcaaacaatttaaatattttaagaaaaaaggaaaagtagatagtgatactgagggtaaaaaaaaattgattcaattttatggtaaaggaaacccatgcaattttacctagacagtcttaaatatgtctggttttccatctgttagcatttcagacattttatgttcctcttactcaattgataccaacagaaatatcaacttctggagtctattaaatgtgttgtcacctttctaaagctttttttcattgtgtgtatttcccaagaaagtatcctttgtaaaaacttgcttgttttccttatttctgaaatctgttttaatatttttgtatacatgtaaatatttctgtattttttatatgtcaaagaatatgtctcttgtatgtacatataaaaataaattttgctcaataaaattgtaa

SEQ ID NO: 133672 - DNA, 1520 bp, Homo sapiens
  Payload ID: 6131
  Gene Symbol: FBXO6
  Gene Name: F-box protein 6
  Uniprot ID: Q9NRD1
  ENST ID: ENST00000376753
  CDS Start-End: 136-1017
gcgcgttcgggagcttcggccctgcgtaggaggcgggtgcaggtgtgggtgctgagccgcccgccgcctggagggggagacagcttcaggacacgcaggccgcagcgagggcccgggccctggggatcccaggccatggatgctccccactccaaagcagccctggacagcattaacgagctgcccgagaacatcctgctggagctgttcacgcacgtgcccgcccgccagctgctgctgaactgccgcctggtctgcagcctctggcgggacctcatcgacctcatgaccctctggaaacgcaagtgcctgcgagagggcttcatcaccaaggactgggaccagcccgtggccgactggaaaatcttctacttcctacggagcctgcataggaacctcctgcgcaacccgtgtgctgaagaggatatgtttgcatggcaaattgatttcaatggtggggaccgctggaaggtggagagcctccctggagcccacgggacagattttcctgaccccaaagtcaagaagtattttgtcacatcctacgaaatgtgcctcaagtcccagctggtggaccttgtagccgagggctactgggaggagctactagacacattccggccggacatcgtggttaaggactggtttgctgccagagccgactgtggctgcacctaccaactcaaagtgcagctggcctcggctgactacttcgtgttggcctccttcgagcccccacctgtgaccatccaacagtggaacaatgccacatggacagaggtctcctacaccttctcagactacccccggggtgtccgctacatcctcttccagcatgggggcagggacacccagtactgggcaggctggtatgggccccgagtcaccaacagcagcattgtcgtcagccccaagatgaccaggaaccaggcctcctccgaggctcagcctgggcagaagcatggacaggaggaggctgcccaatcgccctaccgagctgttgtccagattttctgacagctgtccatcctgtgtctgggtcagccagaggttcctccaggcaggagctgagcatggggtgggcagtgaggtccctgtaccagcgactcctgccccggttcaaccctaccagcttgtggtaacttactgtcacatagctctgacgttttgttgtaataaatgttttcaggccgggcactgtggctcacgcctgtaatcccagcactttgggagaccgaggcaggtggatcacgaggtcaggagatagagaccatcctggccaacacggtgaaaccctgtctctactaaaaatacaaaaaattagccgggcgtggtggcgggcgcctgtagtcccagctactcgggaggctgatgcagaagaatggcgtgaacccggaaggcagagcttgcagtgagccgagatcacgccactgcactccagcctgggtgacagagcgagactctggctcataaaataataataataataaataaataaaaaataaatgttttcagtaaaa

SEQ ID NO: 133673 - DNA, 928 bp, Homo sapiens
  Payload ID: 6131
  Gene Symbol: FBXO6
  Gene Name: F-box protein 6
  ENST ID: ENST00000449067
  CDS Start-End: 1-749
ttaacgagctgcccgagaacatcctgctggagctgttcacgcacgtgcccgcccgccagctgctgctgaactgccgcctggtctgcagcctctggcgggacctcatcgacctcatgaccctctggaaacgcaagtgcctgcgagagggcttcatcaccaaggactgggaccagcccgtggccgactggaaaatcttctacttcctacggagcctgcataggaacctcctgcgcaacccgtgtgctgaagaggatatgtttgcatggcaaattgatttcaatggtggggaccgctggaaggtggagagcctccctggagcccacgggacagattttcctgaccccaaagtcaagaagtattttgtcacatcctacgagtttgctgccagagccgactgtggctgcacctaccaactcaaagtgcagctggcctcggctgactacttcgtgttggcctccttcgagcccccacctgtgaccatccaacagtggaacaatgccacatggacagaggtctcctacaccttctcagactacccccggggtgtccgctacatcctcttccagcatgggggcagggacacccagtactgggcaggctggtatgggccccgagtcaccaacagcagcattgtcgtcagccccaagatgaccaggaaccaggcctcctccgaggctcagcctgggcagaagcatggacaggaggaggctgcccaatcgccctaccgagctgttgtccagattttctgacagctgtccatcctgtgtctgggtcagccagaggttcctccaggcaggagctgagcatggggtgggcagtgaggtccctgtaccagcgactcctgccccggttcaaccctaccagcttgtggtaacttactgtcacatagctctgacgttttgttgtaataaatgttttcaggccgggc

SEQ ID NO: 133674 - DNA, 2195 bp, Homo sapiens
  Payload ID: 6132
  Gene Symbol: FBXO7
  Gene Name: F-box protein 7
  Uniprot ID: Q9Y3I1
  ENST ID: ENST00000266087
  CDS Start-End: 328-1896
cgcgctctcaggcagcgccgttgcgcgcggagtcatcgatcggccgaccccgagaggcccggttcctttaggccgcctgcccgcctccagctctcggggtcggctccaggaggcgccctcaggagaggggcgggcgctctattccagagaccgagtggcagggcggccactgtggcggggctctttccccgtttcgcctcagctacccctcagctccggtagtcgccagtccggggtcgtcgccgtttggggcgggagctgctcggccccgccgccgtccccgtcgccgcttccgggtccaggcccctcgggccgcctgccgccgtcatgaggctgcgggtgcggcttctgaagcggacctggccgctggaggtgcccgagacggagccgacgctggggcatttgcgctcgcacctgaggcagtccctgctgtgcacctgggggtacagttctaatacccgatttacaattacattgaactacaaggatcccctcactggagatgaagagaccttggcttcatatgggattgtttctggggacttgatatgtttgattcttcaagatgacattccagcgcctaatataccttcatccacagattcagagcattcttcactccagaataatgagcaaccctctttggccaccagctccaatcagactagcatgcaggatgaacaaccaagtgattcattccaaggacaggcagcccagtctggtgtttggaatgacgacagtatgttagggcctagtcaaaattttgaagctgagtcaattcaagataatgcgcatatggcagagggcacaggtttctatccctcagaacccatgctctgtagtgaatcggtggaagggcaagtgccacattcattagagaccttgtatcaatcagctgactgttctgatgccaatgatgccttgatagtgttgatacatcttctcatgttggagtcaggttacatacctcagggcaccgaagccaaagcactgtccatgccggagaagtggaagttgagcggggtgtataagctgcagtacatgcatcctctctgcgagggcagctccgctactctcacctgtgtgcctttgggaaacctgattgttgtaaatgctacactaaaaatcaacaatgagattagaagtgtgaaaagattgcagctgctaccagaatcttttatttgcaaagagaaactaggggaaaatgtagccaacatatacaaagatcttcagaaactctctcgcctctttaaagaccagctggtgtatcctcttctggcttttacccgacaagcactgaacctaccagatgtatttgggttggtcgtcctcccattggaactgaaactacggatcttccgacttctggatgttcgttccgtcttgtctttgtctgcggtttgtcgtgacctctttactgcttcaaatgacccactcctgtggaggtttttatatctgcgtgattttcgagacaatactgtcagagttcaagacacagattggaaagaactgtacaggaagaggcacatacaaagaaaagaatccccgaaagggcggtttgtgatgctcctgccatcgtcaactcacaccattccattctatcccaaccccttgcaccctaggccatttcctagctcccgccttcctccaggaattatcgggggtgaatatgaccaaagaccaacacttccctatgttggagacccaatcagttcactcattcctggtcctggggagacgcccagccagtttcctccactgagaccacgctttgatccagttggcccacttccaggacctaaccccatcttgccagggcgaggcggccccaatgacagatttccctttagacccagcaggggtcggccaactgatggccggctgtcattcatgtgattgatttgtaatttcatttctggagctccatttgtttttgtttctaaactacagatgtcaactccttggggtgctgatctcgagtgttattttctgattgtggtgttgagagttgcactcccagaaaccttttaagagatacatttatagccctaggggtggtatgacccaaaggttcctctgtgacaaggttggccttgggaatagttggctgccaatctccctgctcttggttctcctctagattgaagtttgttttctgatgctgttcttaccagattaaaaaaaagtgtaaatta

SEQ ID NO: 133675 - DNA, 1888 bp, Homo sapiens
  Payload ID: 6132
  Gene Symbol: FBXO7
  Gene Name: F-box protein 7
  Uniprot ID: Q9Y3I1
  ENST ID: ENST00000397426
  CDS Start-End: 363-1589
ggggggccttcacgggaggcccgggctcttccgggcgtcgcggagccggagggtgcaggcgacgggaagcgcgggtggtcggctggggtccggctcctggagaacatggcccggcctcccgggggctctggtcccctcctcgttctaatacccgatttacaattacattgaactacaaggatcccctcactggagatgaagagaccttggcttcatatgggattgtttctggggacttgatatgtttgattcttcaagatgacattccagcgcctaatataccttcatccacagattcagagcattcttcactccagaataatgagcaaccctctttggccaccagctccaatcagactagcatgcaggatgaacaaccaagtgattcattccaaggacaggcagcccagtctggtgtttggaatgacgacagtatgttagggcctagtcaaaattttgaagctgagtcaattcaagataatgcgcatatggcagagggcacaggtttctatccctcagaacccatgctctgtagtgaatcggtggaagggcaagtgccacattcattagagaccttgtatcaatcagctgactgttctgatgccaatgatgccttgatagtgttgatacatcttctcatgttggagtcaggttacatacctcagggcaccgaagccaaagcactgtccatgccggagaagtggaagttgagcggggtgtataagctgcagtacatgcatcctctctgcgagggcagctccgctactctcacctgtgtgcctttgggaaacctgattgttgtaaatgctacactaaaaatcaacaatgagattagaagtgtgaaaagattgcagctgctaccagaatcttttatttgcaaagagaaactaggggaaaatgtagccaacatatacaaagatcttcagaaactctctcgcctctttaaagaccagctggtgtatcctcttctggcttttacccgacaagcactgaacctaccagatgtatttgggttggtcgtcctcccattggaactgaaactacggatcttccgacttctggatgttcgttccgtcttgtctttgtctgcggtttgtcgtgacctctttactgcttcaaatgacccactcctgtggaggtttttatatctgcgtgattttcgagacaatactgtcagagttcaagacacagattggaaagaactgtacaggaagaggcacatacaaagaaaagaatccccgaaagggcggtttgtgatgctcctgccatcgtcaactcacaccattccattctatcccaaccccttgcaccctaggccatttcctagctcccgccttcctccaggaattatcgggggtgaatatgaccaaagaccaacacttccctatgttggagacccaatcagttcactcattcctggtcctggggagacgcccagccagtttcctccactgagaccacgctttgatccagttggcccacttccaggacctaaccccatcttgccagggcgaggcggccccaatgacagatttccctttagacccagcaggggtcggccaactgatggccggctgtcattcatgtgattgatttgtaatttcatttctggagctccatttgtttttgtttctaaactacagatgtcaactccttggggtgctgatctcgagtgttattttctgattgtggtgttgagagttgcactcccagaaaccttttaagagatacatttatagccctaggggtggtatgacccaaaggttcctctgtgacaaggttggccttgggaatagttggctgccaatctccctgctcttggttctcctctagattgaagtttgttttctgatgctgttcttaccagattaaaaaaaagtgtaaatta

SEQ ID NO: 133676 - DNA, 1535 bp, Homo sapiens
  Payload ID: 6132
  Gene Symbol: FBXO7
  Gene Name: F-box protein 7
  Uniprot ID: Q9Y3I1
  ENST ID: ENST00000452138
  CDS Start-End: 126-1457
ggccaagtgcggggacgccgggggggccttcacgggaggcccgggctcttccgggcgtcgcggagccggagggtgcaggcgacgggaagcgcgggtggtcggctggggtccggctcctggagaacatggcccggcctcccgggggctctggtcccctcctcgattcagagcattcttcactccagaataatgagcaaccctctttggccaccagctccaatcagactagcatgcaggatgaacaaccaagtgattcattccaaggacaggcagcccagtctggtgtttggaatgacgacagtatgttagggcctagtcaaaattttgaagctgagtcaattcaagataatgcgcatatggcagagggcacaggtttctatccctcagaacccatgctctgtagtgaatcggtggaagggcaagtgccacattcattagagaccttgtatcaatcagctgactgttctgatgccaatgatgccttgatagtgttgatacatcttctcatgttggagtcaggttacatacctcagggcaccgaagccaaagcactgtccatgccggagaagtggaagttgagcggggtgtataagctgcagtacatgcatcctctctgcgagggcagctccgctactctcacctgtgtgcctttgggaaacctgattgttgtaaatgctacactaaaaatcaacaatgagattagaagtgtgaaaagattgcagctgctaccagaatcttttatttgcaaagagaaactaggggaaaatgtagccaacatatacaaagatcttcagaaactctctcgcctctttaaagaccagctggtgtatcctcttctggcttttacccgacaagcactgaacctaccagatgtatttgggttggtcgtcctcccattggaactgaaactacggatcttccgacttctggatgttcgttccgtcttgtctttgtctgcggtttgtcgtgacctctttactgcttcaaatgacccactcctgtggaggtttttatatctgcgtgattttcgagacaatactgtcagagttcaagacacagattggaaagaactgtacaggaagaggcacatacaaagaaaagaatccccgaaagggcggtttgtgatgctcctgccatcgtcaactcacaccattccattctatcccaaccccttgcaccctaggccatttcctagctcccgccttcctccaggaattatcgggggtgaatatgaccaaagaccaacacttccctatgttggagacccaatcagttcactcattcctggtcctggggagacgcccagccagtttcctccactgagaccacgctttgatccagttggcccacttccaggacctaaccccatcttgccagggcgaggcggccccaatgacagatttccctttagacccagcaggggtcggccaactgatggccggctgtcattcatgtgattgatttgtaatttcatttctggagctccatttgtttttgtttctaaactacagatgtcaactccttggggtgctgat

SEQ ID NO: 133677 - DNA, 1921 bp, Homo sapiens
  Payload ID: 6132
  Gene Symbol: FBXO7
  Gene Name: F-box protein 7
  ENST ID: ENST00000425028
  CDS Start-End: 206-355
gagaggggcgggcgctctattccagagaccgagtggcagggcggccactgtggcggggctctttccccgtttcgcctcagctacccctcagctccggtagtcgccagtccggggtcgtcgccgtttggggcgggagctgctcggccccgccgccgtccccgtcgccgcttccgggtccaggcccctcgggccgcctgccgccgtcatgaggctgcgggtgcggcttctgaagcggacctggccgctggaggtgcccgagacggagccgacgctggggcatttgcgctcgcacctgaggcagtccctgctgtgcacctgggggtacagattcagagcattcttcactccagaataatgagcaaccctctttggccaccagctccaatcagactagcatgcaggatgaacaaccaagtgattcattccaaggacaggcagcccagtctggtgtttggaatgacgacagtatgttagggcctagtcaaaattttgaagctgagtcaattcaagataatgcgcatatggcagagggcacaggtttctatccctcagaacccatgctctgtagtgaatcggtggaagggcaagtgccacattcattagagaccttgtatcaatcagctgactgttctgatgccaatgatgccttgatagtgttgatacatcttctcatgttggagtcaggttacatacctcagggcaccgaagccaaagcactgtccatgccggagaagtggaagttgagcggggtgtataagctgcagtacatgcatcctctctgcgagggcagctccgctactctcacctgtgtgcctttgggaaacctgattgttgtaaatgctacactaaaaatcaacaatgagattagaagtgtgaaaagattgcagctgctaccagaatcttttatttgcaaagagaaactaggggaaaatgtagccaacatatacaaagatcttcagaaactctctcgcctctttaaagaccagctggtgtatcctcttctggcttttacccgacaagcactgaacctaccagatgtatttgggttggtcgtcctcccattggaactgaaactacggatcttccgacttctggatgttcgttccgtcttgtctttgtctgcggtttgtcgtgacctctttactgcttcaaatgacccactcctgtggaggtttttatatctgcgtgattttcgagacaatactgtcagagttcaagacacagattggaaagaactgtacaggaagaggcacatacaaagaaaagaatccccgaaagggcggtttgtgatgctcctgccatcgtcaactcacaccattccattctatcccaaccccttgcaccctaggccatttcctagctcccgccttcctccaggaattatcgggggtgaatatgaccaaagaccaacacttccctatgttggagacccaatcagttcactcattcctggtcctggggagacgcccagccagtttcctccactgagaccacgctttgatccagttggcccacttccaggacctaaccccatcttgccagggcgaggcggccccaatgacagatttccctttagacccagcaggggtcggccaactgatggccggctgtcattcatgtgattgatttgtaatttcatttctggagctccatttgtttttgtttctaaactacagatgtcaactccttggggtgctgatctcgagtgttattttctgattgtggtgttgagagttgcactcccagaaaccttttaagagatacatttatagccctaggggtggtatgacccaaaggttcctctgtgacaaggttggccttgggaatagttggctgccaatctccctgctcttggttctcctctagattgaagtttgttttctgatgctgttcttaccagattaaaaaaaagtgtaaatta

SEQ ID NO: 133678 - DNA, 747 bp, Homo sapiens
  Payload ID: 6132
  Gene Symbol: FBXO7
  Gene Name: F-box protein 7
  ENST ID: ENST00000444207
  CDS Start-End: 586-747
agttaaaaatctgccctcaatccgaggccaccggtagcttgtatcgctgctgtgaagcggcaacaattttagattctgttgtgttcatgcgccgagcaccgcggtgagcgcttggacttcgccgccgaaaagttttagaaaggacagcgtgtaggcgtgtttcagaccatttcattttcttgggtgaaatgttgcttttttgctaaaactgaggcaaacgttgatcttgagagcttgcagtttgggggcagtaaagttgagaaaggatcatattctgttattggtttgtgggactgcaggtgaagctgctttgtttccctaaaagatactttttggggacaataatttgggagtaaagcggcaagttctaatacccgatttacaattacattgaactacaaggatcccctcactggagatgaagagaccttggcttcatatgggattgtttctggggacttgatatgtttgattcttcaagatgacattccagcgcctaatataccttcatccacagattcagagcattcttcactccagaataatgagcaaccctctttggccaccagctccaatcagactagcatgcaggatgaacaaccaagtgattcattccaaggacaggcagcccagtctggtgtttggaatgacgacagtatgttagggcctagtcaaaattttgaagctgagtcaattcaagataatgcgcatatggcagagggcacaggtttctatccctcagaaccc

SEQ ID NO: 133679 - DNA, 1900 bp, Homo sapiens
  Payload ID: 6132
  Gene Symbol: FBXO7
  Gene Name: F-box protein 7
  ENST ID: ENST00000420700
  CDS Start-End: 328-453
cgcgctctcaggcagcgccgttgcgcgcggagtcatcgatcggccgaccccgagaggcccggttcctttaggccgcctgcccgcctccagctctcggggtcggctccaggaggcgccctcaggagaggggcgggcgctctattccagagaccgagtggcagggcggccactgtggcggggctctttccccgtttcgcctcagctacccctcagctccggtagtcgccagtccggggtcgtcgccgtttggggcgggagctgctcggccccgccgccgtccccgtcgccgcttccgggtccaggcccctcgggccgcctgccgccgtcatgaggctgcgggtgcggcttctgaagcggacctggccgctggaggtgcccgagacggagccgacgctggggcatttgcgctcgcacctgaggcagtccctgctgtgcacctgggggtacagttagggcctagtcaaaattttgaagctgagtcaattcaagataatgcgcatatggcagagggcacaggtttctatccctcagaacccatgctctgtagtgaatcggtggaagggcaagtgccacattcattagagaccttgtatcaatcagctgactgttctgatgccaatgatgccttgatagtgttgatacatcttctcatgttggagtcaggttacatacctcagggcaccgaagccaaagcactgtccatgccggagaagtggaagttgagcggggtgtataagctgcagtacatgcatcctctctgcgagggcagctccgctactctcacctgtgtgcctttgggaaacctgattgttgtaaatgctacactaaaaatcaacaatgagattagaagtgtgaaaagattgcagctgctaccagaatcttttatttgcaaagagaaactaggggaaaatgtagccaacatatacaaagatcttcagaaactctctcgcctctttaaagaccagctggtgtatcctcttctggcttttacccgacaagcactgaacctaccagatgtatttgggttggtcgtcctcccattggaactgaaactacggatcttccgacttctggatgttcgttccgtcttgtctttgtctgcggtttgtcgtgacctctttactgcttcaaatgacccactcctgtggaggtttttatatctgcgtgattttcgagacaatactgtcagagttcaagacacagattggaaagaactgtacaggaagaggcacatacaaagaaaagaatccccgaaagggcggtttgtgatgctcctgccatcgtcaactcacaccattccattctatcccaaccccttgcaccctaggccatttcctagctcccgccttcctccaggaattatcgggggtgaatatgaccaaagaccaacacttccctatgttggagacccaatcagttcactcattcctggtcctggggagacgcccagccagtttcctccactgagaccacgctttgatccagttggcccacttccaggacctaaccccatcttgccagggcgaggcggccccaatgacagatttccctttagacccagcaggggtcggccaactgatggccggctgtcattcatgtgattgatttgtaatttcatttctggagctccatttgtttttgtttctaaactacagatgtcaactccttggggtgctgatctcgagtgttattttctgattgtggtgttgagagttgcactcccagaaaccttttaagagatacatttatagccctaggggtggtatgacccaaaggttcctctgtgacaaggttggccttgggaatagttggctgccaatctccctgctcttggttctcctctagattgaagtttgttttctgatgctgttcttaccagattaaaaaaaagtgtaaatta

SEQ ID NO: 133680 - DNA, 2577 bp, Homo sapiens
  Payload ID: 6133
  Gene Symbol: FBXO8
  Gene Name: F-box protein 8
  Uniprot ID: Q9NRD0
  ENST ID: ENST00000393674
  CDS Start-End: 864-1823
gatttaaaagaatgaaaaggcggatctggtcattcgtctccgcccggggtctctgtaaggacggcggagagaggcgacctccgcccaataccaggcgcagccttgccgtctcctcggggctcaccaagcagccaccagcaaagaagccggtttcaaaggcccagcacgacagggagaggaaaacggagcatatgcaaccatacacagtcaccagagtccagcctcccgcaaccagtcgctacagccaggcgcctgcgcccagaagcgcttctcgcgccgaccgtttgtatttggaattgtgggttcctgcccgccacgcaccaccgcaagaccttcaaagctgggagcttctctgtgctccaggattcctcgctgccgattccacaccgcgttcaagactcctgtgaagagcgactccgctgagagcctcctcaatggccagtccacttctaacttgcagctgagaagtttttctgatcttgatggtcagagtggctcgtgctacgaagtgagaaacaaggaatctatagcgaatcgtaaacaacagaaataaaaatgcgtctccgttaagagtcggagcctaacgtcacttccggcaacaataggaaacgtcaaaattgggatagtcggcagttctggcccctgcagctggaggtaccctgagttctgagggtcgtagtgctgtttctggtattctcatcgcggtcacctctaccggtgtggacaagtaaagtttgaatcagcttctccatggcctgggcaccagttcccggctgagccattttccttttggctaaaagtccccgcccagaggccaattcgtcgcggcggcggtggagatcgcaggtcgctcaggcttgcagatgggtcaagggttgtggagagtggtcagaaaccagcagctgcaacaagaaggctacagtgagcaaggctacctcaccagagagcagagcaggagaatggctgcgagcaacatttctaacaccaatcatcgtaaacaagtccaaggaggcattgacatatatcatcttttgaaggcaaggaaatcgaaagaacaggaaggattcattaatttggaaatgttgcctcctgagctaagctttaccatcttgtcctacctgaatgcaactgacctttgcttggcttcatgtgtttggcaggaccttgcgaatgatgaacttctctggcaagggttgtgcaaatccacttggggtcactgttccatatacaataagaacccacctttaggattttcttttagaaaattgtatatgcagctggatgaaggcagcctcacctttaatgccaacccagatgagggagtgaactactttatgtccaagggtatcctggatgattcgccaaaggaaatagcaaagtttatcttctgtacaagaacactaaattggaaaaaactgagaatctatcttgatgaaaggagagatgtcttggatgaccttgtaacattgcataattttagaaatcagttcttgccaaatgcactgagagaattttttcgtcatatccatgcccctgaagagcgtggagagtatcttgaaactcttataacaaagttctcacatagattctgtgcttgcaaccctgatttaatgcgagaacttggccttagtcctgatgctgtctatgtactgtgctactctttgattctactttccattgacctcactagccctcatgtgaagaataaaatgtcaaaaagggaatttattcgaaatacccgtcgcgctgctcaaaatattagtgaagattttgtagggcatctttatgacaatatctaccttattggccatgtggctgcataaaaagcacaattgctaggacttcagtttttacttcagactaaagctacccaaggacttagcagatatgggggttacatcagtgctggtcattgtagcctgagtatacaatcaagcttcagtgtgcaacctttttttcttttgccattttctattttagtaatttccttggggaactaaataattttgcagaatttttcctaattttgtttatcacgttttgcacaaagcagagccactgtctaacacagctgttaacgaatgataaactgacattatactctaaaagatggtgtatttgtgcattagatttgcctgaaaaactttatccatttccattctttatacaaataccatgtaatgtgtacatatttaactaaagagatttatagtcataattattttattgtaaagattttaactaaagtttttccttttctctcaaactgagttctgaaatttatttgattctgatctgaaactattgtcttcgtaaaagttagatctgacttcagacagaaaccaataccagcttccttttcctttaaactttgaagagtgttgatttgttactatattactatgcaaaactggcagttatttttataatataaatttataatttgattttttattttaaaaactgggttaatcaagtctcggtaagtcctttaaaccatttaggatttttaaaacatcaaaatttatgatttacattcataggaataaaataaaatattattagaactctggtaaa

SEQ ID NO: 133681 - DNA, 1546 bp, Homo sapiens
  Payload ID: 6133
  Gene Symbol: FBXO8
  Gene Name: F-box protein 8
  Uniprot ID: Q9NRD0
  ENST ID: ENST00000503293
  CDS Start-End: 267-1103
aacaataggaaacgtcaaaattgggatagtcggcagttctggcccctgcagctggaggtaccctgagttctgagggtcgtagtgctgtttctggtattctcatcgcggtcacctctaccggtgtggacaagtaaagtttgaatcagcttctccatggcctgggcaccagttcccggctgagccattttccttttggctaaaagtccccgcccagaggccaattcgtcgcggcggcggtggagatcgcaggtcgctcaggcttgcagatgggtcaagggttgtggagagtggtcagaaaccagcagctgcaacaagaaggctacagtgagcaaggctacctcaccagagagcagagcaggagaatggctgcgagcaacatttctaacaccaatcatcgtaaacaagtccaaggaggcattgacatatatcatcttttgaaggaccttgcgaatgatgaacttctctggcaagggttgtgcaaatccacttggggtcactgttccatatacaataagaacccacctttaggattttcttttagaaaattgtatatgcagctggatgaaggcagcctcacctttaatgccaacccagatgagggagtgaactactttatgtccaagggtatcctggatgattcgccaaaggaaatagcaaagtttatcttctgtacaagaacactaaattggaaaaaactgagaatctatcttgatgaaaggagagatgtcttggatgaccttgtaacattgcataattttagaaatcagttcttgccaaatgcactgagagaattttttcgtcatatccatgcccctgaagagcgtggagagtatcttgaaactcttataacaaagttctcacatagattctgtgcttgcaaccctgatttaatgcgagaacttggccttagtcctgatgctgtctatgtactgtgctactctttgattctactttccattgacctcactagccctcatgtgaagaataaaatgtcaaaaagggaatttattcgaaatacccgtcgcgctgctcaaaatattagtgaagattttgtagggcatctttatgacaatatctaccttattggccatgtggctgcataaaaagcacaattgctaggacttcagtttttacttcagactaaagctacccaaggacttagcagatatgggggttacatcagtgctggtcattgtagcctgagtatacaatcaagcttcagtgtgcaacctttttttcttttgccattttctattttagtaatttccttggggaactaaataattttgcagaatttttcctaattttgtttatcacgttttgcacaaagcagagccactgtctaacacagctgttaacgaatgataaactgacattatactctaaaagatggtgtatttgtgcattagatttgcctgaaaaactttatccatttccattctttatacaaataccatgtaatgtgtacatatttaactaaagagatttatagtcataattattttattgtaaagattttaactaaagtttttccttttctctcaaa

SEQ ID NO: 133682 - DNA, 1377 bp, Homo sapiens
  Payload ID: 6133
  Gene Symbol: FBXO8
  Gene Name: F-box protein 8
  ENST ID: ENST00000515664
  CDS Start-End: 246-755
tgggatagtcggcagttctggcccctgcagctggaggtaccctgagttctgagggtcgtagtgctgtttctggtattctcatcgcggtcacctctaccggtgtggacaagtaaagtttgaatcagcttctccatggcctgggcaccagttcccggctgagccattttccttttggctaaaagtccccgcccagaggccaattcgtcgcggcggcggtggagatcgcaggtcgctcaggcttgcagatgggtcaagggttgtggagagtggtcagaaaccagcagctgcaacaagaaggctacagtgagcaaggctacctcaccagagagcagagcaggagaatggctgcgagcaacatttctaacaccaatcatcgtaaacaagtccaaggaggcattgacatatatcatcttttgaaggcaaggaaatcgaaagaacaggaaggattcattaatttggaaatgttgcctcctgagctaagctttaccatcttgtcctacctgaatgcaactgacctttgcttggcttcatgtgtttggcaggaccttgcgaatgatgaacttctctggcaagggttgtgcaaatccacttggggtcactgttccatatacaataagaacccacctttaggattttcttttagaaaattgtatatgcagctggatgaaggcagcctcacctttaatgccaacccagatgagccacagggaacaagattctccaaaggacaccgttcatgtcacggatatgggtaaccaagctccacagcagctgctggcagtggctcatggggtgggggagaacatctgcacagtttgtgggagtgaactactttatgtccaagggtatcctggatgattcgccaaaggaaatagcaaagtttatcttctgtacaagaacactaaattggaaaaaactgagaatctatcttgatgaaaggagagatgtcttggatgaccttgtaacattgcataattttagaaatcagttcttgccaaatgcactgagagaattttttcgtcatatccatgcccctgaagagcgtggagagtatcttgaaactcttataacaaagttctcacatagattctgtgcttgcaaccctgatttaatgcgagaacttggccttagtcctgatgctgtctatgtactgtgctactctttgattctactttccattgacctcactagccctcatgtgaagaataaaatgtcaaaaagggaatttattcgaaatacccgtcgcgctgctcaaaatattagtgaagattttgtagggcatctttatgacaatatctaccttattggccatgtggctgcataaaaagcacaattgctaggacttcagtttttacttcagactaaagctacccaagg

SEQ ID NO: 133683 - DNA, 928 bp, Homo sapiens
  Payload ID: 6133
  Gene Symbol: FBXO8
  Gene Name: F-box protein 8
  ENST ID: ENST00000513696
  CDS Start-End: 377-928
ataggaaacgtcaaaattgggatagtcggcagttctggcccctgcagctggaggtaccctgagttctgagggtcgtagtgctgtttctggtattctcatcgcggtcacctctaccggtgtggacaagtaaagtttgaatcagcttctccatggcctgggcaccagttcccggctgagccattttccttttggctaaaagtccccgcccagaggccaattcgtcgcggcggcggtggagatcgcaggtcgctcagaccaagaaaaaacatgtttggtttcatttcgaagctccttagaaagaattctatagatcctctcaacatgataaagaagctttgaacaaaataaattcaaatttggaagaaaaggcttgcagatgggtcaagggttgtggagagtggtcagaaaccagcagctgcaacaagaaggctacagtgagcaaggctacctcaccagagagcagagcaggagaatggctgcgagcaacatttctaacaccaatcatcgtaaacaagtccaaggaggcattgacatatatcatcttttgaaggcaaggaaatcgaaagaacaggaaggattcattaatttggaaatgttgcctcctgagctaagctttaccatcttgtcctacctgaatgcaactgacctttgcttggcttcatgtgtttggcaggaccttgcgaatgatgaacttctctggcaagggttgtgcaaatccacttggggtcactgttccatatacaataagaacccacctttaggattttcttttagaaaattgtatatgcagctggatgaaggcagcctcacctttaatgccaacccagatgagggagtgaactactttatgtccaagggtatcctggatgattcgccaaaggaaatagcaaagtttatcttctgtacaagaacactaaattggaaaaaa

SEQ ID NO: 133684 - DNA, 2562 bp, Homo sapiens
  Payload ID: 6133
  Gene Symbol: FBXO8
  Gene Name: F-box protein 8
  ENST ID: ENST00000620592
  CDS Start-End: 1110-1808
gaaaaggcggatctggtcattcgtctccgcccggggtctctgtaaggacggcggagagaggcgacctccgcccaataccaggcgcagccttgccgtctcctcggggctcaccaagcagccaccagcaaagaagccggtttcaaaggcccagcacgacagggagaggaaaacggagcatatgcaaccatacacagtcaccagagtccagcctcccgcaaccagtcgctacagccaggcgcctgcgcccagaagcgcttctcgcgccgaccgtttgtatttggaattgtgggttcctgcccgccacgcaccaccgcaagaccttcaaagctgggagcttctctgtgctccaggattcctcgctgccgattccacaccgcgttcaagactcctgtgaagagcgactccgctgagagcctcctcaatggccagtccacttctaacttgcagctgagaagtttttctgatcttgatggtcagagtggctcgtgctacgaagtgagaaacaaggaatctatagcgaatcgtaaacaacagaaataaaaatgcgtctccgttaagagtcggagcctaacgtcacttccggcaacaataggaaacgtcaaaattgggatagtcggcagttctggcccctgcagctggaggtaccctgagttctgagggtcgtagtgctgtttctggtattctcatcgcggtcacctctaccggtgtggacaagtaaagtttgaatcagcttctccatggcctgggcaccagttcccggctgagccattttccttttggctaaaagtccccgcccagaggccaattcgtcgcggcggcggtggagatcgcaggtcgctcaggcttgcagatgggtcaagggttgtggagagtggtcagaaaccagcagctgcaacaagaaggctacagtgagcaaggctacctcaccagagagcagagcaggagaatggctgcgagcaacatttctaacaccaatcatcgtaaacaagtccaaggaggcattgacatatatcatcttttgaaggcaaggaaatcgaaagaacaggaaggattcattaatttggaaatgttgcctcctgagctaagctttaccatcttgtcctacctgaatgcaactgacctttgcttggcttcatgtgtttggcaggaccttgcgaatgatgaacttctctggcaagggttgtgcaaatccatggggtcactgttccatatacaataagaacccacctttaggattttcttttagaaaattgtatatgcagctggatgaaggcagcctcacctttaatgccaacccagatgagggagtgaactactttatgtccaagggtatcctggatgattcgccaaaggaaatagcaaagtttatcttctgtacaagaacactaaattggaaaaaactgagaatctatcttgatgaaaggagagatgtcttggatgaccttgtaacattgcataattttagaaatcagttcttgccaaatgcactgagagaattttttcgtcatatccatgcccctgaagagcgtggagagtatcttgaaactcttataacaaagttctcacatagattctgtgcttgcaaccctgatttaatgcgagaacttggccttagtcctgatgctgtctatgtactgtgctactctttgattctactttccattgacctcactagccctcatgtgaagaataaaatgtcaaaaagggaatttattcgaaatacccgtcgcgctgctcaaaatattagtgaagattttgtagggcatctttatgacaatatctaccttattggccatgtggctgcataaaaagcacaattgctaggacttcagtttttacttcagactaaagctacccaaggacttagcagatatgggggttacatcagtgctggtcattgtagcctgagtatacaatcaagcttcagtgtgcaacctttttttcttttgccattttctattttagtaatttccttggggaactaaataattttgcagaatttttcctaattttgtttatcacgttttgcacaaagcagagccactgtctaacacagctgttaacgaatgataaactgacattatactctaaaagatggtgtatttgtgcattagatttgcctgaaaaactttatccatttccattctttatacaaataccatgtaatgtgtacatatttaactaaagagatttatagtcataattattttattgtaaagattttaactaaagtttttccttttctctcaaactgagttctgaaatttatttgattctgatctgaaactattgtcttcgtaaaagttagatctgacttcagacagaaaccaataccagcttccttttcctttaaactttgaagagtgttgatttgttactatattactatgcaaaactggcagttatttttataatataaatttataatttgattttttattttaaaaactgggttaatcaagtctcggtaagtcctttaaaccatttaggatttttaaaacatcaaaatttatgatttacattcataggaataaaataaaatattattagaactctggtaaa

SEQ ID NO: 133685 - DNA, 1591 bp, Homo sapiens
  Payload ID: 6133
  Gene Symbol: FBXO8
  Gene Name: F-box protein 8
  Uniprot ID: Q9NRD0
  ENST ID: ENST00000615392
  CDS Start-End: 1-837
atgggtcaagggttgtggagagtggtcagaaaccagcagctgcaacaagaaggctacagtgagcaaggctacctcaccagagagcagagcaggagaatggctgcgagcaacatttctaacaccaatcatcgtaaacaagtccaaggaggcattgacatatatcatcttttgaaggaccttgcgaatgatgaacttctctggcaagggttgtgcaaatccacttggggtcactgttccatatacaataagaacccacctttaggattttcttttagaaaattgtatatgcagctggatgaaggcagcctcacctttaatgccaacccagatgagggagtgaactactttatgtccaagggtatcctggatgattcgccaaaggaaatagcaaagtttatcttctgtacaagaacactaaattggaaaaaactgagaatctatcttgatgaaaggagagatgtcttggatgaccttgtaacattgcataattttagaaatcagttcttgccaaatgcactgagagaattttttcgtcatatccatgcccctgaagagcgtggagagtatcttgaaactcttataacaaagttctcacatagattctgtgcttgcaaccctgatttaatgcgagaacttggccttagtcctgatgctgtctatgtactgtgctactctttgattctactttccattgacctcactagccctcatgtgaagaataaaatgtcaaaaagggaatttattcgaaatacccgtcgcgctgctcaaaatattagtgaagattttgtagggcatctttatgacaatatctaccttattggccatgtggctgcataaaaagcacaattgctaggacttcagtttttacttcagactaaagctacccaaggacttagcagatatgggggttacatcagtgctggtcattgtagcctgagtatacaatcaagcttcagtgtgcaacctttttttcttttgccattttctattttagtaatttccttggggaactaaataattttgcagaatttttcctaattttgtttatcacgttttgcacaaagcagagccactgtctaacacagctgttaacgaatgataaactgacattatactctaaaagatggtgtatttgtgcattagatttgcctgaaaaactttatccatttccattctttatacaaataccatgtaatgtgtacatatttaactaaagagatttatagtcataattattttattgtaaagattttaactaaagtttttccttttctctcaaactgagttctgaaatttatttgattctgatctgaaactattgtcttcgtaaaagttagatctgacttcagacagaaaccaataccagcttccttttcctttaaactttgaagagtgttgatttgttactatattactatgcaaaactggcagttatttttataatataaatttataatttgattttttattttaaaaactgggttaatcaagtctcggtaagtcctttaaaccatttaggatttttaaaacatcaaaatttatgatttacattcataggaataaaataaaatattattagaactctggtaaa

SEQ ID NO: 133686 - DNA, 4559 bp, Homo sapiens
  Payload ID: 6134
  Gene Symbol: FBXO9
  Gene Name: F-box protein 9
  Uniprot ID: Q9UK97
  ENST ID: ENST00000244426
  CDS Start-End: 173-1516
agagaatatgcttttcagactcattttcctttggaaattaatagtaaggtctcaagtgccccctacagccttgctactcaaagtgggttccacaaagtgttgacagtatggtactaaatagaaagtggctgaatgagaaatgtagattgcagagggcaactggtgtgtttatatgcctgacattatttgggttttcccccctcaggcagaagctgaggaagattgtcattctgatactgtcagagcagatgatgatgaagaaaatgaaagtcctgctgaaacagatctgcaggcacaactccagatgttccgagctcagtggatgtttgaacttgctccaggtgtaagctctagcaatttagaaaatcgaccttgcagagcagcaagaggctctctccagaaaacatcggcagataccaaaggaaaacaagaacaggcaaaagaagaaaaggctcgagaactcttcctaaaagcagtagaagaagaacaaaatggagctctctatgaagccatcaagttttatcgtagggctatgcaacttgtacctgatatagagttcaagattacttatacccggtctccagatggtgatggcgttggaaacagctacattgaagataatgatgatgacagcaaaatggcagatctcttgtcctacttccagcagcaactcacatttcaggagtctgtgcttaaactgtgtcagcctgagcttgagagcagtcagattcacatatcagtgctgccaatggaggtcctgatgtacatcttccgatgggtggtgtctagtgacttggacctcagatcattggagcagttgtcgctggtgtgcagaggattctacatctgtgccagagaccctgaaatatggcgtctggcctgcttgaaagtttggggcagaagctgtattaaacttgttccgtacacgtcctggagagagatgtttttagaacggcctcgtgttcggtttgatggcgtgtatatcagtaaaaccacatatattcgtcaaggggaacagtctcttgatggtttctatagagcctggcaccaagtggaatattacaggtacataagattctttcctgatggccatgtgatgatgttgacaacccctgaagagcctcagtccattgttccacgtttaagaactaggaataccaggactgatgcaattctactgggtcactatcgcttgtcacaagacacagacaatcagaccaaagtatttgctgtaataactaagaaaaaagaagaaaaaccacttgactataaatacagatattttcgtcgtgtccctgtacaagaagcagatcagagttttcatgtggggctacagctatgttccagtggtcaccagaggttcaacaaactcatctggatacatcattcttgtcacattacttacaaatcaactggtgagactgcagtcagtgcttttgagattgacaagatgtacacccccttgttcttcgccagagtaaggagctacacagctttctcagaaaggcctctgtagagcctcaagtccagtcctctatcacttttgcatgaattaaagtatatagcgcaaaagagcacctaagttataaatgtgtgtgtgtgcgtgtgtgtgtatatatatatatatatatatatatatatatatatatatatatatatatggaattggaacttattttaaattgttggagttcttttaagaagaatataaattgattattttttttatttaaagggatagttgattcctggggtgttttgaaattaagttggaattaagttgcttaagcatatttatgttgtgagaaaccttaatatgaggtttatcatgccctttttcaagcagatttatgagcagatttctgtcacataagtcgtcttctgcttgagtatcctaatatttcaatgcatcaggggagcgctccactggataagcattttatttcccgcatggcataatgtttttgcactaaaggctcaaagtgtgagaacctgttctggatttgtttgaaattatttcaccaataaagatcataaataaatgtttctttcaagaaaatatatttggatggcctttttaaagtaacaggatatttaataagagtcctagatagccagcggagactttaagaatcattgcctctagctgggtgtggtggcatgcacctgtagtcccagctatttgggaggctgatgcaggagaatagcttaagcccaggaatttgagtctgggagtttgagtccagcatgggcaacataacaagaccccatcccttattaaaagaaaaaaaaataattcctcatttcatcattggtctttatatgtagccacaaacactgacctcatgtaggcaccttaccaatatatgacattaagtgagagtgaatcccttaggactggaacacttcaagctcaaccaactgactcagttgtcattcttcacaaaagaatagtagaggatcatgtaaacctgagcctaactcttgttccagtatgaaagttgggggagagcaccagccacctaggaaaactgtatgttacctttttactcaaaggagtcccccctgcccagtaacagtcctattagtgtttaatttcagagtttgtgtctggtagacctctacctgattcagatttggttttgttgtttcaaccatagttagagacaaattctcatgtactttcagaaatcaatatctgcagccactgttacttttaattgacattaagagacacttcataggttcccacaattcagtatgggataggctttttaaaaagcacatacagaccaggcgtggtggctcatgcctataatcccagcactttgggaggctaagacaggcagatcacctgagctcaggagtccaagaccagcctgggcaacatggcaaaacaccgtctctacaaaaaaaaaaaaaaaaaaaattagccaagtacagtggggcacacctatagtcgcagctacttgggaggctggggcaggagaattgcctgagcctgggaagtggaagttgcagtgagccaagatcgtgccattccactccagcctgagcaacacagtgagaccctatctcaaaaaaataatgatgatagtacacgttatgttaaaggtgaaatgtgcatacagaaggaagagagttggccaggtgtggtgactcacacctataatcccaatactttgggaggccaaggcaggaggattgcttgaggtcaggagttttagaccagcctggacaacatagcaagacctcatctcttctaaaaattaaaaaaaaaaaaaataggcatggtggtacacacctgtggtcccagctagttgggaggctaaggcaggaggatcacttagccaggaggctgaggctacagtgagccaagattgcaccactgtgctccagcctgggtgagaaagcgagaccctgtctcaaaaaagaaaaaaaagagaggttggccttttgtagcaatctgagaagtgtgtttttcaagttggaaaggaaggagaaaagcaacttgcctaagataaggtagctcttcatgatatgactgttatttctgatatacaaataaatagaacatgattaggacatagtcaaatatagctagaaaaatatattcctaaggaaagtgagatttgaggagtccctgttgttctgcaacatccctagattgaatgatctgttgcagatggtggataccaagttcaaatttaaagatttctttgtaagcagtaaagtgactttcacttatttaacttagaactggaaaaagtaacttttttccagattacattttctgtatatttgtaaaatgcaaaagcaatatatatttgttgtgagaaaattagaatatacagataaaataaaatttaaaaaaacacccaaagataaccagaagaaaatttttgctatgtaacctttttcttctggtctttgcaaatcctgccgtagaaactttttaacttcaggagtgtccttcctttgctctattaggacattacagaaaccaatactatgaaaagctgacagcagtatctggattaactttttaaaaacaatgaaagcattttacagaaattacatttcagatcgtgctggaactgtgttcagaagatatcctcagagggaatctggcctgagcaccatcatgtttaattgcctcctcctgtcttgcattttcctcccagcccccttcctaccccttagcagagggccaggtgagggtgcttggggcccatgggggctgggagtgtagacttcagttacacccccagcccccaggggaaagcattagccttgaatcctcaatcccaggccctctactaaccactctcaacctatggtatttatcttttgattattctgtgcatctataaaaatgggattatattgtacagaatgctttgtaagctttctctccccacataagaatgccctgtaagcattttgttaaatatttttaatgactttagagtccaactttatactcctctttacgcattttggttttctaatttaatggtagtgtaaacgtttttggaataaacattcctgtggctaaa

SEQ ID NO: 133687 - DNA, 3418 bp, Homo sapiens
  Payload ID: 6134
  Gene Symbol: FBXO9
  Gene Name: F-box protein 9
  Uniprot ID: Q9UK97
  ENST ID: ENST00000323557
  CDS Start-End: 332-1645
gtccggggtctccagtagggctgacgctccggtgctcgcacaatcccccgcctcggctggcaacgggcgtccctccactccccgagtccccggcagccgccgccaccccagcgcgccccgatctggccccctgccccgcgaagatggctgccgtacgccgggcccgcagttattgccgctgcctggtgcgcttctccgaccgagaactctgctaagctccgctgcagagacaggcaggagtagacacccggacacccagcacccctcctccggggggcggtgcagagggggcacggagagcccctcgagcgcagcaggccgccccgccagcatggcagaagctgaggaagattgtcattctgatactgtcagagcagatgatgatgaagaaaatgaaagtcctgctgaaacagatctgcaggcacaactccagatgttccgagctcagtggatgtttgaacttgctccaggtgtaagctctagcaatttagaaaatcgaccttgcagagcagcaagaggctctctccagaaaacatcggcagataccaaaggaaaacaagaacaggcaaaagaagaaaaggctcgagaactcttcctaaaagcagtagaagaagaacaaaatggagctctctatgaagccatcaagttttatcgtagggctatgcaacttgtacctgatatagagttcaagattacttatacccggtctccagatggtgatggcgttggaaacagctacattgaagataatgatgatgacagcaaaatggcagatctcttgtcctacttccagcagcaactcacatttcaggagtctgtgcttaaactgtgtcagcctgagcttgagagcagtcagattcacatatcagtgctgccaatggaggtcctgatgtacatcttccgatgggtggtgtctagtgacttggacctcagatcattggagcagttgtcgctggtgtgcagaggattctacatctgtgccagagaccctgaaatatggcgtctggcctgcttgaaagtttggggcagaagctgtattaaacttgttccgtacacgtcctggagagagatgtttttagaacggcctcgtgttcggtttgatggcgtgtatatcagtaaaaccacatatattcgtcaaggggaacagtctcttgatggtttctatagagcctggcaccaagtggaatattacaggtacataagattctttcctgatggccatgtgatgatgttgacaacccctgaagagcctcagtccattgttccacgtttaagaactaggaataccaggactgatgcaattctactgggtcactatcgcttgtcacaagacacagacaatcagaccaaagtatttgctgtaataactaagaaaaaagaagaaaaaccacttgactataaatacagatattttcgtcgtgtccctgtacaagaagcagatcagagttttcatgtggggctacagctatgttccagtggtcaccagaggttcaacaaactcatctggatacatcattcttgtcacattacttacaaatcaactggtgagactgcagtcagtgcttttgagattgacaagatgtacacccccttgttcttcgccagagtaaggagctacacagctttctcagaaaggcctctgtagagcctcaagtccagtcctctatcacttttgcatgaattaaagtatatagcgcaaaagagcacctaagttataaatgtgtgtgtgtgcgtgtgtgtgtatatatatatatatatatatatatatatatatatatatatatatatatggaattggaacttattttaaattgttggagttcttttaagaagaatataaattgattattttttttatttaaagggatagttgattcctggggtgttttgaaattaagttggaattaagttgcttaagcatatttatgttgtgagaaaccttaatatgaggtttatcatgccctttttcaagcagatttatgagcagatttctgtcacataagtcgtcttctgcttgagtatcctaatatttcaatgcatcaggggagcgctccactggataagcattttatttcccgcatggcataatgtttttgcactaaaggctcaaagtgtgagaacctgttctggatttgtttgaaattatttcaccaataaagatcataaataaatgtttctttcaagaaaatatatttggatggcctttttaaagtaacaggatatttaataagagtcctagatagccagcggagactttaagaatcattgcctctagctgggtgtggtggcatgcacctgtagtcccagctatttgggaggctgatgcaggagaatagcttaagcccaggaatttgagtctgggagtttgagtccagcatgggcaacataacaagaccccatcccttattaaaagaaaaaaaaataattcctcatttcatcattggtctttatatgtagccacaaacactgacctcatgtaggcaccttaccaatatatgacattaagtgagagtgaatcccttaggactggaacacttcaagctcaaccaactgactcagttgtcattcttcacaaaagaatagtagaggatcatgtaaacctgagcctaactcttgttccagtatgaaagttgggggagagcaccagccacctaggaaaactgtatgttacctttttactcaaaggagtcccccctgcccagtaacagtcctattagtgtttaatttcagagtttgtgtctggtagacctctacctgattcagatttggttttgttgtttcaaccatagttagagacaaattctcatgtactttcagaaatcaatatctgcagccactgttacttttaattgacattaagagacacttcataggttcccacaattcagtatgggataggctttttaaaaagcacatacagaccaggcgtggtggctcatgcctataatcccagcactttgggaggctaagacaggcagatcacctgagctcaggagtccaagaccagcctgggcaacatggcaaaacaccgtctctacaaaaaaaaaaaaaaaaaaaattagccaagtacagtggggcacacctatagtcgcagctacttgggaggctggggcaggagaattgcctgagcctgggaagtggaagttgcagtgagccaagatcgtgccattccactccagcctgagcaacacagtgagaccctatctcaaaaaaataatgatgatagtacacgttatgttaaaggtgaaatgtgcatacagaaggaagagagttggccaggtgtggtgactcacacctataatcccaatactttgggaggccaaggcaggaggattgcttgaggtcaggagttttagaccagcctggacaacatagcaagacctcatctcttctaaaaattaaaaaaaaaaaaaatagg

SEQ ID NO: 133688 - DNA, 1580 bp, Homo sapiens
  Payload ID: 6134
  Gene Symbol: FBXO9
  Gene Name: F-box protein 9
  Uniprot ID: Q9UK97
  ENST ID: ENST00000370939
  CDS Start-End: 311-1522
ctccagtctgtctgtgctctcaaaaactttagtcgttataacaactgtgactgttgagaaatttcactgttttcctgcattcctggcgcgggactctagccagaggctccgaggactttgtagcgactgtcccaagcgtccagttcgatgcttctcagggcggcttgctttaagggcccacccctaaatttgggttgtaaaaatttttgaggcagaagctgaggaagattgtcattctgatactgtcagagcagatgatgatgaagaaaatgaaagtcctgctgaaacagatctgcaggcacaactccagatgttccgagctcagtggatgtttgaacttgctccaggtgtaagctctagcaatttagaaaatcgaccttgcagagcagcaagaggctctctccagaaaacatcggcagataccaaaggaaaacaagaacaggcaaaagaagaaaaggctcgagaactcttcctaaaagcagtagaagaagaacaaaatggagctctctatgaagccatcaagttttatcgtagggctatgcaacttgtacctgatatagagttcaagattacttatacccggtctccagatggtgatggcgttggaaacagctacattgaagataatgatgatgacagcaaaatggcagatctcttgtcctacttccagcagcaactcacatttcaggagtctgtgcttaaactgtgtcagcctgagcttgagagcagtcagattcacatatcagtgctgccaatggaggtcctgatgtacatcttccgatgggtggtgtctagtgacttggacctcagatcattggagcagttgtcgctggtgtgcagaggattctacatctgtgccagagaccctgaaatatggcgtctggcctgcttgaaagtttggggcagaagctgtattaaacttgttccgtacacgtcctggagagagatgtttttagaacggcctcgtgttcggtttgatggcgtgtatatcagtaaaaccacatatattcgtcaaggggaacagtctcttgatggtttctatagagcctggcaccaagtggaatattacaggtacataagattctttcctgatggccatgtgatgatgttgacaacccctgaagagcctcagtccattgttccacgtttaagaactaggaataccaggactgatgcaattctactgggtcactatcgcttgtcacaagacacagacaatcagaccaaagtatttgctgtaataactaagaaaaaagaagaaaaaccacttgactataaatacagatattttcgtcgtgtccctgtacaagaagcagatcagagttttcatgtggggctacagctatgttccagtggtcaccagaggttcaacaaactcatctggatacatcattcttgtcacattacttacaaatcaactggtgagactgcagtcagtgcttttgagattgacaagatgtacacccccttgttcttcgccagagtaaggagctacacagctttctcagaaaggcctctgtagagcctcaagtccagtcctctatcacttttgcatgaattaaagtatatagcgcaaaaga

SEQ ID NO: 133689 - DNA, 452 bp, Homo sapiens
  Payload ID: 6134
  Gene Symbol: FBXO9
  Gene Name: F-box protein 9
  ENST ID: ENST00000459845
  CDS Start-End: 307-452
atacgtatgccatggaggtttgctgcacctattgacccgtcctatgagatccaactaagaagaacagaatacttgctatcttcagagtagaatattttgaaatgtatgtgtgctttacagtgtgcccagcattttaccatatactaactggttcaagtctgaaaggcacctctgctttgagtctgcttgccagagataagataggaggcagaagctgaggaagattgtcattctgatactgtcagagcagatgatgatgaagaaaatgaaagtcctgctgaaacagatctgcaggcacaactccagatgttccgagctcagtggatgtttgaacttgctccaggtgtaagctctagcaatttagaaaatcgaccttgcagagcagcaagaggctctctccagaaaacatcggcagataccaaaggaaaacaagaacaggcaaaagaagaaaa

SEQ ID NO: 133690 - DNA, 574 bp, Homo sapiens
  Payload ID: 6134
  Gene Symbol: FBXO9
  Gene Name: F-box protein 9
  ENST ID: ENST00000473318
  CDS Start-End: 1-574
tctttcctgatggccatgtgatgatgttgacaacccctgaagagcctcagtccattgttccacgtttaagaactaggaataccaggactgatgcaattctactgggtcactatcgcttgtcacaagacacagacaatcagaccaaagtatttgctgtaataactaagaaaaaagaagaaacagggcagagtttcatctgcgagtcctatcaccttgtggccacctgttgctggcgtctccacttccctctgatgggctcctggagcctgggcagcagcagcctgagagacagagagagttgctttgactgtgactgcaggtttcctgagaaaccacttgactataaatacagatattttcgtcgtgtccctgtacaagaagcagatcagagttttcatgtggggctacagctatgttccagtggtcaccagaggttcaacaaactcatctggatacatcattcttgtcacattacttacaaatcaactggtgagactgcagtcagtgcttttgagattgacaagatgtacacccccttgttcttcgccagagtaaggagctacacagctttctc

SEQ ID NO: 133691 - DNA, 728 bp, Homo sapiens
  Payload ID: 6134
  Gene Symbol: FBXO9
  Gene Name: F-box protein 9
  ENST ID: ENST00000498744
  CDS Start-End: 293-728
agtgaataccacagaatagctggggcaggcaggcagcctgggccctcccacaacaatgccaagatgactgagtctcagaggatcacagaaagtccccctccatgcggtcagatcaggcctttggcctttggatgagatccaactaagaagaacagaatacttgctatcttcagagtagaatattttgaaatgtgcagaagctgaggaagattgtcattctgatactgtcagagcagatgatgatgaagaaaatgaaagtcctgctgaaacagatctgcaggcacaactccagatgttccgagctcagtggatgtttgaacttgctccaggtgtaagctctagcaatttagaaaatcgaccttgcagagcagcaagaggctctctccagaaaacatcggcagataccaaaggaaaacaagaacaggcaaaagaagaaaaggctcgagaactcttcctaaaagcagtagaagaagaacaaaatggagctctctatgaagccatcaagttttatcgtagggctatgcaacttgtacctgatatagagttcaagattacttatacccggtctccagatggtgatggcgttggaaacagctacattgaagataatgatgatgacagcaaaatggcagatctcttgtcctacttccagcagcaactcacatttcaggagtctgtgcttaaactgtgtcagcctgagcttgagagcagtcagattcacatatcag

SEQ ID NO: 133692 - DNA, 569 bp, Homo sapiens
  Payload ID: 6134
  Gene Symbol: FBXO9
  Gene Name: F-box protein 9
  ENST ID: ENST00000473337
  CDS Start-End: 214-569
gaggagggtttgcaggacagccggggaaaatgtcccttctcggctcactgagtatattgaaccagtctcggtcctctcaagggattttatcagaagcattgagcatagattgaggcagaagctgaggaagattgtcattctgatactgtcagagcagatgatgatgaagaaaatgaaagtcctgctgaaacagatctgcaggcacaactccagatgttccgagctcagtggatgtttgaacttgctccaggtgtaagctctagcaatttagaaaatcgaccttgcagagcagcaagaggctctctccagaaaacatcggcagataccaaaggaaaacaagaacaggcaaaagaagaaaaggctcgagaactcttcctaaaagcagtagaagaagaacaaaatggagctctctatgaagccatcaagttttatcgtagggctatgcaacttgtacctgatatagagttcaagattacttatacccggtctccagatggtgatggcgttggaaacagctacattgaagataatgatgatgacagcaaaatggcagatctcttgtcctactt

SEQ ID NO: 133693 - DNA, 634 bp, Homo sapiens
  Payload ID: 6134
  Gene Symbol: FBXO9
  Gene Name: F-box protein 9
  ENST ID: ENST00000484436
  CDS Start-End: 1-453
gtggaatattacaggtacataagattctttcctgatggccatgtgatgatgttgacaacccctgaagagcctcagtccattgttccacgtttaagaactaggaataccaggactgatgcaattctactgggtcactatcgcttgtcacaagacacagacaatcagaccaaagtatttgctgtaataactaagaaaaaagaagaaaaaccacttgactataaatacagatattttcgtcgtgtccctgtacaagaagcagatcagagttttcatgtggggctacagctatgttccagtggtcaccagaggttcaacaaactcatctggatacatcattcttgtcacattacttacaaatcaactggtgagactgcagtcagtgcttttgagattgacaagatgtacacccccttgttcttcgccagaatttatgagcagatttctgtcacataagtcgtcttctgcttgagtatcctaatatttcaatgcatcaggggagcgctccactggataagcattttatttcccgcatggcataatgtttttgcactaaaggctcaaagtgtgagaacctgttctggatttgtttgaaattatttcaccaataaagatcataaataaatgtttctttcaa

SEQ ID NO: 133694 - DNA, 3560 bp, Homo sapiens
  Payload ID: 6135
  Gene Symbol: FBXO18
  Gene Name: F-box protein, helicase, 18
  Uniprot ID: Q8NFZ0
  ENST ID: ENST00000362091
  CDS Start-End: 116-3247
ctcgggctccaggtcccggccagaggaggagctcgctgccgggggacgctgggctgagcggccggcggcgcgggcccggcggcggcggcagcggggtccgggtccggagcgccacatgagacggtttaagcggaagcatcttactgccattgactgccagcatttggctcggagtcacttggctgtgacccagcccttcggtcaaagatggacaaacagagatccgaaccatggtctctatcctaaaccgagaacaaaaagagggagtaggggtcagggaagtcaaagatgcatccctgagttcttcctagcaggcaagcagccgtgcaccaatgacatggccaaaagcaattctgttggccaggacagctgtcaggactctgagggtgacatgatctttcctgcagagagcagctgtgcactgcctcaggaaggcagtgcagggccgggctcaccagggtctgccccgccctccaggaagcggtcttggtcctctgaggaagagagtaaccaggctaccgggaccagccggtgggatggagtttctaagaaagctccacggcaccatttgtctgtgccatgcacaaggcctagggaggccaggcaagaagcagaggacagtacgtctcggctctctgcggagtctggtgaaaccgaccaagatgctggggacgtgggtcctgatcccattcctgactcatactatgggcttcttgggaccttgccctgccaggaagcactgagccacatttgcagcctgcctagtgaggtcctgaggcacgtgtttgccttcctcccggtggaagacctctattggaacctgagcttggtgtgccacttgtggagggagatcatcagtgacccgctgttcattccttggaagaagctgtaccatcgatacctgatgaatgaagagcaagctgtcagcaaagtggacggcatcctgtctaactgtggcatagaaaaggagtcagacctgtgtgtgctgaacctcatacgatacacagccaccactaagtgctctccgagtgtggatcccgagagggtgctgtggagtctgagggaccaccccctcctccccgaggctgaggcgtgtgtgcggcaacacctccccgacctctacgctgctgccgggggtgtcaacatctgggccctggtggcggctgtggtgctcctctccagcagtgtgaatgacatccagcgactgctcttctgcctccggagacccagctccacggtgaccatgccagatgtcaccgagaccctgtactgcatagccgtgcttctctacgccatgagggagaaggggattaacatcagcaataggattcactacaacattttctattgcctatatcttcaggagaattcctgcactcaggccacaaaagttaaagaggagccatctgtctggccaggcaagaaaaccatccaacttacacatgaacaacagctgattctgaatcacaagatggaacctctccaggtggtgaaaattatggcctttgccggcactgggaagacctcaacgctggtcaagtatgcagagaagtggtctcagagcaggtttctgtatgtgacattcaacaagagcatcgcaaagcaggccgaacgcgtcttccccagcaacgtcatctgcaaaaccttccactccatggcctacgggcacatagggcggaagtaccagtcaaagaagaagttgaatctcttcaagttaacacccttcatggtcaactccgtccttgctgaagggaagggtggattcataagagccaagcttgtgtgtaagactctagaaaacttctttgcctcggctgacgaagagctgaccattgatcacgtgcctatttggtgtaagaacagccaaggacagagagtcatggttgagcagagtgaaaaactgaatggtgtccttgaagcgagccgcctctgggataacatgcggaagctgggggagtgcacagaagaggcgcaccagatgactcatgacggctacttgaaactctggcagctgagcaagccttcgctggcctcttttgacgccatctttgtggatgaggcccaggactgcacaccagctatcatgaacatagttctgtctcagccatgtgggaaaatctttgtaggggacccgcaccagcagatctataccttccggggtgcggtcaacgccctgttcacagtgccccacacccacgtcttctatctcacgcagagttttcggtttggtgtggaaatagcttatgtgggagctactatcttggatgtttgcaagagagtcaggaaaaagactttggttggaggaaaccatcagagtggcattagaggtgacgcaaaggggcaagtggccttgttgtcccggaccaacgccaacgtgtttgatgaggccgtacgggtgacggaaggggaattcccttcaaggatacatttgattggggggattaaatcatttggattggacagaatcattgatatttggatccttcttcagccagaggaagaacggaggaaacaaaacctcgtcattaaagacaaatttatcagaagatgggtgcacaaagaaggctttagtggcttcaagaggtatgtgaccgctgccgaggacaaggagcttgaagccaagatcgcagttgttgaaaagtataacatcaggattccagagctggtgcaaaggatagaaaaatgccatatagaagatttggactttgcagagtacattctgggcactgtgcacaaagccaaaggcctggagtttgacactgtgcatgttttggatgattttgtgaaagtgccttgtgcccggcataacctgccccagcttccgcacttcagagttgagtcattttctgaggatgaatggaatttactgtatgttgcagtaactcgagccaagaagcgtctcatcatgaccaaatcattggaaaacattttgactttggctggggagtacttcttgcaagcagagctgacaagcaacgtcttaaaaacaggcgtggtgcgctgctgcgtgggacagtgcaacaatgccatccctgttgacaccgtccttaccatgaagaagctgcccatcacctatagcaacaggaaggaaaacaaggggggctacctctgccactcctgtgcggagcagcgcatcgggcccctggcgttcctgacagcctccccggagcaggtgcgcgccatggagcgcactgtggagaacatcgtactgccccggcatgaggccctgctcttcctcgtcttctgaggacaaggcgcacgttctccgcagtgcagagcagcttgccgaggaccccgcgtgaagaaagccagcgaggggggcttctgctccctgagactctgggttcacccacagcactttctgaggaagaggacaccagcccaagctggacctgccatttctccactccctacagacagccagtctccacttgcctcccctctggatgtatctggtcagggaagtgggggatgttcttttgataaaaaaaaaaaaaaaaatttatgtatttaaacttttattacaagatttcaattaaacaggcaccatagcactggca

SEQ ID NO: 133695 - DNA, 3702 bp, Homo sapiens
  Payload ID: 6135
  Gene Symbol: FBXO18
  Gene Name: F-box protein, helicase, 18
  Uniprot ID: Q8NFZ0
  ENST ID: ENST00000379999
  CDS Start-End: 105-3389
ctgctttcaaggtgtctagatacagagtgaagaatgtcacagtaggaagtgcactggactaggggagtcaggagacccgggttcttgtgttggcaccatcactcatgagctacgaggtgacttcaggctgccattggacctgtcaagtgcctgagtcatgtgataatgggctacattgcgcagggcccctgggccatctccacaggagatgccagaggacgagtgcccacttgctggtcttcacagagcacgctgaaatgagacggtttaagcggaagcatcttactgccattgactgccagcatttggctcggagtcacttggctgtgacccagcccttcggtcaaagatggacaaacagagatccgaaccatggtctctatcctaaaccgagaacaaaaagagggagtaggggtcagggaagtcaaagatgcatccctgagttcttcctagcaggcaagcagccgtgcaccaatgacatggccaaaagcaattctgttggccaggacagctgtcaggactctgagggtgacatgatctttcctgcagagagcagctgtgcactgcctcaggaaggcagtgcagggccgggctcaccagggtctgccccgccctccaggaagcggtcttggtcctctgaggaagagagtaaccaggctaccgggaccagccggtgggatggagtttctaagaaagctccacggcaccatttgtctgtgccatgcacaaggcctagggaggccaggcaagaagcagaggacagtacgtctcggctctctgcggagtctggtgaaaccgaccaagatgctggggacgtgggtcctgatcccattcctgactcatactatgggcttcttgggaccttgccctgccaggaagcactgagccacatttgcagcctgcctagtgaggtcctgaggcacgtgtttgccttcctcccggtggaagacctctattggaacctgagcttggtgtgccacttgtggagggagatcatcagtgacccgctgttcattccttggaagaagctgtaccatcgatacctgatgaatgaagagcaagctgtcagcaaagtggacggcatcctgtctaactgtggcatagaaaaggagtcagacctgtgtgtgctgaacctcatacgatacacagccaccactaagtgctctccgagtgtggatcccgagagggtgctgtggagtctgagggaccaccccctcctccccgaggctgaggcgtgtgtgcggcaacacctccccgacctctacgctgctgccgggggtgtcaacatctgggccctggtggcggctgtggtgctcctctccagcagtgtgaatgacatccagcgactgctcttctgcctccggagacccagctccacggtgaccatgccagatgtcaccgagaccctgtactgcatagccgtgcttctctacgccatgagggagaaggggattaacatcagcaataggattcactacaacattttctattgcctatatcttcaggagaattcctgcactcaggccacaaaagttaaagaggagccatctgtctggccaggcaagaaaaccatccaacttacacatgaacaacagctgattctgaatcacaagatggaacctctccaggtggtgaaaattatggcctttgccggcactgggaagacctcaacgctggtcaagtatgcagagaagtggtctcagagcaggtttctgtatgtgacattcaacaagagcatcgcaaagcaggccgaacgcgtcttccccagcaacgtcatctgcaaaaccttccactccatggcctacgggcacatagggcggaagtaccagtcaaagaagaagttgaatctcttcaagttaacacccttcatggtcaactccgtccttgctgaagggaagggtggattcataagagccaagcttgtgtgtaagactctagaaaacttctttgcctcggctgacgaagagctgaccattgatcacgtgcctatttggtgtaagaacagccaaggacagagagtcatggttgagcagagtgaaaaactgaatggtgtccttgaagcgagccgcctctgggataacatgcggaagctgggggagtgcacagaagaggcgcaccagatgactcatgacggctacttgaaactctggcagctgagcaagccttcgctggcctcttttgacgccatctttgtggatgaggcccaggactgcacaccagctatcatgaacatagttctgtctcagccatgtgggaaaatctttgtaggggacccgcaccagcagatctataccttccggggtgcggtcaacgccctgttcacagtgccccacacccacgtcttctatctcacgcagagttttcggtttggtgtggaaatagcttatgtgggagctactatcttggatgtttgcaagagagtcaggaaaaagactttggttggaggaaaccatcagagtggcattagaggtgacgcaaaggggcaagtggccttgttgtcccggaccaacgccaacgtgtttgatgaggccgtacgggtgacggaaggggaattcccttcaaggatacatttgattggggggattaaatcatttggattggacagaatcattgatatttggatccttcttcagccagaggaagaacggaggaaacaaaacctcgtcattaaagacaaatttatcagaagatgggtgcacaaagaaggctttagtggcttcaagaggtatgtgaccgctgccgaggacaaggagcttgaagccaagatcgcagttgttgaaaagtataacatcaggattccagagctggtgcaaaggatagaaaaatgccatatagaagatttggactttgcagagtacattctgggcactgtgcacaaagccaaaggcctggagtttgacactgtgcatgttttggatgattttgtgaaagtgccttgtgcccggcataacctgccccagcttccgcacttcagagttgagtcattttctgaggatgaatggaatttactgtatgttgcagtaactcgagccaagaagcgtctcatcatgaccaaatcattggaaaacattttgactttggctggggagtacttcttgcaagcagagctgacaagcaacgtcttaaaaacaggcgtggtgcgctgctgcgtgggacagtgcaacaatgccatccctgttgacaccgtccttaccatgaagaagctgcccatcacctatagcaacaggaaggaaaacaaggggggctacctctgccactcctgtgcggagcagcgcatcgggcccctggcgttcctgacagcctccccggagcaggtgcgcgccatggagcgcactgtggagaacatcgtactgccccggcatgaggccctgctcttcctcgtcttctgaggacaaggcgcacgttctccgcagtgcagagcagcttgccgaggaccccgcgtgaagaaagccagcgaggggggcttctgctccctgagactctgggttcacccacagcactttctgaggaagaggacaccagcccaagctggacctgccatttctccactccctacagacagccagtctccacttgcctcccctctggatgtatctggtcagggaagtgggggatgttcttttgataaaaaaaaaaaaaaaaatttatgtatttaaacttttattacaagatttcaattaaacaggcaccatagcactggca

SEQ ID NO: 133696 - DNA, 3640 bp, Homo sapiens
  Payload ID: 6135
  Gene Symbol: FBXO18
  Gene Name: F-box protein, helicase, 18
  ENST ID: ENST00000397269
  CDS Start-End: 366-3326
ggagctcgcggaggaagtcggcgggcgtctcgggctccaggtcccggccagaggaggagctcgctgccgggggacgctgggctgagcggccggcggcgcgggcccggcggcggcggcagcggggtccgggtccggagcgccacatgagacggtttaagcggaagcatcttactgccattgactgccagcatttggctcggagtcacttggctgtgacccagcccttcggtcaaagatggacaaacagagatccgaaccatggtctctatcctaaaccgagaacaaaaagagggagtaggggtcagggaagtcaaagatgcatccctgagttcttcctagcaggcaagcagccgtgcaccaatgacatggccaaaagcaattctgttggccaggacagctgtcaggactctgagggtgacatgatctttcctgcagagagcagctgtgcactgcctcaggaaggcagtgcagggccgggctcaccagggtctgccccgccctccaggaagcggtcttggtcctctgaggaagagagtaaccaggctaccgggaccagccggtgggatggagtttctaagaaagctccacggcaccatttgtctgtgccatgcacaaggcctagggaggccaggcaagaagcagaggacagtacgtctcggctctctgcggagtctggtgaaaccgaccaagatgctggggacgtgggtcctgatcccattcctgactcatactatgggcttcttgggaccttgccctgccaggaagcactgagccacatttgcagcctgcctagtgaggtcctgaggcacgtgtttgccttcctcccggtggaagacctctattggaacctgagcttggtgtgccacttgtggagggagatcatcagtgacccgctgttcattccttggaagaagctgtaccatcgatacctgatgaatgaagagcaagctgtcagcaaagtggacggcatcctgtctaactgtggcatagaaaaggagtcagacctgtgtgtgctgaacctcatacgatacacagccaccactaagtgctctccgagtgtggatcccgagagggtgctgtggagtctgagggaccaccccctcctccccgaggctgaggcgtgtgtgcggcaacacctccccgacctctacgctgctgccgggggtgtcaacatctgggccctggtggcggctgtggtgctcctctccagcagtgtgaatgacatccagcgactgctcttctgcctccggagacccagctccacggtgaccatgccagatgtcaccgagaccctgtactgcatagccgtgcttctctacgccatgagggagaaggggattaacatcagcaataggattcactacaacattttctattgcctatatcttcaggagaattcctgcactcaggccacaaaagttaaagaggagccatctgtctggccaggcaagaaaaccatccaacttacacatgaacaacagctgattctgaatcacaagatggaacctctccaggtggtgaaaattatggcctttgccggcactgggaagacctcaacgctggtcaagtatgcagagaagtggtctcagagcaggtttctgtatgtgacattcaacaagagcatcgcaaagcaggccgaacgcgtcttccccagcaacgtcatctgcaaaaccttccactccatggcctacgggcacatagggcggaagtaccagtcaaagaagaagttgaatctcttcaagttaacacccttcatggtcaactccgtccttgctgaagggaagggtggattcataagagccaagcttgtgtgtaagactctagaaaacttctttgcctcggctgacgaagagctgaccattgatcacgtgcctatttggtgtaagaacagccaaggacagagagtcatggttgagcagagtgaaaaactgaatggtgtccttgaagcgagccgcctctgggataacatgcggaagctgggggagtgcacagaagaggcgcaccagatgactcatgacggctacttgaaactctggcagctgagcaagccttcgctggcctcttttgacgccatctttgtggatgaggcccaggactgcacaccagctatcatgaacatagttctgtctcagccatgtgggaaaatctttgtaggggacccgcaccagcagatctataccttccggggtgcggtcaacgccctgttcacagtgccccacacccacgtcttctatctcacgcagagttttcggtttggtgtggaaatagcttatgtgggagctactatcttggatgtttgcaagagagtcaggaaaaagactttggttggaggaaaccatcagagtggcattagaggtgacgcaaaggggcaagtggccttgttgtcccggaccaacgccaacgtgtttgatgaggccgtacgggtgacggaaggggaattcccttcaaggatacatttgattggggggattaaatcatttggattggacagaatcattgatatttggatccttcttcagccagaggaagaacggaggaaacaaaacctcgtcattaaagacaaatttatcagaagatgggtgcacaaagaaggctttagtggcttcaagaggtatgtgaccgctgccgaggacaaggagcttgaagccaagatcgcagttgttgaaaagtataacatcaggattccagagctggtgcaaaggatagaaaaatgccatatagaagatttggactttgcagagatggagtctcaccatgttggccaggctggtctcgaactcccaacctcagagtacattctgggcactgtgcacaaagccaaaggcctggagtttgacactgtgcatgttttggatgattttgtgaaagtgccttgtgcccggcataacctgccccagcttccgcacttcagagttgagtcattttctgaggatgaatggaatttactgtatgttgcagtaactcgagccaagaagcgtctcatcatgaccaaatcattggaaaacattttgactttggctggggagtacttcttgcaagcagagctgacaagcaacgtcttaaaaacaggcgtggtgcgctgctgcgtgggacagtgcaacaatgccatccctgttgacaccgtccttaccatgaagaagctgcccatcacctatagcaacaggaaggaaaacaaggggggctacctctgccactcctgtgcggagcagcgcatcgggcccctggcgttcctgacagcctccccggagcaggtgcgcgccatggagcgcactgtggagaacatcgtactgccccggcatgaggccctgctcttcctcgtcttctgaggacaaggcgcacgttctccgcagtgcagagcagcttgccgaggaccccgcgtgaagaaagccagcgaggggggcttctgctccctgagactctgggttcacccacagcactttctgaggaagaggacaccagcccaagctggacctgccatttctccactccctacagacagccagtctccacttgcctcccctctggatgtatctggtcagggaagtgggggatgttcttttgataaaaaaaaaaaaaaaaatttatgtatttaaacttttattacaagatttcaattaaacaggcaccatagcactggcat

SEQ ID NO: 133697 - DNA, 2130 bp, Homo sapiens; identical to SEQ ID NO: 133601
  Payload ID: 6136
  Gene Symbol:
  Gene Name: FBXO27
  ENST ID: ENST00000635513
  CDS Start-End: 50-901

SEQ ID NO: 133698 - DNA, 508 bp, Homo sapiens; identical to SEQ ID NO: 133604
  Payload ID: 6136
  Gene Symbol:
  Gene Name: FBXO27
  ENST ID: ENST00000635643
  CDS Start-End: 109-508

SEQ ID NO: 133699 - DNA, 300 bp, Homo sapiens; identical to SEQ ID NO: 133603
  Payload ID: 6136
  Gene Symbol:
  Gene Name: FBXO27
  ENST ID: ENST00000635718
  CDS Start-End: 1-300

SEQ ID NO: 133700 - DNA, 2330 bp, Homo sapiens; identical to SEQ ID NO: 133600
  Payload ID: 6136
  Gene Symbol:
  Gene Name: FBXO27
  ENST ID: ENST00000635475
  CDS Start-End: 121-972

SEQ ID NO: 133701 - DNA, 1557 bp, Homo sapiens; identical to SEQ ID NO: 133602
  Payload ID: 6136
  Gene Symbol:
  Gene Name: FBXO27
  ENST ID: ENST00000634370
  CDS Start-End: 127-975

SEQ ID NO: 133702 - DNA, 537 bp, Homo sapiens
  Payload ID: 6137
  Gene Symbol: FCAR
  Gene Name: Fc fragment of IgA receptor
  Uniprot ID: P24071
  ENST ID: ENST00000353758
  CDS Start-End: 1-537
atggaccccaaacagaccaccctcctgtgtcttggcttgtatggcaaacccttcctctctgcagatcggggtctggtgttgatgccaggagagaatatttccctcacgtgcagctcagcacacatcccatttgatagattttcactggccaaggagggagaactttctctgccacagcaccaaagtggggaacacccggccaacttctctttgggtcctgtggacctcaatgtctcagggatctacaggtgctacggttggtacaacaggagcccctacctgtggtccttccccagtaatgccttggagcttgtggtcacagactccatccaccaagattacacgacgcagaacttgatccgcatggccgtggcaggactggtcctcgtggctctcttggccatactggttgaaaattggcacagccatacggcactgaacaaggaagcctcggcagatgtggctgaaccgagctggagccaacagatgtgtcagccaggattgacctttgcacgaacaccaagtgtctgcaagtaa

SEQ ID NO: 133703 - DNA, 608 bp, Homo sapiens
  Payload ID: 6137
  Gene Symbol: FCAR
  Gene Name: Fc fragment of IgA receptor
  Uniprot ID: P24071
  ENST ID: ENST00000345937
  CDS Start-End: 6-581
gcacgatggaccccaaacagaccaccctcctgtgtcttgtgctctgtctgggccagaggattcaggcacaggaaggggactttcccatgcctttcatatctgccaaatcgagtcctgtgattcccttggatggatctgtgaaaatccagtgccaggccattcgtgaagcttacctgacccagctgatgatcataaaaaactccacgtaccgagagataggcagaagactgaagttttggaatgagactgatcctgagttcgtcattgaccacatggacgcaaacaaggcagggcgctatcagtgccaatataggatagggcactacaggttccggtacagtgacaccctggagctggtagtgacagactccatccaccaagattacacgacgcagaacttgatccgcatggccgtggcaggactggtcctcgtggctctcttggccatactggttgaaaattggcacagccatacggcactgaacaaggaagcctcggcagatgtggctgaaccgagctggagccaacagatgtgtcagccaggattgacctttgcacgaacaccaagtgtctgcaagtaaacacctggaggtgaaggcagagaggag

SEQ ID NO: 133704 - DNA, 1483 bp, Homo sapiens
  Payload ID: 6137
  Gene Symbol: FCAR
  Gene Name: Fc fragment of IgA receptor
  Uniprot ID: P24071
  ENST ID: ENST00000355524
  CDS Start-End: 11-874
tgtcagcacgatggaccccaaacagaccaccctcctgtgtcttgtgctctgtctgggccagaggattcaggcacaggaaggggactttcccatgcctttcatatctgccaaatcgagtcctgtgattcccttggatggatctgtgaaaatccagtgccaggccattcgtgaagcttacctgacccagctgatgatcataaaaaactccacgtaccgagagataggcagaagactgaagttttggaatgagactgatcctgagttcgtcattgaccacatggacgcaaacaaggcagggcgctatcagtgccaatataggatagggcactacaggttccggtacagtgacaccctggagctggtagtgacaggcttgtatggcaaacccttcctctctgcagatcggggtctggtgttgatgccaggagagaatatttccctcacgtgcagctcagcacacatcccatttgatagattttcactggccaaggagggagaactttctctgccacagcaccaaagtggggaacacccggccaacttctctttgggtcctgtggacctcaatgtctcagggatctacaggtgctacggttggtacaacaggagcccctacctgtggtccttccccagtaatgccttggagcttgtggtcacagactccatccaccaagattacacgacgcagaacttgatccgcatggccgtggcaggactggtcctcgtggctctcttggccatactggttgaaaattggcacagccatacggcactgaacaaggaagcctcggcagatgtggctgaaccgagctggagccaacagatgtgtcagccaggattgacctttgcacgaacaccaagtgtctgcaagtaaacacctggaggtgaaggcagagaggagccaggactgtggagtccgacaaagctacttgaaggacacaagagagaaaagctcactaagaagcttgaatctacttttttttttttttgagacagagtctggctctgtcacccaggctggagtgcagtggagcaatctcggctcattgaacctcttgggttcaagtgattcttgtgcctcagcctcccaagtagctggaattacaggcacataccactgcacccagctaatttttgtatttttagtagagatggggtttcactgtgttggccaggctggtctcgaactcctgacctcaggtgatccacccaccttggcctcccaaagtgctgagattataggcatgagccaccacgcctggccagatgcatgttcaaaccaatcaaatggtgttttcttatgcaggactgatcgatttgcacccacctttctgcacataagttatggttttccatcttatctgtcttctgattttttatatcctgtttaatttcttccttcattgttcttctctttttttatttattttatttatttttatttttatttttatttgagacagagtctcactctgttgcccag

SEQ ID NO: 133705 - DNA, 828 bp, Homo sapiens
  Payload ID: 6137
  Gene Symbol: FCAR
  Gene Name: Fc fragment of IgA receptor
  Uniprot ID: P24071
  ENST ID: ENST00000359272
  CDS Start-End: 1-828
atggaccccaaacagaccaccctcctgtgtcttggggactttcccatgcctttcatatctgccaaatcgagtcctgtgattcccttggatggatctgtgaaaatccagtgccaggccattcgtgaagcttacctgacccagctgatgatcataaaaaactccacgtaccgagagataggcagaagactgaagttttggaatgagactgatcctgagttcgtcattgaccacatggacgcaaacaaggcagggcgctatcagtgccaatataggatagggcactacaggttccggtacagtgacaccctggagctggtagtgacaggcttgtatggcaaacccttcctctctgcagatcggggtctggtgttgatgccaggagagaatatttccctcacgtgcagctcagcacacatcccatttgatagattttcactggccaaggagggagaactttctctgccacagcaccaaagtggggaacacccggccaacttctctttgggtcctgtggacctcaatgtctcagggatctacaggtgctacggttggtacaacaggagcccctacctgtggtccttccccagtaatgccttggagcttgtggtcacagactccatccaccaagattacacgacgcagaacttgatccgcatggccgtggcaggactggtcctcgtggctctcttggccatactggttgaaaattggcacagccatacggcactgaacaaggaagcctcggcagatgtggctgaaccgagctggagccaacagatgtgtcagccaggattgacctttgcacgaacaccaagtgtctgcaagtaa

SEQ ID NO: 133706 - DNA, 754 bp, Homo sapiens
  Payload ID: 6137
  Gene Symbol: FCAR
  Gene Name: Fc fragment of IgA receptor
  Uniprot ID: P24071
  ENST ID: ENST00000391723
  CDS Start-End: 1-630
atggaccccaaacagaccaccctcctgtgtcttggggactttcccatgcctttcatatctgccaaatcgagtcctgtgattcccttggatggatctgtgaaaatccagtgccaggccattcgtgaagcttacctgacccagctgatgatcataaaaaactccacgtaccgagagataggcagaagactgaagttttggaatgagactgatcctgagttcgtcattgaccacatggacgcaaacaaggcagggcgctatcagtgccaatataggatagggcactacaggttccggtacagtgacaccctggagctggtagtgacaggcttgtatggcaaacccttcctctctgcagatcggggtctggtgttgatgccaggagagaatatttccctcacgtgcagctcagcacacatcccatttgatagattttcactggccaaggagggagaactttctctgccacagcaccaaagtggggaacacccggccaacttctctttgggtcctgtggacctcaatgtctcagggatctacagactccatccaccaagattacacgacgcagaacttgatccgcatggccgtggcaggactggtcctcgtggctctcttggccatactggttgaaaattggcacagccatacggcactgaacaaggaagcctcggcagatgtggctgaaccgagctggagccaacagatgtgtcagccaggattgacctttgcacgaacaccaagtgtctgcaagtaa

SEQ ID NO: 133707 - DNA, 762 bp, Homo sapiens
  Payload ID: 6137
  Gene Symbol: FCAR
  Gene Name: Fc fragment of IgA receptor
  Uniprot ID: P24071
  ENST ID: ENST00000391724
  CDS Start-End: 1-762
atggaccccaaacagaccaccctcctgtgtcttggggactttcccatgcctttcatatctgccaaatcgagtcctgtgattcccttggatggatctgtgaaaatccagtgccaggccattcgtgaagcttacctgacccagctgatgatcataaaaaactccacgtaccgagagataggcagaagactgaagttttggaatgagactgatcctgagttcgtcattgaccacatggacgcaaacaaggcagggcgctatcagtgccaatataggatagggcactacaggttccggtacagtgacaccctggagctggtagtgacaggcttgtatggcaaacccttcctctctgcagatcggggtctggtgttgatgccaggagagaatatttccctcacgtgcagctcagcacacatcccatttgatagattttcactggccaaggagggagaactttctctgccacagcaccaaagtggggaacacccggccaacttctctttgggtcctgtggacctcaatgtctcagggatctacaggtgctacgactccatccaccaagattacacgacgcagaacttgatccgcatggccgtggcaggactggtcctcgtggctctcttggccatactggttgaaaattggcacagccatacggcactgaacaaggaagcctcggcagatgtggctgaaccgagctggagccaacagatgtgtcagccaggattgacctttgcacgaacaccaagtgtctgcaagtaa

SEQ ID NO: 133708 - DNA, 830 bp, Homo sapiens
  Payload ID: 6137
  Gene Symbol: FCAR
  Gene Name: Fc fragment of IgA receptor
  Uniprot ID: P24071
  ENST ID: ENST00000391725
  CDS Start-End: 6-803
gcacgatggaccccaaacagaccaccctcctgtgtcttgtgctctgtctgggccagaggattcaggcacaggaaggggactttcccatgcctttcatatctgccaaatcgagtcctgtgattcccttggatggatctgtgaaaatccagtgccaggccattcgtgaagcttacctgacccagctgatgatcataaaaaactccacgtaccgagagataggcagaagactgaagttttggaatgagactgatcctgagttcgtcattgaccacatggacgcaaacaaggcagggcgctatcagtgccaatataggatagggcactacaggttccggtacagtgacaccctggagctggtagtgacaggcttgtatggcaaacccttcctctctgcagatcggggtctggtgttgatgccaggagagaatatttccctcacgtgcagctcagcacacatcccatttgatagattttcactggccaaggagggagaactttctctgccacagcaccaaagtggggaacacccggccaacttctctttgggtcctgtggacctcaatgtctcagggatctacaggtgctacgactccatccaccaagattacacgacgcagaacttgatccgcatggccgtggcaggactggtcctcgtggctctcttggccatactggttgaaaattggcacagccatacggcactgaacaaggaagcctcggcagatgtggctgaaccgagctggagccaacagatgtgtcagccaggattgacctttgcacgaacaccaagtgtctgcaagtaaacacctggaggtgaaggcagagaggag

SEQ ID NO: 133709 - DNA, 609 bp, Homo sapiens
  Payload ID: 6137
  Gene Symbol: FCAR
  Gene Name: Fc fragment of IgA receptor
  Uniprot ID: P24071
  ENST ID: ENST00000391726
  CDS Start-End: 43-582
gcattgaaaggagagcaacggggctgaggccgtgtcagcacgatggaccccaaacagaccaccctcctgtgtcttggggactttcccatgcctttcatatctgccaaatcgagtcctgtgattcccttggatggatctgtgaaaatccagtgccaggccattcgtgaagcttacctgacccagctgatgatcataaaaaactccacgtaccgagagataggcagaagactgaagttttggaatgagactgatcctgagttcgtcattgaccacatggacgcaaacaaggcagggcgctatcagtgccaatataggatagggcactacaggttccggtacagtgacaccctggagctggtagtgacagactccatccaccaagattacacgacgcagaacttgatccgcatggccgtggcaggactggtcctcgtggctctcttggccatactggttgaaaattggcacagccatacggcactgaacaaggaagcctcggcagatgtggctgaaccgagctggagccaacagatgtgtcagccaggattgacctttgcacgaacaccaagtgtctgcaagtaaacacctggaggtgaaggcagagaggag

SEQ ID NO: 133710 - DNA, 1432 bp, Homo sapiens
  Payload ID: 6137
  Gene Symbol: FCAR
  Gene Name: Fc fragment of IgA receptor
  Uniprot ID: P24071
  ENST ID: ENST00000469767
  CDS Start-End: 11-730
tgtcagcacgatggaccccaaacagaccaccctcctgtgtcttgtgctctgtctgggccagaggattcaggcacaggaaggggactttcccatgcctttcatatctgccaaatcgagtcctgtgattcccttggatggatctgtgaaaatccagtgccaggccattcgtgaagcttacctgacccagctgatgatcataaaaaactccacgtaccgagagataggcagaagactgaagttttggaatgagactgatcctgagttcgtcattgaccacatggacgcaaacaaggcagggcgctatcagtgccaatataggatagggcactacaggttccggtacagtgacaccctggagctggtagtgacaggcttgtatggcaaacccttcctctctgcagatcggggtctggtgttgatgccaggagagaatatttccctcacgtgcagctcagcacacatcccatttgatagattttcactggccaaggagggagaactttctctgccacagcaccaaagtggggaacacccggccaacttctctttgggtcctgtggacctcaatgtctcagggatctacaggtgctacggttggtacaacaggagcccctacctgtggtccttccccagtaatgccttggagcttgtggtcacaggtaggtaccgcccagtccagccctgtgtctgggttggctgtccagggccttgccaccgggcaggaatatgaagacgtgcactgagagtgaagtgaagagaggcaaaggctctcactccaggacagtggagagagaaaggcttccccaccacactttccgctttcacttcctcgctagagttctccagacagggttcattgaaaacttagtctgtggagaacagaagggctaactcagtttgtttcattttatttatttcattttattttccgggatagagtcttgctctttcgccaaggctggagtgcagtggcacgatctcgactcactgcaaccttcgcctcccaggttcaagcaattctcctgcctcagcctcctgagtagctgggaccacacagacagggtttcaccatgttggccaggctggtctcgaactcccgacctcaggtgatccacctgcctcggcctcccaaagtgctgggattacaggcgtgagccaccgcgcctggccaggctgcacacattcttattaggattccaccttgttctggtgttgtagagatgtgattaggtatttagtgaattcaccaagtgaggagagaatgaaaagaaaacacaacctgcctggccgggcgtggtggcgtgagcctgtcgtcccagctactcaggaggctgaggcaggagaatcacttgaacccaggaggcagctgttgcagtgagccaagatcacgccattgcactccagcctgggtgacagaacgagactccacctc

SEQ ID NO: 133711 - DNA, 1063 bp, Homo sapiens
  Payload ID: 6137
  Gene Symbol: FCAR
  Gene Name: Fc fragment of IgA receptor
  Uniprot ID: P24071
  ENST ID: ENST00000488066
  CDS Start-End: 11-694
tgtcagcacgatggaccccaaacagaccaccctcctgtgtcttggggactttcccatgcctttcatatctgccaaatcgagtcctgtgattcccttggatggatctgtgaaaatccagtgccaggccattcgtgaagcttacctgacccagctgatgatcataaaaaactccacgtaccgagagataggcagaagactgaagttttggaatgagactgatcctgagttcgtcattgaccacatggacgcaaacaaggcagggcgctatcagtgccaatataggatagggcactacaggttccggtacagtgacaccctggagctggtagtgacaggcttgtatggcaaacccttcctctctgcagatcggggtctggtgttgatgccaggagagaatatttccctcacgtgcagctcagcacacatcccatttgatagattttcactggccaaggagggagaactttctctgccacagcaccaaagtggggaacacccggccaacttctctttgggtcctgtggacctcaatgtctcagggatctacaggtgctacggttggtacaacaggagcccctacctgtggtccttccccagtaatgccttggagcttgtggtcacaggtaggtaccgcccagtccagccctgtgtctgggttggctgtccagggccttgccaccgggcaggaatatgaagacgtgcactgagagtgaagtgaagagaggcaaaggctctcactccaggacagtggagagagaaaggcttccccaccacactttccgctttcacttcctcgctagagttctccagacagggttcattgaaaacttagtctgtggagaacagaagggctaactcagtttgtttcattttatttatttcattttattttccgggatagagtcttgctctttcgccaaggctggagtgcagtggcacgatctcgactcactgcaaccttcgcctcccaggagaatcacttgaacccaggaggcagctgttgcagtgagccaagatcacgccattgcactccagcctgggtgacagaacgagactccacctc

SEQ ID NO: 133712 - DNA, 1063 bp, Homo sapiens; identical to SEQ ID NO: 133711
  Payload ID: 6137
  Gene Symbol: FCAR
  Gene Name: Fc fragment of IgA receptor
  Uniprot ID: P24071
  ENST ID: ENST00000620397
  CDS Start-End: 11-694

SEQ ID NO: 133713 - DNA, 754 bp, Homo sapiens; identical to SEQ ID NO: 133706
  Payload ID: 6137
  Gene Symbol: FCAR
  Gene Name: Fc fragment of IgA receptor
  Uniprot ID: P24071
  ENST ID: ENST00000610340
  CDS Start-End: 1-630

SEQ ID NO: 133714 - DNA, 754 bp, Homo sapiens
  Payload ID: 6137
  Gene Symbol: FCAR
  Gene Name: Fc fragment of IgA receptor
  Uniprot ID: P24071
  ENST ID: ENST00000622491
  CDS Start-End: 1-630
atggaccccaaacagaccaccctcctgtgtcttggggactttcccatgcctttcatatctgccaaatcgagtcctgtgattcccttggatggatctgtgaaaatccagtgccaggccattcgtgaagcttacctgacccagctgatgatcataaaaaactccacgtaccgagagataggcagaagactgaagttttggaatgagactgatcctgagttcgtcattgaccacatggacgcaaacaaggcagggcgctatcagtgccaatataggatagggcactacagattccggtacagtgacaccctggagctggtagtgacaggcttgtatggcaaacccttcctctctgcagatcggggtctggtgttgatgccaggagagaatatttccctcacgtgcagctcagcacacatcccatttgatagattttcactggccaaggagggagaactttctctgccacagcaccaaagtggggaacacccggccaacttctctttgggtcctgtggacctcaatgtctcagggatctacagactccatccaccaagattacacgacgcagaacttgatccgcatggccgtggcaggactggtcctcgtggctctcttggccatactggttgaaaattggcacagccatacggcactgaacaaggaagcctcggcagatgtggctgaaccgagctggagccaacagatgtgtcagccaggattgacctttgcacgaacaccaagtgtctgcaagtaa

SEQ ID NO: 133715 - DNA, 828 bp, Homo sapiens; identical to SEQ ID NO: 133705
  Payload ID: 6137
  Gene Symbol: FCAR
  Gene Name: Fc fragment of IgA receptor
  Uniprot ID: P24071
  ENST ID: ENST00000615040
  CDS Start-End: 1-828

SEQ ID NO: 133716 - DNA, 537 bp, Homo sapiens; identical to SEQ ID NO: 133702
  Payload ID: 6137
  Gene Symbol: FCAR
  Gene Name: Fc fragment of IgA receptor
  Uniprot ID: P24071
  ENST ID: ENST00000622470
  CDS Start-End: 1-537

SEQ ID NO: 133717 - DNA, 830 bp, Homo sapiens; identical to SEQ ID NO: 133708
  Payload ID: 6137
  Gene Symbol: FCAR
  Gene Name: Fc fragment of IgA receptor
  Uniprot ID: P24071
  ENST ID: ENST00000614893
  CDS Start-End: 6-803

SEQ ID NO: 133718 - DNA, 2476 bp, Homo sapiens
  Payload ID: 6137
  Gene Symbol: FCAR
  Gene Name: Fc fragment of IgA receptor
  ENST ID: ENST00000612836
  CDS Start-End: 56-919
atcctgctaatgtgcattgaaaggagagcaacggggctgaggccgtgtcagcacgatggaccccaaacagaccaccctcctgtgtcttgtgctctgtctgggccagaggattcaggcacaggaaggggactttcccatgcctttcatatctgccaaatcgagtcctgtgattcccttggatggatctgtgaaaatccagtgccaggccattcgtgaagcttacctgacccagctgatgatcataaaaaactccacgtaccgagagataggcagaagactgaagttttggaatgagactgatcctgagttcgtcattgaccacatggacgcaaacaaggcagggcgctatcagtgccaatataggatagggcactacaggttccggtacagtaacaccctggagctggtagtgacaggcttgtatggcaaacccttcctctctgcagatcggggtctggtgttgatgccaggagagaatatttccctcacgtgcagctcagcacacatcccatttgatagattttcactggccaaggagggagaactttctctgccacagcaccaaagtggggaacacccggccaacttctctttgggtcctgtggacctcaatgtctcagggatctacaggtgctacggttggtacaacaggagcccctacctgtggtccttccccagtaatgccttggagcttgtggtcacagactccatccaccaagattacacgacgcagaacttgatccgcatggccgtggcaggactggtcctcgtggctctcttggccatactggttgaaaattggcacagccatacggcactgaacaaggaagcctcggcagatgtggctgaaccgagctggagccaacagatgtgtcagccaggattgacctttgcacgaacaccaagtgtctgcaagtaaacacctggaggtgaaggcagagaggagccaggactgtggagtccgacaaagctacttgaaggacacaagagagaaaagctcactaagaagcttgaatctacttttttttttttttgagacagagtctggctctgtcacccaggctggagtgcagtggagcaatctcggctcattgaacctcttgggttcaagtgattcttgtgcctcagcctcccaagtagctggaattacaggcacataccactgcacccagctaatttttgtatttttagtagagatggggtttcactgtgttggccaggctggtctcgaactcctgacctcaggtgatccacccaccttggcctcccaaagtgctgagattataggcatgagccaccacgcctggccagatgcatgttcaaaccaatcaaatggtgttttcttatgcaggactgatcgatttgcacccacctttctgcacataagttatggttttccatcttatctgtcttctgattttttatatcctgtttaatttcttccttcattgttcttctctttttttatttattttatttatttttatttttatttttatttgagacagagtctcactctgttgcccaggctggagtgcagtggcacgatctcggctcactgcaacctctgcctcctgggttcaagtgattctcctgcctcggcctcccaagtagctgggattacaggctcccaccatcacgcccagctacttttacagtatttttagtagagacggggtttcatcacattggccaagctggtctcaaacttctgacctcgtgatctgcccgcctcggcctcccaaagtgctgggattacagatgtgagccactgcgcccagccttctttttatatttttaaatgtgtcttccccaaatataaatggttggtaagcatgccaaatatattcaataacccccctcctttatttttttttgttgaagtgaggctctccctatgttgcctaagctggtcttgaactcctggtctcaagcaatcctcctacctcagcctcctgctgtgttcatctacaaattgataagagtgaaagtcataatcctacaggaggattaccctatttatttcacaaaccctatttctaccggattttcatacaaggaatacaggcatgtgtttcacctcattaatttattttttcacttagttttgatgatattcacatatattatcaagtgtgcaaacattaaattcttgtgtacaaaactcaaatggtcttccaaataattccccattcttttttcttataaactttcacagctttacccttgacagactttactcaaggaaatctaagttggtcatatgtggctctttcactgattgctatttacttcattgtccagtagcttatgtatgaaaatataattataaaatgtaagggtcctacttccagtgaaactgaagggacttaggcccacttttatcctttactgagagcttatctctacttgataaaatttctactgtattcttggcttaactcaggtcctgtgattaaaaaaaaaatgcaaagta

SEQ ID NO: 133719 - DNA, 762 bp, Homo sapiens
  Payload ID: 6137
  Gene Symbol: FCAR
  Gene Name: Fc fragment of IgA receptor
  Uniprot ID: P24071
  ENST ID: ENST00000615937
  CDS Start-End: 1-762
atggaccccaaacagaccaccctcctgtgtcttggggactttcccatgcctttcatatctgccaaatcgagtcctgtgattcccttggatggatctgtgaaaatccagtgccaggccattcgtgaagcttacctgacccagctgatgatcataaaaaactccacgtaccgagagataggcagaagactgaagttttggaatgagactgatcctgagttcgtcattgaccacatggacgcaaacaaggcagggcgctatcagtgccaatataggatagggcactacagattccggtacagtgacaccctggagctggtagtgacaggcttgtatggcaaacccttcctctctgcagatcggggtctggtgttgatgccaggagagaatatttccctcacgtgcagctcagcacacatcccatttgatagattttcactggccaaggagggagaactttctctgccacagcaccaaagtggggaacacccggccaacttctctttgggtcctgtggacctcaatgtctcagggatctacaggtgctacgactccatccaccaagattacacgacgcagaacttgatccgcatggccgtggcaggactggtcctcgtggctctcttggccatactggttgaaaattggcacagccatacggcactgaacaaggaagcctcggcagatgtggctgaaccgagctggagccaacagatgtgtcagccaggattgacctttgcacgaacaccaagtgtctgcaagtaa

SEQ ID NO: 133720 - DNA, 830 bp, Homo sapiens; identical to SEQ ID NO: 133708
  Payload ID: 6137
  Gene Symbol: FCAR
  Gene Name: Fc fragment of IgA receptor
  Uniprot ID: P24071
  ENST ID: ENST00000619414
  CDS Start-End: 6-803

SEQ ID NO: 133721 - DNA, 608 bp, Homo sapiens; identical to SEQ ID NO: 133703
  Payload ID: 6137
  Gene Symbol: FCAR
  Gene Name: Fc fragment of IgA receptor
  Uniprot ID: P24071
  ENST ID: ENST00000612150
  CDS Start-End: 6-581

SEQ ID NO: 133722 - DNA, 546 bp, Homo sapiens
  Payload ID: 6137
  Gene Symbol: FCAR
  Gene Name: Fc fragment of IgA receptor
  Uniprot ID: P24071
  ENST ID: ENST00000620179
  CDS Start-End: 1-537
atggaccccaaacagaccaccctcctgtgtcttggcttgtatggcaaacccttcctctctgcagatcggggtctggtgttgatgccaggagagaatatttccctcacgtgcagctcagcacacatcccatttgatagattttcactggccaaggagggagaactttctctgccacagcaccaaagtggggaacacccggccaacttctctttgggtcctgtggacctcaatgtctcagggatctacaggtgctacggttggtacaacaggagcccctacctgtggtccttccccagtaatgccttggagcttgtggtcacagactccatccaccaagattacacgacgcagaacttgatccgcatggccgtggcaggactggtcctcgtggctctcttggccatactggttgaaaattggcacagccatacggcactgaacaaggaagcctcggcagatgtggctgaaccgagctggagccaacagatgtgtcagccaggattgacctttgcacgaacaccaagtgtctgcaagtaaacacctgga

SEQ ID NO: 133723 - DNA, 771 bp, Homo sapiens
  Payload ID: 6137
  Gene Symbol: FCAR
  Gene Name: Fc fragment of IgA receptor
  ENST ID: ENST00000622014
  CDS Start-End: 1-762
atggaccccaaacagaccaccctcctgtgtcttggggactttcccatgcctttcatatctgccaaatcgagtcctgtgattcccttggatggatctgtgaaaatccagtgccaggccattcgtgaagcttacctgacccagctgatgatcataaaaaactccacgtaccgagagataggcagaagactgaagttttggaatgagactgatcctgagttcgtcattgaccacatggacgcaaacaaggcagggcgctatcagtgccaatataggatagggcactacaggttccggtacagtaacaccctggagctggtagtgacaggcttgtatggcaaacccttcctctctgcagatcggggtctggtgttgatgccaggagagaatatttccctcacgtgcagctcagcacacatcccatttgatagattttcactggccaaggagggagaactttctctgccacagcaccaaagtggggaacacccggccaacttctctttgggtcctgtggacctcaatgtctcagggatctacaggtgctacgactccatccaccaagattacacgacgcagaacttgatccgcatggccgtggcaggactggtcctcgtggctctcttggccatactggttgaaaattggcacagccatacggcactgaacaaggaagcctcggcagatgtggctgaaccgagctggagccaacagatgtgtcagccaggattgacctttgcacgaacaccaagtgtctgcaagtaaacacctgga

SEQ ID NO: 133724 - DNA, 395 bp, Homo sapiens
  Payload ID: 6137
  Gene Symbol: FCAR
  Gene Name: Fc fragment of IgA receptor
  ENST ID: ENST00000615192
  CDS Start-End: 43-395
gcattgaaaggagagcaacggggctgaggccgtgtcagcacgatggaccccaaacagaccaccctcctgtgtcttggggactttcccatgcctttcatatctgccaaatcgagtcctgtgattcccttggatggatctgtgaaaatccagtgccaggccattcgtgaagcttacctgacccagctgatgatcataaaaaactccacgtaccgagagataggcagaagactgaagttttggaatgagactgatcctgagttcgtcattgaccacatggacgcaaacaaggcagggcgctatcagtgccaatataggatagggcactacaggttccggtacagtaacaccctggagctggtagtgacagactccatccaccaagattacacgacgca

SEQ ID NO: 133725 - DNA, 754 bp, Homo sapiens; identical to SEQ ID NO: 133706
  Payload ID: 6137
  Gene Symbol: FCAR
  Gene Name: Fc fragment of IgA receptor
  Uniprot ID: P24071
  ENST ID: ENST00000612803
  CDS Start-End: 1-630

SEQ ID NO: 133726 - DNA, 1483 bp, Homo sapiens; identical to SEQ ID NO: 133704
  Payload ID: 6137
  Gene Symbol: FCAR
  Gene Name: Fc fragment of IgA receptor
  Uniprot ID: P24071
  ENST ID: ENST00000613199
  CDS Start-End: 11-874

SEQ ID NO: 133727 - DNA, 536 bp, Homo sapiens
  Payload ID: 6137
  Gene Symbol: FCAR
  Gene Name: Fc fragment of IgA receptor
  ENST ID: ENST00000622349
  CDS Start-End: 1-429
atggaccccaaacagaccaccctcctgtgtcttgtgctctgtctgggccagaggattcaggcacaggaaggcttgtatggcaaacccttcctctctgcagatcggggtctggtgttgatgccaggagagaatatttccctcacgtgcagctcagcacacatcccatttgatagattttcactggccaaggagggagaactttctctgccacagcaccaaagtggggaacacccggccaacttctctttgggtcctgtggacctcaatgtctcagggatctacaggtgctacggttggtacaacaggagcccctacctgtggtccttccccagtaatgccttggagcttgtggtcacaggtaggtaccgcccagtccagccctgtgtctgggttggctgtccagggccttgccaccgggcaggaatatgaagacgtgcactgagagtgaagtgaagagaggcaaaggctctcactccaggacagtggagagagaaaggcttccccaccacactttccgctttcacttcctcgctaga

SEQ ID NO: 133728 - DNA, 1063 bp, Homo sapiens
  Payload ID: 6137
  Gene Symbol: FCAR
  Gene Name: Fc fragment of IgA receptor
  Uniprot ID: P24071
  ENST ID: ENST00000621417
  CDS Start-End: 11-694
tgtcagcacgatggaccccaaacagaccaccctcctgtgtcttggggactttcccatgcctttcatatctgccaaatcgagtcctgtgattcccttggatggatctgtgaaaatccagtgccaggccattcgtgaagcttacctgacccagctgatgatcataaaaaactccacgtaccgagagataggcagaagactgaagttttggaatgagactgatcctgagttcgtcattgaccacatggacgcaaacaaggcagggcgctatcagtgccaatataggatagggcactacagattccggtacagtgacaccctggagctggtagtgacaggcttgtatggcaaacccttcctctctgcagatcggggtctggtgttgatgccaggagagaatatttccctcacgtgcagctcagcacacatcccatttgatagattttcactggccaaggagggagaactttctctgccacagcaccaaagtggggaacacccggccaacttctctttgggtcctgtggacctcaatgtctcagggatctacaggtgctacggttggtacaacaggagcccctacctgtggtccttccccagtaatgccttggagcttgtggtcacaggtaggtaccgcccagtccagccctgtgtctgggttggctgtccagggccttgccaccgggcaggaatatgaagacgtgcactgagagtgaagtgaagagaggcaaaggctctcactccaggacagtggagagagaaaggcttccccaccacactttccgctttcacttcctcgctagagttctccagacagggttcattgaaaacttagtctgtggagaacagaagggctaactcagtttgtttcattttatttatttcattttattttccgggatagagtcttgctctttcgccaaggctggagtgcagtggcacgatctcgactcactgcaaccttcgcctcccaggagaatcacttgaacccaggaggcagctgttgcagtgagccaagatcacgccattgcactccagcctgggtgacagaacgagactccacctc

SEQ ID NO: 133729 - DNA, 1080 bp, Homo sapiens
  Payload ID: 6137
  Gene Symbol: FCAR
  Gene Name: Fc fragment of IgA receptor
  Uniprot ID: P24071
  ENST ID: ENST00000616969
  CDS Start-End: 11-694
tgtcagcacgatggaccccaaacagaccaccctcctgtgtcttggggactttcccatgcctttcatatctgccaaatcgagtcctgtgattcccttggatggatctgtgaaaatccagtgccaggccattcgtgaagcttacctgacccagctgatgatcataaaaaactccacgtaccgagagataggcagaagactgaagttttggaatgagactgatcctgagttcgtcattgaccacatggacgcaaacaaggcagggcgctatcagtgccaatataggatagggcactacaggttccggtacagtgacaccctggagctggtagtgacaggcttgtatggcaaacccttcctctctgcagatcggggtctggtgttgatgccaggagagaatatttccctcacgtgcagctcagcacacatcccatttgatagattttcactggccaaggagggagaactttctctgccacagcaccaaagtggggaacacccggccaacttctctttgggtcctgtggacctcaatgtctcagggatctacaggtgctacggttggtacaacaggagcccctacctgtggtccttccccagtaatgccttggagcttgtggtcacaggtaggtaccgcccagtccagccctgtgtctgggttggctgtccagggccttgccaccgggcaggaatatgaagacgtgcactgagagtgaagtgaagagaggcaaaggctctcactccaggacagtggagagagaaaggcttccccaccacactttccgctttcacttcctcgctagagttctccagacagggttcattgaaaacttagtctgtggagaacagaagggctaactcagtttgtttcattttatttatttcattttattttccgggatagagtcttgctctttcgccaaggctggagtgcagtggcacgatctcgactcactgcaaccttcgcctcccaggagaatcacttgaacccaggaggcagctgttgcagtgagccaagatcacgccattgcactccagcctgggtgacagaacgagactccacctcaagaaaaaaaaaaaaaa

SEQ ID NO: 133730 - DNA, 762 bp, Homo sapiens; identical to SEQ ID NO: 133707
  Payload ID: 6137
  Gene Symbol: FCAR
  Gene Name: Fc fragment of IgA receptor
  Uniprot ID: P24071
  ENST ID: ENST00000620873
  CDS Start-End: 1-762

SEQ ID NO: 133731 - DNA, 1432 bp, Homo sapiens; identical to SEQ ID NO: 133710
  Payload ID: 6137
  Gene Symbol: FCAR
  Gene Name: Fc fragment of IgA receptor
  Uniprot ID: P24071
  ENST ID: ENST00000617766
  CDS Start-End: 11-730

SEQ ID NO: 133732 - DNA, 608 bp, Homo sapiens; identical to SEQ ID NO: 133703
  Payload ID: 6137
  Gene Symbol: FCAR
  Gene Name: Fc fragment of IgA receptor
  Uniprot ID: P24071
  ENST ID: ENST00000621684
  CDS Start-End: 6-581

SEQ ID NO: 133733 - DNA, 754 bp, Homo sapiens; identical to SEQ ID NO: 133706
  Payload ID: 6137
  Gene Symbol: FCAR
  Gene Name: Fc fragment of IgA receptor
  Uniprot ID: P24071
  ENST ID: ENST00000619073
  CDS Start-End: 1-630

SEQ ID NO: 133734 - DNA, 1432 bp, Homo sapiens; identical to SEQ ID NO: 133710
  Payload ID: 6137
  Gene Symbol: FCAR
  Gene Name: Fc fragment of IgA receptor
  Uniprot ID: P24071
  ENST ID: ENST00000618658
  CDS Start-End: 11-730

SEQ ID NO: 133735 - DNA, 2431 bp, Homo sapiens
  Payload ID: 6137
  Gene Symbol: FCAR
  Gene Name: Fc fragment of IgA receptor
  Uniprot ID: P24071
  ENST ID: ENST00000622737
  CDS Start-End: 11-874
tgtcagcacgatggaccccaaacagaccaccctcctgtgtcttgtgctctgtctgggccagaggattcaggcacaggaaggggactttcccatgcctttcatatctgccaaatcgagtcctgtgattcccttggatggatctgtgaaaatccagtgccaggccattcgtgaagcttacctgacccagctgatgatcataaaaaactccacgtaccgagagataggcagaagactgaagttttggaatgagactgatcctgagttcgtcattgaccacatggacgcaaacaaggcagggcgctatcagtgccaatataggatagggcactacaggttccggtacagtgacaccctggagctggtagtgacaggcttgtatggcaaacccttcctctctgcagatcggggtctggtgttgatgccaggagagaatatttccctcacgtgcagctcagcacacatcccatttgatagattttcactggccaaggagggagaactttctctgccacagcaccaaagtggggaacacccggccaacttctctttgggtcctgtggacctcaatgtctcagggatctacaggtgctacggttggtacaacaggagcccctacctgtggtccttccccagtaatgccttggagcttgtggtcacagactccatccaccaagattacacgacgcagaacttgatccgcatggccgtggcaggactggtcctcgtggctctcttggccatactggttgaaaattggcacagccatacggcactgaacaaggaagcctcggcagatgtggctgaaccgagctggagccaacagatgtgtcagccaggattgacctttgcacgaacaccaagtgtctgcaagtaaacacctggaggtgaaggcagagaggagccaggactgtggagtccgacaaagctacttgaaggacacaagagagaaaagctcactaagaagcttgaatctacttttttttttttttgagacagagtctggctctgtcacccaggctggagtgcagtggagcaatctcggctcattgaacctcttgggttcaagtgattcttgtgcctcagcctcccaagtagctggaattacaggcacataccactgcacccagctaatttttgtatttttagtagagatggggtttcactgtgttggccaggctggtctcgaactcctgacctcaggtgatccacccaccttggcctcccaaagtgctgagattataggcatgagccaccacgcctggccagatgcatgttcaaaccaatcaaatggtgttttcttatgcaggactgatcgatttgcacccacctttctgcacataagttatggttttccatcttatctgtcttctgattttttatatcctgtttaatttcttccttcattgttcttctctttttttatttattttatttatttttatttttatttttatttgagacagagtctcactctgttgcccaggctggagtgcagtggcacgatctcggctcactgcaacctctgcctcctgggttcaagtgattctcctgcctcggcctcccaagtagctgggattgcaggctcccaccatcacgcccagctacttttacagtatttttagtagagacggggtttcatcacattggccaagctggtctcaaacttctgacctcgtgatctgcccgcctcggcctcccaaagtgctgggattacagatgtgagccactgcgcccagccttctttttatatttttaaatgtgtcttccccaaatataaatggttggtaagcatgccaaatatattcaataacccccctcctttatttttttttgttgaagtgaggctctccctatgttgcctaagctggtcttgaactcctggtctcaagcaatcctcctacctcagcctcctgctgtgttcatctacaaattgataagagtgaaagtcataatcctacaggaggattaccctatttatttcacaaaccctatttctaccggattttcatacaaggaatacaggcatgtgtttcacctcattaatttattttttcacttagttttgatgatattcacatatattatcaagtgtgcaaacattaaattcttgtgtacaaaactcaaatggtcttccaaataattccccattcttttttcttataaactttcacagctttacccttgacagactttactcaaggaaatctaagttggtcatatgtggctctttcactgattgctatttacttcattgtccagtagcttatgtatgaaaatataattataaaatgtaagggtcctacttccagtgaaactgaagggacttaggcccacttttatcctttactgagagcttatctctacttgataaaatttctactgtattcttggcttaactcaggtcctgtgattaaaaaaaaaatgcaaagta

SEQ ID NO: 133736 - DNA, 754 bp, Homo sapiens; identical to SEQ ID NO: 133706
  Payload ID: 6137
  Gene Symbol: FCAR
  Gene Name: Fc fragment of IgA receptor
  Uniprot ID: P24071
  ENST ID: ENST00000612505
  CDS Start-End: 1-630

SEQ ID NO: 133737 - DNA, 830 bp, Homo sapiens; identical to SEQ ID NO: 133708
  Payload ID: 6137
  Gene Symbol: FCAR
  Gene Name: Fc fragment of IgA receptor
  Uniprot ID: P24071
  ENST ID: ENST00000614917
  CDS Start-End: 6-803

SEQ ID NO: 133738 - DNA, 1432 bp, Homo sapiens; identical to SEQ ID NO: 133710
  Payload ID: 6137
  Gene Symbol: FCAR
  Gene Name: Fc fragment of IgA receptor
  Uniprot ID: P24071
  ENST ID: ENST00000622883
  CDS Start-End: 11-730

SEQ ID NO: 133739 - DNA, 609 bp, Homo sapiens; identical to SEQ ID NO: 133709
  Payload ID: 6137
  Gene Symbol: FCAR
  Gene Name: Fc fragment of IgA receptor
  Uniprot ID: P24071
  ENST ID: ENST00000614954
  CDS Start-End: 43-582

SEQ ID NO: 133740 - DNA, 1063 bp, Homo sapiens; identical to SEQ ID NO: 133711
  Payload ID: 6137
  Gene Symbol: FCAR
  Gene Name: Fc fragment of IgA receptor
  Uniprot ID: P24071
  ENST ID: ENST00000614689
  CDS Start-End: 11-694

SEQ ID NO: 133741 - DNA, 1063 bp, Homo sapiens; identical to SEQ ID NO: 133711
  Payload ID: 6137
  Gene Symbol: FCAR
  Gene Name: Fc fragment of IgA receptor
  Uniprot ID: P24071
  ENST ID: ENST00000618985
  CDS Start-End: 11-694

SEQ ID NO: 133742 - DNA, 537 bp, Homo sapiens; identical to SEQ ID NO: 133702
  Payload ID: 6137
  Gene Symbol: FCAR
  Gene Name: Fc fragment of IgA receptor
  Uniprot ID: P24071
  ENST ID: ENST00000622646
  CDS Start-End: 1-537

SEQ ID NO: 133743 - DNA, 762 bp, Homo sapiens; identical to SEQ ID NO: 133707
  Payload ID: 6137
  Gene Symbol: FCAR
  Gene Name: Fc fragment of IgA receptor
  Uniprot ID: P24071
  ENST ID: ENST00000622904
  CDS Start-End: 1-762

SEQ ID NO: 133744 - DNA, 1063 bp, Homo sapiens; identical to SEQ ID NO: 133711
  Payload ID: 6137
  Gene Symbol: FCAR
  Gene Name: Fc fragment of IgA receptor
  Uniprot ID: P24071
  ENST ID: ENST00000619155
  CDS Start-End: 11-694

SEQ ID NO: 133745 - DNA, 828 bp, Homo sapiens; identical to SEQ ID NO: 133705
  Payload ID: 6137
  Gene Symbol: FCAR
  Gene Name: Fc fragment of IgA receptor
  Uniprot ID: P24071
  ENST ID: ENST00000618328
  CDS Start-End: 1-828

SEQ ID NO: 133746 - DNA, 608 bp, Homo sapiens; identical to SEQ ID NO: 133703
  Payload ID: 6137
  Gene Symbol: FCAR
  Gene Name: Fc fragment of IgA receptor
  Uniprot ID: P24071
  ENST ID: ENST00000617778
  CDS Start-End: 6-581

SEQ ID NO: 133747 - DNA, 830 bp, Homo sapiens; identical to SEQ ID NO: 133708
  Payload ID: 6137
  Gene Symbol: FCAR
  Gene Name: Fc fragment of IgA receptor
  Uniprot ID: P24071
  ENST ID: ENST00000614433
  CDS Start-End: 6-803

SEQ ID NO: 133748 - DNA, 608 bp, Homo sapiens; identical to SEQ ID NO: 133703
  Payload ID: 6137
  Gene Symbol: FCAR
  Gene Name: Fc fragment of IgA receptor
  Uniprot ID: P24071
  ENST ID: ENST00000610397
  CDS Start-End: 6-581

SEQ ID NO: 133749 - DNA, 609 bp, Homo sapiens; identical to SEQ ID NO: 133709
  Payload ID: 6137
  Gene Symbol: FCAR
  Gene Name: Fc fragment of IgA receptor
  Uniprot ID: P24071
  ENST ID: ENST00000616878
  CDS Start-End: 43-582

SEQ ID NO: 133750 - DNA, 608 bp, Homo sapiens; identical to SEQ ID NO: 133703
  Payload ID: 6137
  Gene Symbol: FCAR
  Gene Name: Fc fragment of IgA receptor
  Uniprot ID: P24071
  ENST ID: ENST00000617025
  CDS Start-End: 6-581

SEQ ID NO: 133751 - DNA, 1483 bp, Homo sapiens; identical to SEQ ID NO: 133704
  Payload ID: 6137
  Gene Symbol: FCAR
  Gene Name: Fc fragment of IgA receptor
  Uniprot ID: P24071
  ENST ID: ENST00000620801
  CDS Start-End: 11-874

SEQ ID NO: 133752 - DNA, 771 bp, Homo sapiens
  Payload ID: 6137
  Gene Symbol: FCAR
  Gene Name: Fc fragment of IgA receptor
  Uniprot ID: P24071
  ENST ID: ENST00000613685
  CDS Start-End: 1-762
atggaccccaaacagaccaccctcctgtgtcttggggactttcccatgcctttcatatctgccaaatcgagtcctgtgattcccttggatggatctgtgaaaatccagtgccaggccattcgtgaagcttacctgacccagctgatgatcataaaaaactccacgtaccgagagataggcagaagactgaagttttggaatgagactgatcctgagttcgtcattgaccacatggacgcaaacaaggcagggcgctatcagtgccaatataggatagggcactacaggttccggtacagtgacaccctggagctggtagtgacaggcttgtatggcaaacccttcctctctgcagatcggggtctggtgttgatgccaggagagaatatttccctcacgtgcagctcagcacacatcccatttgatagattttcactggccaaggagggagaactttctctgccacagcaccaaagtggggaacacccggccaacttctctttgggtcctgtggacctcaatgtctcagggatctacaggtgctacgactccatccaccaagattacacgacgcagaacttgatccgcatggccgtggcaggactggtcctcgtggctctcttggccatactggttgaaaattggcacagccatacggcactgaacaaggaagcctcggcagatgtggctgaaccgagctggagccaacagatgtgtcagccaggattgacctttgcacgaacaccaagtgtctgcaagtaaacacctgga

SEQ ID NO: 133753 - DNA, 828 bp, Homo sapiens; identical to SEQ ID NO: 133705
  Payload ID: 6137
  Gene Symbol: FCAR
  Gene Name: Fc fragment of IgA receptor
  Uniprot ID: P24071
  ENST ID: ENST00000622777
  CDS Start-End: 1-828

SEQ ID NO: 133754 - DNA, 1063 bp, Homo sapiens; identical to SEQ ID NO: 133711
  Payload ID: 6137
  Gene Symbol: FCAR
  Gene Name: Fc fragment of IgA receptor
  Uniprot ID: P24071
  ENST ID: ENST00000621289
  CDS Start-End: 11-694

SEQ ID NO: 133755 - DNA, 837 bp, Homo sapiens
  Payload ID: 6137
  Gene Symbol: FCAR
  Gene Name: Fc fragment of IgA receptor
  ENST ID: ENST00000618149
  CDS Start-End: 1-828
atggaccccaaacagaccaccctcctgtgtcttggggactttcccatgcctttcatatctgccaaatcgagtcctgtgattcccttggatggatctgtgaaaatccagtgccaggccattcgtgaagcttacctgacccagctgatgatcataaaaaactccacgtaccgagagataggcagaagactgaagttttggaatgagactgatcctgagttcgtcattgaccacatggacgcaaacaaggcagggcgctatcagtgccaatataggatagggcactacaggttccggtacagtaacaccctggagctggtagtgacaggcttgtatggcaaacccttcctctctgcagatcggggtctggtgttgatgccaggagagaatatttccctcacgtgcagctcagcacacatcccatttgatagattttcactggccaaggagggagaactttctctgccacagcaccaaagtggggaacacccggccaacttctctttgggtcctgtggacctcaatgtctcagggatctacaggtgctacggttggtacaacaggagcccctacctgtggtccttccccagtaatgccttggagcttgtggtcacagactccatccaccaagattacacgacgcagaacttgatccgcatggccgtggcaggactggtcctcgtggctctcttggccatactggttgaaaattggcacagccatacggcactgaacaaggaagcctcggcagatgtggctgaaccgagctggagccaacagatgtgtcagccaggattgacctttgcacgaacaccaagtgtctgcaagtaaacacctgga

SEQ ID NO: 133756 - DNA, 828 bp, Homo sapiens
  Payload ID: 6137
  Gene Symbol: FCAR
  Gene Name: Fc fragment of IgA receptor
  Uniprot ID: P24071
  ENST ID: ENST00000617609
  CDS Start-End: 1-828
atggaccccaaacagaccaccctcctgtgtcttggggactttcccatgcctttcatatctgccaaatcgagtcctgtgattcccttggatggatctgtgaaaatccagtgccaggccattcgtgaagcttacctgacccagctgatgatcataaaaaactccacgtaccgagagataggcagaagactgaagttttggaatgagactgatcctgagttcgtcattgaccacatggacgcaaacaaggcagggcgctatcagtgccaatataggatagggcactacagattccggtacagtgacaccctggagctggtagtgacaggcttgtatggcaaacccttcctctctgcagatcggggtctggtgttgatgccaggagagaatatttccctcacgtgcagctcagcacacatcccatttgatagattttcactggccaaggagggagaactttctctgccacagcaccaaagtggggaacacccggccaacttctctttgggtcctgtggacctcaatgtctcagggatctacaggtgctacggttggtacaacaggagcccctacctgtggtccttccccagtaatgccttggagcttgtggtcacagactccatccaccaagattacacgacgcagaacttgatccgcatggccgtggcaggactggtcctcgtggctctcttggccatactggttgaaaattggcacagccatacggcactgaacaaggaagcctcggcagatgtggctgaaccgagctggagccaacagatgtgtcagccaggattgacctttgcacgaacaccaagtgtctgcaagtaa

SEQ ID NO: 133757 - DNA, 2469 bp, Homo sapiens
  Payload ID: 6137
  Gene Symbol: FCAR
  Gene Name: Fc fragment of IgA receptor
  Uniprot ID: P24071
  ENST ID: ENST00000622157
  CDS Start-End: 56-919
atcctgctaatgtgcattgaaaggagagcaacggggctgaggccgtgtcagcacgatggaccccaaacagaccaccctcctgtgtcttgtgctctgtctgggccagaggattcaggcacaggaaggggactttcccatgcctttcatatctgccaaatcgagtcctgtgattcccttggatggatctgtgaaaatccagtgccaggccattcgtgaagcttacctgacccagctgatgatcataaaaaactccacgtaccgagagataggcagaagactgaagttttggaatgagactgatcctgagttcgtcattgaccacatggacgcaaacaaggcagggcgctatcagtgccaatataggatagggcactacaggttccggtacagtgacaccctggagctggtagtgacaggcttgtatggcaaacccttcctctctgcagatcggggtctggtgttgatgccaggagagaatatttccctcacgtgcagctcagcacacatcccatttgatagattttcactggccaaggagggagaactttctctgccacagcaccaaagtggggaacacccggccaacttctctttgggtcctgtggacctcaatgtctcagggatctacaggtgctacggttggtacaacaggagcccctacctgtggtccttccccagtaatgccttggagcttgtggtcacagactccatccaccaagattacacgacgcagaacttgatccgcatggccgtggcaggactggtcctcgtggctctcttggccatactggttgaaaattggcacagccatacggcactgaacaaggaagcctcggcagatgtggctgaaccgagctggagccaacagatgtgtcagccaggattgacctttgcacgaacaccaagtgtctgcaagtaaacacctggaggtgaaggcagagaggagccaggactgtggagtccgacaaagctacttgaaggacacaagagagaaaagctcactaagaagcttgaatctacttttttttttttttgagacagagtctggctctgtcacccaggctggagtgcagtggagcaatctcggctcattgaacctcttgggttcaagtgattcttgtgcctcagcctcccaagtagctggaattacaggcacataccactgcacccagctaatttttgtatttttagtagagatggggtttcactgtgttggccaggctggtctcgaactcctgacctcaggtgatccacccaccttggcctcccaaagtgctgagattataggcatgagccaccacgcctggccagatgcatgttcaaaccaatcaaatggtgttttcttatgcaggactgatcgatttgcacccacctttctgcacataagttatggttttccatcttatctgtcttctgattttttatatcctgtttaatttcttccttcattgttcttctctttttttatttattttatttatttttatttttatttttatttgagacagagtctcactctgttgcccaggctggagtgcagtggcacgatctcggctcactgcaacctctgcctcctgggttcaagtgattctcctgcctcggcctcccaagtagctgggattgcaggctcccaccatcacgcccagctacttttacagtatttttagtagagacggggtttcatcacattggccaagctggtctcaaacttctgacctcgtgatctgcccgcctcggcctcccaaagtgctgggattacagatgtgagccactgcgcccagccttctttttatatttttaaatgtgtcttccccaaatataaatggttggtaagcatgccaaatatattcaataacccccctcctttatttttttttgttgaagtgaggctctccctatgttgcctaagctggtcttgaactcctggtctcaagcaatcctcctacctcagcctcctgctgtgttcatctacaaattgataagagtgaaagtcataatcctacaggaggattaccctatttatttcacaaaccctatttctaccggattttcatacaaggaatacaggcatgtgtttcacctcattaatttattttttcacttagttttgatgatattcacatatattatcaagtgtgcaaacattaaattcttgtgtacaaaactcaaatggtcttccaaataattccccattcttttttcttataaactttcacagctttacccttgacagactttactcaaggaaatctaagttggtcatatgtggctctttcactgattgctatttacttcattgtccagtagcttatgtatgaaaatataattataaaatgtaagggtcctacttccagtgaaactgaagggacttaggcccacttttatcctttactgagagcttatctctacttgataaaatttctactgtattcttggcttaactcaggtcctgtgattaaaaaaaaaatg

SEQ ID NO: 133758 - DNA, 1432 bp, Homo sapiens; identical to SEQ ID NO: 133710
  Payload ID: 6137
  Gene Symbol: FCAR
  Gene Name: Fc fragment of IgA receptor
  Uniprot ID: P24071
  ENST ID: ENST00000613318
  CDS Start-End: 11-730

SEQ ID NO: 133759 - DNA, 854 bp, Homo sapiens
  Payload ID: 6137
  Gene Symbol: FCAR
  Gene Name: Fc fragment of IgA receptor
  Uniprot ID: P24071
  ENST ID: ENST00000618287
  CDS Start-End: 18-845
gaggccgtgtcagcacgatggaccccaaacagaccaccctcctgtgtcttggggactttcccatgcctttcatatctgccaaatcgagtcctgtgattcccttggatggatctgtgaaaatccagtgccaggccattcgtgaagcttacctgacccagctgatgatcataaaaaactccacgtaccgagagataggcagaagactgaagttttggaatgagactgatcctgagttcgtcattgaccacatggacgcaaacaaggcagggcgctatcagtgccaatataggatagggcactacaggttccggtacagtgacaccctggagctggtagtgacaggcttgtatggcaaacccttcctctctgcagatcggggtctggtgttgatgccaggagagaatatttccctcacgtgcagctcagcacacatcccatttgatagattttcactggccaaggagggagaactttctctgccacagcaccaaagtggggaacacccggccaacttctctttgggtcctgtggacctcaatgtctcagggatctacaggtgctacggttggtacaacaggagcccctacctgtggtccttccccagtaatgccttggagcttgtggtcacagactccatccaccaagattacacgacgcagaacttgatccgcatggccgtggcaggactggtcctcgtggctctcttggccatactggttgaaaattggcacagccatacggcactgaacaaggaagcctcggcagatgtggctgaaccgagctggagccaacagatgtgtcagccaggattgacctttgcacgaacaccaagtgtctgcaagtaaacacctgga

SEQ ID NO: 133760 - DNA, 828 bp, Homo sapiens; identical to SEQ ID NO: 133705
  Payload ID: 6137
  Gene Symbol: FCAR
  Gene Name: Fc fragment of IgA receptor
  Uniprot ID: P24071
  ENST ID: ENST00000616340
  CDS Start-End: 1-828

SEQ ID NO: 133761 - DNA, 536 bp, Homo sapiens; identical to SEQ ID NO: 133727
  Payload ID: 6137
  Gene Symbol: FCAR
  Gene Name: Fc fragment of IgA receptor
  ENST ID: ENST00000611409
  CDS Start-End: 1-429

SEQ ID NO: 133762 - DNA, 1449 bp, Homo sapiens
  Payload ID: 6137
  Gene Symbol: FCAR
  Gene Name: Fc fragment of IgA receptor
  ENST ID: ENST00000620561
  CDS Start-End: 11-730
tgtcagcacgatggaccccaaacagaccaccctcctgtgtcttgtgctctgtctgggccagaggattcaggcacaggaaggggactttcccatgcctttcatatctgccaaatcgagtcctgtgattcccttggatggatctgtgaaaatccagtgccaggccattcgtgaagcttacctgacccagctgatgatcataaaaaactccacgtaccgagagataggcagaagactgaagttttggaatgagactgatcctgagttcgtcattgaccacatggacgcaaacaaggcagggcgctatcagtgccaatataggatagggcactacaggttccggtacagtaacaccctggagctggtagtgacaggcttgtatggcaaacccttcctctctgcagatcggggtctggtgttgatgccaggagagaatatttccctcacgtgcagctcagcacacatcccatttgatagattttcactggccaaggagggagaactttctctgccacagcaccaaagtggggaacacccggccaacttctctttgggtcctgtggacctcaatgtctcagggatctacaggtgctacggttggtacaacaggagcccctacctgtggtccttccccagtaatgccttggagcttgtggtcacaggtaggtaccgcccagtccagccctgtgtctgggttggctgtccagggccttgccaccgggcaggaatatgaagacgtgcactgagagtgaagtgaagagaggcaaaggctctcactccaggacagtggagagagaaaggcttccccaccacactttccgctttcacttcctcgctagagttctccagacagggttcattgaaaacttagtctgtggagaacagaagggctaactcagtttgtttcattttatttatttcattttattttccgggatagagtcttgctctttcgccaaggctggagtgcagtggcacgatctcgactcactgcaaccttcgcctcccaggttcaagcaattctcctgcctcagcctcctgagtagctgggaccacacagacagggtttcaccatgttggccaggctggtctcgaactcccgacctcaggtgatccacctgcctcggcctcccaaagtgctgggattacaggcgtgagccaccgcgcctggccaggctgcacacattcttattaggattccaccttgttctggtgttgtagagatgtgattaggtatttagtgaattcaccaagtgaggagagaatgaaaagaaaacacaacctgcctggccgggcgtggtggcgtgagcctgtcgtcccagctactcaggaggctgaggcaggagaatcacttgaacccaggaggcagctgttgcagtgagccaagatcacgccattgcactccagcctgggtgacagaacgagactccacctcaagaaaaaaaaaaaaaa

SEQ ID NO: 133763 - DNA, 830 bp, Homo sapiens; identical to SEQ ID NO: 133708
  Payload ID: 6137
  Gene Symbol: FCAR
  Gene Name: Fc fragment of IgA receptor
  Uniprot ID: P24071
  ENST ID: ENST00000618805
  CDS Start-End: 6-803

SEQ ID NO: 133764 - DNA, 762 bp, Homo sapiens; identical to SEQ ID NO: 133707
  Payload ID: 6137
  Gene Symbol: FCAR
  Gene Name: Fc fragment of IgA receptor
  Uniprot ID: P24071
  ENST ID: ENST00000620270
  CDS Start-End: 1-762

SEQ ID NO: 133765 - DNA, 608 bp, Homo sapiens; identical to SEQ ID NO: 133703
  Payload ID: 6137
  Gene Symbol: FCAR
  Gene Name: Fc fragment of IgA receptor
  Uniprot ID: P24071
  ENST ID: ENST00000621009
  CDS Start-End: 6-581

SEQ ID NO: 133766 - DNA, 608 bp, Homo sapiens
  Payload ID: 6137
  Gene Symbol: FCAR
  Gene Name:: Fc fragment of IgA receptor
  Uniprot ID: P24071
  ENST ID: ENST00000612918
  CDS Start-End: 6-581
gcacgatggaccccaaacagaccaccctcctgtgtcttgtgctctgtctgggccagaggattcaggcacaggaaggggactttcccatgcctttcatatctgccaaatcgagtcctgtgattcccttggatggatctgtgaaaatccagtgccaggccattcgtgaagcttacctgacccagctgatgatcataaaaaactccacgtaccgagagataggcagaagactgaagttttggaatgagactgatcctgagttcgtcattgaccacatggacgcaaacaaggcagggcgctatcagtgccaatataggatagggcactacagattccggtacagtgacaccctggagctggtagtgacagactccatccaccaagattacacgacgcagaacttgatccgcatggccgtggcaggactggtcctcgtggctctcttggccatactggttgaaaattggcacagccatacggcactgaacaaggaagcctcggcagatgtggctgaaccgagctggagccaacagatgtgtcagccaggattgacctttgcacgaacaccaagtgtctgcaagtaaacacctggaggtgaaggcagagaggag

SEQ ID NO: 133767 - DNA, 1432 bp, Homo sapiens
  Payload ID: 6137
  Gene Symbol: FCAR
  Gene Name: Fc fragment of IgA receptor
  Uniprot ID: P24071
  ENST ID: ENST00000613201
  CDS Start-End: 11-730
tgtcagcacgatggaccccaaacagaccaccctcctgtgtcttgtgctctgtctgggccagaggattcaggcacaggaaggggactttcccatgcctttcatatctgccaaatcgagtcctgtgattcccttggatggatctgtgaaaatccagtgccaggccattcgtgaagcttacctgacccagctgatgatcataaaaaactccacgtaccgagagataggcagaagactgaagttttggaatgagactgatcctgagttcgtcattgaccacatggacgcaaacaaggcagggcgctatcagtgccaatataggatagggcactacagattccggtacagtgacaccctggagctggtagtgacaggcttgtatggcaaacccttcctctctgcagatcggggtctggtgttgatgccaggagagaatatttccctcacgtgcagctcagcacacatcccatttgatagattttcactggccaaggagggagaactttctctgccacagcaccaaagtggggaacacccggccaacttctctttgggtcctgtggacctcaatgtctcagggatctacaggtgctacggttggtacaacaggagcccctacctgtggtccttccccagtaatgccttggagcttgtggtcacaggtaggtaccgcccagtccagccctgtgtctgggttggctgtccagggccttgccaccgggcaggaatatgaagacgtgcactgagagtgaagtgaagagaggcaaaggctctcactccaggacagtggagagagaaaggcttccccaccacactttccgctttcacttcctcgctagagttctccagacagggttcattgaaaacttagtctgtggagaacagaagggctaactcagtttgtttcattttatttatttcattttattttccgggatagagtcttgctctttcgccaaggctggagtgcagtggcacgatctcgactcactgcaaccttcgcctcccaggttcaagcaattctcctgcctcagcctcctgagtagctgggaccacacagacagggtttcaccatgttggccaggctggtctcgaactcccgacctcaggtgatccacctgcctcggcctcccaaagtgctgggattacaggcgtgagccaccgcgcctggccaggctgcacacattcttattaggattccaccttgttctggtgttgtagagatgtgattaggtatttagtgaattcaccaagtgaggagagaatgaaaagaaaacacaacctgcctggccgggcgtggtggcgtgagcctgtcgtcccagctactcaggaggctgaggcaggagaatcacttgaacccaggaggcagctgttgcagtgagccaagatcacgccattgcactccagcctgggtgacagaacgagactccacctc

SEQ ID NO: 133768 - DNA, 830 bp, Homo sapiens; identical to SEQ ID NO: 133708
  Payload ID: 6137
  Gene Symbol: FCAR
  Gene Name: Fc fragment of IgA receptor
  Uniprot ID: P24071
  ENST ID: ENST00000611943
  CDS Start-End: 6-803

SEQ ID NO: 133769 - DNA, 1483 bp, Homo sapiens; identical to SEQ ID NO: 133704
  Payload ID: 6137
  Gene Symbol: FCAR
  Gene Name: Fc fragment of IgA receptor
  Uniprot ID: P24071
  ENST ID: ENST00000619385
  CDS Start-End: 11-874

SEQ ID NO: 133770 - DNA, 609 bp, Homo sapiens; identical to SEQ ID NO: 133709
  Payload ID: 6137
  Gene Symbol: FCAR
  Gene Name: Fc fragment of IgA receptor
  Uniprot ID: P24071
  ENST ID: ENST00000613298
  CDS Start-End: 43-582

SEQ ID NO: 133771 - DNA, 537 bp, Homo sapiens; identical to SEQ ID NO: 133702
  Payload ID: 6137
  Gene Symbol: FCAR
  Gene Name: Fc fragment of IgA receptor
  Uniprot ID: P24071
  ENST ID: ENST00000615719
  CDS Start-End: 1-537

SEQ ID NO: 133772 - DNA, 1080 bp, Homo sapiens
  Payload ID: 6137
  Gene Symbol: FCAR
  Gene Name: Fc fragment of IgA receptor
  ENST ID: ENST00000619953
  CDS Start-End: 11-694
tgtcagcacgatggaccccaaacagaccaccctcctgtgtcttggggactttcccatgcctttcatatctgccaaatcgagtcctgtgattcccttggatggatctgtgaaaatccagtgccaggccattcgtgaagcttacctgacccagctgatgatcataaaaaactccacgtaccgagagataggcagaagactgaagttttggaatgagactgatcctgagttcgtcattgaccacatggacgcaaacaaggcagggcgctatcagtgccaatataggatagggcactacaggttccggtacagtaacaccctggagctggtagtgacaggcttgtatggcaaacccttcctctctgcagatcggggtctggtgttgatgccaggagagaatatttccctcacgtgcagctcagcacacatcccatttgatagattttcactggccaaggagggagaactttctctgccacagcaccaaagtggggaacacccggccaacttctctttgggtcctgtggacctcaatgtctcagggatctacaggtgctacggttggtacaacaggagcccctacctgtggtccttccccagtaatgccttggagcttgtggtcacaggtaggtaccgcccagtccagccctgtgtctgggttggctgtccagggccttgccaccgggcaggaatatgaagacgtgcactgagagtgaagtgaagagaggcaaaggctctcactccaggacagtggagagagaaaggcttccccaccacactttccgctttcacttcctcgctagagttctccagacagggttcattgaaaacttagtctgtggagaacagaagggctaactcagtttgtttcattttatttatttcattttattttccgggatagagtcttgctctttcgccaaggctggagtgcagtggcacgatctcgactcactgcaaccttcgcctcccaggagaatcacttgaacccaggaggcagctgttgcagtgagccaagatcacgccattgcactccagcctgggtgacagaacgagactccacctcaagaaaaaaaaaaaaaa

SEQ ID NO: 133773 - DNA, 2431 bp, Homo sapiens
  Payload ID: 6137
  Gene Symbol: FCAR
  Gene Name: Fc fragment of IgA receptor
  Uniprot ID: P24071
  ENST ID: ENST00000615829
  CDS Start-End: 11-874
tgtcagcacgatggaccccaaacagaccaccctcctgtgtcttgtgctctgtctgggccagaggattcaggcacaggaaggggactttcccatgcctttcatatctgccaaatcgagtcctgtgattcccttggatggatctgtgaaaatccagtgccaggccattcgtgaagcttacctgacccagctgatgatcataaaaaactccacgtaccgagagataggcagaagactgaagttttggaatgagactgatcctgagttcgtcattgaccacatggacgcaaacaaggcagggcgctatcagtgccaatataggatagggcactacagattccggtacagtgacaccctggagctggtagtgacaggcttgtatggcaaacccttcctctctgcagatcggggtctggtgttgatgccaggagagaatatttccctcacgtgcagctcagcacacatcccatttgatagattttcactggccaaggagggagaactttctctgccacagcaccaaagtggggaacacccggccaacttctctttgggtcctgtggacctcaatgtctcagggatctacaggtgctacggttggtacaacaggagcccctacctgtggtccttccccagtaatgccttggagcttgtggtcacagactccatccaccaagattacacgacgcagaacttgatccgcatggccgtggcaggactggtcctcgtggctctcttggccatactggttgaaaattggcacagccatacggcactgaacaaggaagcctcggcagatgtggctgaaccgagctggagccaacagatgtgtcagccaggattgacctttgcacgaacaccaagtgtctgcaagtaaacacctggaggtgaaggcagagaggagccaggactgtggagtccgacaaagctacttgaaggacacaagagagaaaagctcactaagaagcttgaatctacttttttttttttttgagacagagtctggctctgtcacccaggctggagtgcagtggagcaatctcggctcattgaacctcttgggttcaagtgattcttgtgcctcagcctcccaagtagctggaattacaggcacataccactgcacccagctaatttttgtatttttagtagagatggggtttcactgtgttggccaggctggtctcgaactcctgacctcaggtgatccacccaccttggcctcccaaagtgctgagattataggcatgagccaccacgcctggccagatgcatgttcaaaccaatcaaatggtgttttcttatgcaggactgatcgatttgcacccacctttctgcacataagttatggttttccatcttatctgtcttctgattttttatatcctgtttaatttcttccttcattgttcttctctttttttatttattttatttatttttatttttatttttatttgagacagagtctcactctgttgcccaggctggagtgcagtggcacgatctcggctcactgcaacctctgcctcctgggttcaagtgattctcctgcctcggcctcccaagtagctgggattacaggctcccaccatcacgcccagctacttttacagtatttttagtagagacggggtttcatcacattggccaagctggtctcaaacttctgacctcgtgatctgcccgcctcggcctcccaaagtgctgggattacagatgtgagccactgcgcccagccttctttttatatttttaaatgtgtcttccccaaatataaatggttggtaagcatgccaaatatattcaataacccccctcctttatttttttttgttgaagtgaggctctccctatgttgcctaagctggtcttgaactcctggtctcaagcaatcctcctacctcagcctcctgctgtgttcatctacaaattgataagagtgaaagtcataatcctacaggaggattaccctatttatttcacaaaccctatttctaccggattttcatacaaggaatacaggcatgtgtttcacctcattaatttattttttcacttagttttgatgatattcacatatattatcaagtgtgcaaacattaaattcttgtgtacaaaactcaaatggtcttccaaataattccccattcttttttcttataaactttcacagctttacccttgacagactttactcaaggaaatctaagttggtcatatgtggctctttcactgattgctatttacttcattgtccagtagcttatgtatgaaaatataattataaaatgtaagggtcctacttccagtgaaactgaagggacttaggcccacttttatcctttactgagagcttatctctacttgataaaatttctactgtattcttggcttaactcaggtcctgtgattaaaaaaaaaatgcaaagta

SEQ ID NO: 133774 - DNA, 609 bp, Homo sapiens
  Payload ID: 6137
  Gene Symbol: FCAR
  Gene Name: Fc fragment of IgA receptor
  Uniprot ID: P24071
  ENST ID: ENST00000617696
  CDS Start-End: 43-582
gcattgaaaggagagcaacggggctgaggccgtgtcagcacgatggaccccaaacagaccaccctcctgtgtcttggggactttcccatgcctttcatatctgccaaatcgagtcctgtgattcccttggatggatctgtgaaaatccagtgccaggccattcgtgaagcttacctgacccagctgatgatcataaaaaactccacgtaccgagagataggcagaagactgaagttttggaatgagactgatcctgagttcgtcattgaccacatggacgcaaacaaggcagggcgctatcagtgccaatataggatagggcactacagattccggtacagtgacaccctggagctggtagtgacagactccatccaccaagattacacgacgcagaacttgatccgcatggccgtggcaggactggtcctcgtggctctcttggccatactggttgaaaattggcacagccatacggcactgaacaaggaagcctcggcagatgtggctgaaccgagctggagccaacagatgtgtcagccaggattgacctttgcacgaacaccaagtgtctgcaagtaaacacctggaggtgaaggcagagaggag

SEQ ID NO: 133775 - DNA, 609 bp, Homo sapiens; identical to SEQ ID NO: 133709
  Payload ID: 6137
  Gene Symbol: FCAR
  Gene Name: Fc fragment of IgA receptor
  Uniprot ID: P24071
  ENST ID: ENST00000615361
  CDS Start-End: 43-582

SEQ ID NO: 133776 - DNA, 1483 bp, Homo sapiens; identical to SEQ ID NO: 133704
  Payload ID: 6137
  Gene Symbol: FCAR
  Gene Name: Fc fragment of IgA receptor
  Uniprot ID: P24071
  ENST ID: ENST00000621702
  CDS Start-End: 11-874

SEQ ID NO: 133777 - DNA, 828 bp, Homo sapiens; identical to SEQ ID NO: 133705
  Payload ID: 6137
  Gene Symbol: FCAR
  Gene Name: Fc fragment of IgA receptor
  Uniprot ID: P24071
  ENST ID: ENST00000611871
  CDS Start-End: 1-828

SEQ ID NO: 133778 - DNA, 1483 bp, Homo sapiens; identical to SEQ ID NO: 133704
  Payload ID: 6137
  Gene Symbol: FCAR
  Gene Name: Fc fragment of IgA receptor
  Uniprot ID: P24071
  ENST ID: ENST00000614226
  CDS Start-End: 11-874

SEQ ID NO: 133779 - DNA, 754 bp, Homo sapiens; identical to SEQ ID NO: 133706
  Payload ID: 6137
  Gene Symbol: FCAR
  Gene Name: Fc fragment of IgA receptor
  Uniprot ID: P24071
  ENST ID: ENST00000610786
  CDS Start-End: 1-630

SEQ ID NO: 133780 - DNA, 830 bp, Homo sapiens; identical to SEQ ID NO: 133708
  Payload ID: 6137
  Gene Symbol: FCAR
  Gene Name: Fc fragment of IgA receptor
  Uniprot ID: P24071
  ENST ID: ENST00000619822
  CDS Start-End: 6-803

SEQ ID NO: 133781 - DNA, 762 bp, Homo sapiens; identical to SEQ ID NO: 133707
  Payload ID: 6137
  Gene Symbol: FCAR
  Gene Name: Fc fragment of IgA receptor
  Uniprot ID: P24071
  ENST ID: ENST00000620162
  CDS Start-End: 1-762

SEQ ID NO: 133782 - DNA, 537 bp, Homo sapiens; identical to SEQ ID NO: 133702
  Payload ID: 6137
  Gene Symbol: FCAR
  Gene Name: Fc fragment of IgA receptor
  Uniprot ID: P24071
  ENST ID: ENST00000620822
  CDS Start-End: 1-537

SEQ ID NO: 133783 - DNA, 576 bp, Homo sapiens
  Payload ID: 6137
  Gene Symbol: FCAR
  Gene Name: Fc fragment of IgA receptor
  Uniprot ID: P24071
  ENST ID: ENST00000622543
  CDS Start-End: 1-576
atggaccccaaacagaccaccctcctgtgtcttgtgctctgtctgggccagaggattcaggcacaggaaggggactttcccatgcctttcatatctgccaaatcgagtcctgtgattcccttggatggatctgtgaaaatccagtgccaggccattcgtgaagcttacctgacccagctgatgatcataaaaaactccacgtaccgagagataggcagaagactgaagttttggaatgagactgatcctgagttcgtcattgaccacatggacgcaaacaaggcagggcgctatcagtgccaatataggatagggcactacaggttccggtacagtgacaccctggagctggtagtgacagactccatccaccaagattacacgacgcagaacttgatccgcatggccgtggcaggactggtcctcgtggctctcttggccatactggttgaaaattggcacagccatacggcactgaacaaggaagcctcggcagatgtggctgaaccgagctggagccaacagatgtgtcagccaggattgacctttgcacgaacaccaagtgtctgcaagtaa

SEQ ID NO: 133784 - DNA, 1449 bp, Homo sapiens
  Payload ID: 6137
  Gene Symbol: FCAR
  Gene Name: Fc fragment of IgA receptor
  Uniprot ID: P24071
  ENST ID: ENST00000613663
  CDS Start-End: 11-730
tgtcagcacgatggaccccaaacagaccaccctcctgtgtcttgtgctctgtctgggccagaggattcaggcacaggaaggggactttcccatgcctttcatatctgccaaatcgagtcctgtgattcccttggatggatctgtgaaaatccagtgccaggccattcgtgaagcttacctgacccagctgatgatcataaaaaactccacgtaccgagagataggcagaagactgaagttttggaatgagactgatcctgagttcgtcattgaccacatggacgcaaacaaggcagggcgctatcagtgccaatataggatagggcactacaggttccggtacagtgacaccctggagctggtagtgacaggcttgtatggcaaacccttcctctctgcagatcggggtctggtgttgatgccaggagagaatatttccctcacgtgcagctcagcacacatcccatttgatagattttcactggccaaggagggagaactttctctgccacagcaccaaagtggggaacacccggccaacttctctttgggtcctgtggacctcaatgtctcagggatctacaggtgctacggttggtacaacaggagcccctacctgtggtccttccccagtaatgccttggagcttgtggtcacaggtaggtaccgcccagtccagccctgtgtctgggttggctgtccagggccttgccaccgggcaggaatatgaagacgtgcactgagagtgaagtgaagagaggcaaaggctctcactccaggacagtggagagagaaaggcttccccaccacactttccgctttcacttcctcgctagagttctccagacagggttcattgaaaacttagtctgtggagaacagaagggctaactcagtttgtttcattttatttatttcattttattttccgggatagagtcttgctctttcgccaaggctggagtgcagtggcacgatctcgactcactgcaaccttcgcctcccaggttcaagcaattctcctgcctcagcctcctgagtagctgggaccacacagacagggtttcaccatgttggccaggctggtctcgaactcccgacctcaggtgatccacctgcctcggcctcccaaagtgctgggattacaggcgtgagccaccgcgcctggccaggctgcacacattcttattaggattccaccttgttctggtgttgtagagatgtgattaggtatttagtgaattcaccaagtgaggagagaatgaaaagaaaacacaacctgcctggccgggcgtggtggcgtgagcctgtcgtcccagctactcaggaggctgaggcaggagaatcacttgaacccaggaggcagctgttgcagtgagccaagatcacgccattgcactccagcctgggtgacagaacgagactccacctcaagaaaaaaaaaaaaaa

SEQ ID NO: 133785 - DNA, 609 bp, Homo sapiens; identical to SEQ ID NO: 133709
  Payload ID: 6137
  Gene Symbol: FCAR
  Gene Name: Fc fragment of IgA receptor
  Uniprot ID: P24071
  ENST ID: ENST00000614298
  CDS Start-End: 43-582

SEQ ID NO: 133786 - DNA, 754 bp, Homo sapiens; identical to SEQ ID NO: 133706
  Payload ID: 6137
  Gene Symbol: FCAR
  Gene Name: Fc fragment of IgA receptor
  Uniprot ID: P24071
  ENST ID: ENST00000612815
  CDS Start-End: 1-630

SEQ ID NO: 133787 - DNA, 1432 bp, Homo sapiens; identical to SEQ ID NO: 133710
  Payload ID: 6137
  Gene Symbol: FCAR
  Gene Name: Fc fragment of IgA receptor
  Uniprot ID: P24071
  ENST ID: ENST00000615800
  CDS Start-End: 11-730

SEQ ID NO: 133788 - DNA, 608 bp, Homo sapiens
  Payload ID: 6137
  Gene Symbol: FCAR
  Gene Name: Fc fragment of IgA receptor
  ENST ID: ENST00000615888
  CDS Start-End: 6-581
gcacgatggaccccaaacagaccaccctcctgtgtcttgtgctctgtctgggccagaggattcaggcacaggaaggggactttcccatgcctttcatatctgccaaatcgagtcctgtgattcccttggatggatctgtgaaaatccagtgccaggccattcgtgaagcttacctgacccagctgatgatcataaaaaactccacgtaccgagagataggcagaagactgaagttttggaatgagactgatcctgagttcgtcattgaccacatggacgcaaacaaggcagggcgctatcagtgccaatataggatagggcactacaggttccggtacagtaacaccctggagctggtagtgacagactccatccaccaagattacacgacgcagaacttgatccgcatggccgtggcaggactggtcctcgtggctctcttggccatactggttgaaaattggcacagccatacggcactgaacaaggaagcctcggcagatgtggctgaaccgagctggagccaacagatgtgtcagccaggattgacctttgcacgaacaccaagtgtctgcaagtaaacacctggaggtgaaggcagagaggag

SEQ ID NO: 133789 - DNA, 1063 bp, Homo sapiens; identical to SEQ ID NO: 133711
  Payload ID: 6137
  Gene Symbol: FCAR
  Gene Name: Fc fragment of IgA receptor
  Uniprot ID: P24071
  ENST ID: ENST00000617762
  CDS Start-End: 11-694

SEQ ID NO: 133790 - DNA, 546 bp, Homo sapiens; identical to SEQ ID NO: 133722
  Payload ID: 6137
  Gene Symbol: FCAR
  Gene Name: Fc fragment of IgA receptor
  Uniprot ID: P24071
  ENST ID: ENST00000617964
  CDS Start-End: 1-537

SEQ ID NO: 133791 - DNA, 537 bp, Homo sapiens; identical to SEQ ID NO: 133702
  Payload ID: 6137
  Gene Symbol: FCAR
  Gene Name: Fc fragment of IgA receptor
  Uniprot ID: P24071
  ENST ID: ENST00000621882
  CDS Start-End: 1-537

SEQ ID NO: 133792 - DNA, 830 bp, Homo sapiens
  Payload ID: 6137
  Gene Symbol: FCAR
  Gene Name: Fc fragment of IgA receptor
  Uniprot ID: P24071
  ENST ID: ENST00000615110
  CDS Start-End: 6-803
gcacgatggaccccaaacagaccaccctcctgtgtcttgtgctctgtctgggccagaggattcaggcacaggaaggggactttcccatgcctttcatatctgccaaatcgagtcctgtgattcccttggatggatctgtgaaaatccagtgccaggccattcgtgaagcttacctgacccagctgatgatcataaaaaactccacgtaccgagagataggcagaagactgaagttttggaatgagactgatcctgagttcgtcattgaccacatggacgcaaacaaggcagggcgctatcagtgccaatataggatagggcactacagattccggtacagtgacaccctggagctggtagtgacaggcttgtatggcaaacccttcctctctgcagatcggggtctggtgttgatgccaggagagaatatttccctcacgtgcagctcagcacacatcccatttgatagattttcactggccaaggagggagaactttctctgccacagcaccaaagtggggaacacccggccaacttctctttgggtcctgtggacctcaatgtctcagggatctacaggtgctacgactccatccaccaagattacacgacgcagaacttgatccgcatggccgtggcaggactggtcctcgtggctctcttggccatactggttgaaaattggcacagccatacggcactgaacaaggaagcctcggcagatgtggctgaaccgagctggagccaacagatgtgtcagccaggattgacctttgcacgaacaccaagtgtctgcaagtaaacacctggaggtgaaggcagagaggag

SEQ ID NO: 133793 - DNA, 762 bp, Homo sapiens; identical to SEQ ID NO: 133707
  Payload ID: 6137
  Gene Symbol: FCAR
  Gene Name: Fc fragment of IgA receptor
  Uniprot ID: P24071
  ENST ID: ENST00000611018
  CDS Start-End: 1-762

SEQ ID NO: 133794 - DNA, 395 bp, Homo sapiens
  Payload ID: 6137
  Gene Symbol: FCAR
  Gene Name: Fc fragment of IgA receptor
  ENST ID: ENST00000614052
  CDS Start-End: 43-395
gcattgaaaggagagcaacggggctgaggccgtgtcagcacgatggaccccaaacagaccaccctcctgtgtcttggggactttcccatgcctttcatatctgccaaatcgagtcctgtgattcccttggatggatctgtgaaaatccagtgccaggccattcgtgaagcttacctgacccagctgatgatcataaaaaactccacgtaccgagagataggcagaagactgaagttttggaatgagactgatcctgagttcgtcattgaccacatggacgcaaacaaggcagggcgctatcagtgccaatataggatagggcactacaggttccggtacagtgacaccctggagctggtagtgacagactccatccaccaagattacacgacgca

SEQ ID NO: 133795 - DNA, 830 bp, Homo sapiens
  Payload ID: 6137
  Gene Symbol: FCAR
  Gene Name: Fc fragment of IgA receptor
  ENST ID: ENST00000617610
  CDS Start-End: 6-803
gcacgatggaccccaaacagaccaccctcctgtgtcttgtgctctgtctgggccagaggattcaggcacaggaaggggactttcccatgcctttcatatctgccaaatcgagtcctgtgattcccttggatggatctgtgaaaatccagtgccaggccattcgtgaagcttacctgacccagctgatgatcataaaaaactccacgtaccgagagataggcagaagactgaagttttggaatgagactgatcctgagttcgtcattgaccacatggacgcaaacaaggcagggcgctatcagtgccaatataggatagggcactacaggttccggtacagtaacaccctggagctggtagtgacaggcttgtatggcaaacccttcctctctgcagatcggggtctggtgttgatgccaggagagaatatttccctcacgtgcagctcagcacacatcccatttgatagattttcactggccaaggagggagaactttctctgccacagcaccaaagtggggaacacccggccaacttctctttgggtcctgtggacctcaatgtctcagggatctacaggtgctacgactccatccaccaagattacacgacgcagaacttgatccgcatggccgtggcaggactggtcctcgtggctctcttggccatactggttgaaaattggcacagccatacggcactgaacaaggaagcctcggcagatgtggctgaaccgagctggagccaacagatgtgtcagccaggattgacctttgcacgaacaccaagtgtctgcaagtaaacacctggaggtgaaggcagagaggag

SEQ ID NO: 133796 - DNA, 609 bp, Homo sapiens; identical to SEQ ID NO: 133709
  Payload ID: 6137
  Gene Symbol: FCAR
  Gene Name: Fc fragment of IgA receptor
  Uniprot ID: P24071
  ENST ID: ENST00000612159
  CDS Start-End: 43-582

SEQ ID NO: 133797 - DNA, 537 bp, Homo sapiens; identical to SEQ ID NO: 133702
  Payload ID: 6137
  Gene Symbol: FCAR
  Gene Name: Fc fragment of IgA receptor
  Uniprot ID: P24071
  ENST ID: ENST00000618271
  CDS Start-End: 1-537

SEQ ID NO: 133798 - DNA, 828 bp, Homo sapiens; identical to SEQ ID NO: 133705
  Payload ID: 6137
  Gene Symbol: FCAR
  Gene Name: Fc fragment of IgA receptor
  Uniprot ID: P24071
  ENST ID: ENST00000621004
  CDS Start-End: 1-828

SEQ ID NO: 133799 - DNA, 1432 bp, Homo sapiens; identical to SEQ ID NO: 133710
  Payload ID: 6137
  Gene Symbol: FCAR
  Gene Name: Fc fragment of IgA receptor
  Uniprot ID: P24071
  ENST ID: ENST00000615703
  CDS Start-End: 11-730

SEQ ID NO: 133800 - DNA, 537 bp, Homo sapiens; identical to SEQ ID NO: 133702
  Payload ID: 6137
  Gene Symbol: FCAR
  Gene Name: Fc fragment of IgA receptor
  Uniprot ID: P24071
  ENST ID: ENST00000621755
  CDS Start-End: 1-537

SEQ ID NO: 133801 - DNA, 762 bp, Homo sapiens; identical to SEQ ID NO: 133707
  Payload ID: 6137
  Gene Symbol: FCAR
  Gene Name: Fc fragment of IgA receptor
  Uniprot ID: P24071
  ENST ID: ENST00000611130
  CDS Start-End: 1-762

SEQ ID NO: 133802 - DNA, 765 bp, Homo sapiens
  Payload ID: 6138
  Gene Symbol: FCER1A
  Gene Name: Fc fragment of IgE, high affinity I, receptor for
  alpha polypeptide
  ENST ID: ENST00000368114
  CDS Start-End: 30-704
acagtaagcaccaggagtccatgaagaagatggctcctgccatggaatcccctactctactgtgtgtagccttactgttcttcgctccagatggcgtgttagcagtcagttccaccaaatggttccacaatggcagcctttcagaagagacaaattcaagtttgaatattgtgaatgccaaatttgaagacagtggagaatacaaatgtcagcaccaacaagttaatgagagtgaacctgtgtacctggaagtcttcagtgactggctgctccttcaggcctctgctgaggtggtgatggagggccagcccctcttcctcaggtgccatggttggaggaactgggatgtgtacaaggtgatctattataaggatggtgaagctctcaagtactggtatgagaaccacaacatctccattacaaatgccacagttgaagacagtggaacctactactgtacgggcaaagtgtggcagctggactatgagtctgagcccctcaacattactgtaataaaagctccgcgtgagaagtactggctacaattttttatcccattgttggtggtgattctgtttgctgtggacacaggattatttatctcaactcagcagcaggtcacatttctcttgaagattaagagaaccaggaaaggcttcagacttctgaacccacatcctaagccaaaccccaaaaacaactgatataattactcaagaaatatttgcaacattagtttttttccagcatcagcaattgctactc

SEQ ID NO: 133803 - DNA, 1165 bp, Homo sapiens
  Payload ID: 6138
  Gene Symbol: FCER1A
  Gene Name: Fc fragment of IgE, high affinity I, receptor for
  alpha polypeptide
  Uniprot ID: P12319
  ENST ID: ENST00000368115
  CDS Start-End: 100-873
agtctccagcatcctccacctgtctaccaccgagcatgggcctatatttgaagccttagatctctccagcacagtaagcaccaggagtccatgaagaagatggctcctgccatggaatcccctactctactgtgtgtagccttactgttcttcgctccagatggcgtgttagcagtccctcagaaacctaaggtctccttgaaccctccatggaatagaatatttaaaggagagaatgtgactcttacatgtaatgggaacaatttctttgaagtcagttccaccaaatggttccacaatggcagcctttcagaagagacaaattcaagtttgaatattgtgaatgccaaatttgaagacagtggagaatacaaatgtcagcaccaacaagttaatgagagtgaacctgtgtacctggaagtcttcagtgactggctgctccttcaggcctctgctgaggtggtgatggagggccagcccctcttcctcaggtgccatggttggaggaactgggatgtgtacaaggtgatctattataaggatggtgaagctctcaagtactggtatgagaaccacaacatctccattacaaatgccacagttgaagacagtggaacctactactgtacgggcaaagtgtggcagctggactatgagtctgagcccctcaacattactgtaataaaagctccgcgtgagaagtactggctacaattttttatcccattgttggtggtgattctgtttgctgtggacacaggattatttatctcaactcagcagcaggtcacatttctcttgaagattaagagaaccaggaaaggcttcagacttctgaacccacatcctaagccaaaccccaaaaacaactgatataattactcaagaaatatttgcaacattagtttttttccagcatcagcaattgctactcaattgtcaaacacagcttgcaatatacatagaaacgtctgtgctcaaggatttatagaaatgcttcattaaactgagtgaaactggttaagtggcatgtaatagtaagtgctcaattaacattggttgaataaatgagagaatgaatagattcatttattagcatttgtaaaagagatgttcaatttcaataaaataaatataaaaccatgtaacagaatgcttctgagta

SEQ ID NO: 133804 - DNA, 591 bp, Homo sapiens
  Payload ID: 6139
  Gene Symbol: FCER1G
  Gene Name: Fc fragment of IgE, high affinity I, receptor for
  gamma polypeptide
  Uniprot ID: P30273
  ENST ID: ENST00000289902
  CDS Start-End: 26-286
cagaacggccgatctccagcccaagatgattccagcagtggtcttgctcttactccttttggttgaacaagcagcggccctgggagagcctcagctctgctatatcctggatgccatcctgtttctgtatggaattgtcctcaccctcctctactgtcgactgaagatccaagtgcgaaaggcagctataaccagctatgagaaatcagatggtgtttacacgggcctgagcaccaggaaccaggagacttacgagactctgaagcatgagaaaccaccacagtagctttagaatagatgcggtcatattcttctttggcttctggttcttccagccctcatggttggcatcacatatgcctgcatgccattaacaccagctggccctacccctataatgatcctgtgtcctaaattaatatacaccagtggttcctcctccctgttaaagactaatgctcagatgctgtttacggatatttatattctagtctcactctcttgtcccacccttcttctcttccccattcccaactccagctaaaatatgggaagggagaacccccaataaaactgccatggactggactc

SEQ ID NO: 133805 - DNA, 551 bp, Homo sapiens
  Payload ID: 6139
  Gene Symbol: FCER1G
  Gene Name: Fc fragment of IgE, high affinity I, receptor for
  gamma polypeptide
  ENST ID: ENST00000367992
  CDS Start-End: 44-382
acagctgcacagtgctgtcagaacggccgatctccagcccaagatgattccagcagtggtcttgctcttactccttttggttgaacaagcagcggccctgggagagcctcagctctgctatatcctggatgccatcctgtttctgtatggaattgtcctcaccctcctctactgtcgactgaagatccaagtgcgaaaggcagctataaccagctatgagaaatcagatggtgtttacacgatggagtctccctctatcaccaggctggagtgcagtggcatgatctgggctcactgcaacctctgcctcctgggttcaagagattctcgtgcttcaccctcccgagtagctaagactacaggcaccaccatgcccagctaattttttttgtatttttagtagagacagggtttcactatgttggtcttgatctcttgacctcgtgatctgctcgcctcagcctcctaaagtgctgggattacaggtgtgagccaccgagcctgacctggaagtaactcttttaaagataaagtgggaataaacttttatt

SEQ ID NO: 133806 - DNA, 1596 bp, Homo sapiens
  Payload ID: 6140
  Gene Symbol: FCER2
  Gene Name: Fc fragment of IgE, low affinity II, receptor for (CD23)
  Uniprot ID: P06734
  ENST ID: ENST00000346664
  CDS Start-End: 214-1179
agtggctctactttcagaagaaagtgtctctcttcctgcttaaacctctgtctctgacggtccctgccaatcgctctggtcgaccccaacacactaggaggacagacacaggctccaaactccactaaccagagctgtgattgtgcccgctgagtggactgcgttgtcagggagtgagtgctccatcatcgggagaatccaagcaggaccgccatggaggaaggtcaatattcagagatcgaggagcttcccaggaggcggtgttgcaggcgtgggactcagatcgtgctgctggggctggtgaccgccgctctgtgggctgggctgctgactctgcttctcctgtggcactgggacaccacacagagtctaaaacagctggaagagagggctgcccggaacgtctctcaagtttccaagaacttggaaagccaccacggtgaccagatggcgcagaaatcccagtccacgcagatttcacaggaactggaggaacttcgagctgaacagcagagattgaaatctcaggacttggagctgtcctggaacctgaacgggcttcaagcagatctgagcagcttcaagtcccaggaattgaacgagaggaacgaagcttcagatttgctggaaagactccgggaggaggtgacaaagctaaggatggagttgcaggtgtccagcggctttgtgtgcaacacgtgccctgaaaagtggatcaatttccaacggaagtgctactacttcggcaagggcaccaagcagtgggtccacgcccggtatgcctgtgacgacatggaagggcagctggtcagcatccacagcccggaggagcaggacttcctgaccaagcatgccagccacaccggctcctggattggccttcggaacttggacctgaagggggagtttatctgggtggatgggagccacgtggactacagcaactgggctccaggggagcccaccagccggagccagggcgaggactgcgtgatgatgcggggctccggtcgctggaacgacgccttctgcgaccgtaagctgggcgcctgggtgtgcgaccggctggccacatgcacgccgccagccagcgaaggttccgcggagtccatgggacctgattcaagaccagaccctgacggccgcctgcccaccccctctgcccctctccactcttgagcatggatacagccaggcccagagcaagaccctgaagacccccaaccacggcctaaaagcctctttgtggctgaaaggtccctgtgacattttctgccacccaaacggaggcagctgacacatctcccgctcctctatggcccctgccttcccaggagtacaccccaacagcaccctctccagatgggagtgcccccaacagcaccctctccagatgagagtacaccccaacagcaccctctccagatgagagtacaccccaacagcaccctctccagatgagagtacaccccaacagcaccctctccagatgcagccccatctcctcagcaccccaggacctgagtatccccagctcaggtggtgagtcctcctgtccagcctgcatcaataaaatggggcagtgatggcctccca

SEQ ID NO: 133807 - DNA, 1482 bp, Homo sapiens
  Payload ID: 6140
  Gene Symbol: FCER2
  Gene Name: Fc fragment of IgE, low affinity II, receptor for (CD23)
  ENST ID: ENST00000360067
  CDS Start-End: 85-1047
aacggcttcagctagggagcggggagcccaatagagtcagaggccaaatagaacaggaacttggaacaagcagaatttagcataatgaatcctccaagccaggagatcgaggagcttcccaggaggcggtgttgcaggcgtgggactcagatcgtgctgctggggctggtgaccgccgctctgtgggctgggctgctgactctgcttctcctgtggcactgggacaccacacagagtctaaaacagctggaagagagggctgcccggaacgtctctcaagtttccaagaacttggaaagccaccacggtgaccagatggcgcagaaatcccagtccacgcagatttcacaggaactggaggaacttcgagctgaacagcagagattgaaatctcaggacttggagctgtcctggaacctgaacgggcttcaagcagatctgagcagcttcaagtcccaggaattgaacgagaggaacgaagcttcagatttgctggaaagactccgggaggaggtgacaaagctaaggatggagttgcaggtgtccagcggctttgtgtgcaacacgtgccctgaaaagtggatcaatttccaacggaagtgctactacttcggcaagggcaccaagcagtgggtccacgcccggtatgcctgtgacgacatggaagggcagctggtcagcatccacagcccggaggagcaggacttcctgaccaagcatgccagccacaccggctcctggattggccttcggaacttggacctgaagggggagtttatctgggtggatgggagccacgtggactacagcaactgggctccaggggagcccaccagccggagccagggcgaggactgcgtgatgatgcggggctccggtcgctggaacgacgccttctgcgaccgtaagctgggcgcctgggtgtgcgaccggctggccacatgcacgccgccagccagcgaaggttccgcggagtccatgggacctgattcaagaccagaccctgacggccgcctgcccaccccctctgcccctctccactcttgagcatggatacagccaggcccagagcaagaccctgaagacccccaaccacggcctaaaagcctctttgtggctgaaaggtccctgtgacattttctgccacccaaacggaggcagctgacacatctcccgctcctctatggcccctgccttcccaggagtacaccccaacagcaccctctccagatgggagtgcccccaacagcaccctctccagatgagagtacaccccaacagcaccctctccagatgagagtacaccccaacagcaccctctccagatgagagtacaccccaacagcaccctctccagatgcagccccatctcctcagcaccccaggacctgagtatccccagctcaggtggtgagtcctcctgtccagcctgcatcaataaaatggggcagtgatggcctcccacatttgtccccttcttgg

SEQ ID NO: 133808 - DNA, 1560 bp, Homo sapiens
  Payload ID: 6140
  Gene Symbol: FCER2
  Gene Name: Fc fragment of IgE, low affinity II, receptor for (CD23)
  Uniprot ID: P06734
  ENST ID: ENST00000597921
  CDS Start-End: 183-1148
ctgcttaaacctctgtctctgacggtccctgccaatcgctctggtcgaccccaacacactaggaggacagacacaggctccaaactccactaagtgaccagagctgtgattgtgcccgctgagtggactgcgttgtcagggagtgagtgctccatcatcgggagaatccaagcaggaccgccatggaggaaggtcaatattcagagatcgaggagcttcccaggaggcggtgttgcaggcgtgggactcagatcgtgctgctggggctggtgaccgccgctctgtgggctgggctgctgactctgcttctcctgtggcactgggacaccacacagagtctaaaacagctggaagagagggctgcccggaacgtctctcaagtttccaagaacttggaaagccaccacggtgaccagatggcgcagaaatcccagtccacgcagatttcacaggaactggaggaacttcgagctgaacagcagagattgaaatctcaggacttggagctgtcctggaacctgaacgggcttcaagcagatctgagcagcttcaagtcccaggaattgaacgagaggaacgaagcttcagatttgctggaaagactccgggaggaggtgacaaagctaaggatggagttgcaggtgtccagcggctttgtgtgcaacacgtgccctgaaaagtggatcaatttccaacggaagtgctactacttcggcaagggcaccaagcagtgggtccacgcccggtatgcctgtgacgacatggaagggcagctggtcagcatccacagcccggaggagcaggacttcctgaccaagcatgccagccacaccggctcctggattggccttcggaacttggacctgaagggggagtttatctgggtggatgggagccacgtggactacagcaactgggctccaggggagcccaccagccggagccagggcgaggactgcgtgatgatgcggggctccggtcgctggaacgacgccttctgcgaccgtaagctgggcgcctgggtgtgcgaccggctggccacatgcacgccgccagccagcgaaggttccgcggagtccatgggacctgattcaagaccagaccctgacggccgcctgcccaccccctctgcccctctccactcttgagcatggatacagccaggcccagagcaagaccctgaagacccccaaccacggcctaaaagcctctttgtggctgaaaggtccctgtgacattttctgccacccaaacggaggcagctgacacatctcccgctcctctatggcccctgccttcccaggagtacaccccaacagcaccctctccagatgggagtgcccccaacagcaccctctccagatgagagtacaccccaacagcaccctctccagatgagagtacaccccaacagcaccctctccagatgagagtacaccccaacagcaccctctccagatgcagccccatctcctcagcaccccaggacctgagtatccccagctcaggtggtgagtcctcctgtccagcctgcatcaataaaatggggcagtgatggcc

SEQ ID NO: 133809 - DNA, 801 bp, Homo sapiens
  Payload ID: 6140
  Gene Symbol: FCER2
  Gene Name: Fc fragment of IgE, low affinity II, receptor for (CD23)
  ENST ID: ENST00000593418
  CDS Start-End: 325-801
atgggtgcacctgctgtgtagctcaagtgtgatgggctctggagtgccccacttctgatctcaggctgctatctctccacaccagctgtgtctccctgctaaccacgctagtgagtccagattgtagactaaacaaaatcagcaaatggcccctgagtgccaccaagtcccagatgctatcctgtgctggtaactaggatttgatggctcaccctaaccatcattaaatcccaaatcagccagagctgtgattgtgcccgctgagtggactgcgttgtcagggagtgagtgctccatcatcgggagaatccaagcaggaccgccatggaggaaggtcaatattcagagatcgaggagcttcccaggaggcggtgttgcaggcgtgggactcagatcgtgctgctggggctggtgaccgccgctctgtgggctgggctgctgactctgcttctcctgtggcactgggacaccacacagagtctaaaacagctggaagagagggctgcccggaacgtctctcaagtttccaagaacttggaaagccaccacggtgaccagatggcgcagaaatcccagtccacgcagatttcacaggaactggaggaacttcgagctgaacagcagagattgaaatctcaggaattgaacgagaggaacgaagcttcagatttgctggaaagactccgggaggaggtgacaaagctaaggatggagttgcaggtgtccagcggctttgtgtgcaacacgtgccctgaaaagtggatcaatttccaacggaagtgctactacttcggcaagggc

SEQ ID NO: 133810 - DNA, 4926 bp, Homo sapiens
  Payload ID: 6141
  Gene Symbol: FCGBP
  Gene Name: Fc fragment of IgG binding protein
  ENST ID: ENST00000620799
  CDS Start-End: 1-4926
tgcccaccccacagccactatgaggcgtgttcctacggctgcccgctgtcctgtggagacctcccagtgcccgagggctgtgagtcggcctgccgtgaaggctgtgtctgcgatgctggcttcgtgctcagtggtgacacgtgtgtacctgtgggccagtgtggctgcctccacgatgaccgctactacccactgggccagaccttctaccctggccctgggtgtgattccctttgccgctgccgggagggcggtgaggtgtcctgtgagccctccagctgcggcccgcatgagacctgccggccatccggtggcagcttgggctgcgtggccgtgggctctaccacctgccaggcgtcgggagatccccactacaccaccttcgatggccaccgcttcgacttcatgggcacctgcgtgtatgtgctggctcagacctgcggcacccggcctggcctgcatcggtttgccgtcctgcaggagaacgtggcctggggtaatgggcgagtcagtgtgaccagggtgatcacggtccaggtggcaaacttcaccctgcggctggagcagagacagtggaaggtcacggtgaacggtgtggacatgaagctgcccgtggtgctggccaacggccagatccgtgcctcccagcatggttcagatgttgtgattgagaccgacttcggcctgcgtgtggcctacgaccttgtgtactatgtgcgggtcaccgtccctggaaactactaccagctgatgtgtggcctgtgtgggaactacaatggcgaccccaaggatgacttccagaagcccaatggctcgcaggcaggcaacgccaatgagttcggcaactcctgggaggaggtggtgtccgactctccctgcctgccgccgcccacctgcccgccggggagcgagggctgtatccccagcgaggagtgtcctcccgagctggagaagaagtatcagaaggaggagttctgtgggctcctctccagccccacagggccactgtcctcctgccacaagctggtggatccccagggtcccttgaaagattgcatctttgatctctgcctgggtggtgggaacctgagcattctctgcagcaacatccatgcctacgtgagtgcttgccaggtggctggaggccacgtggagccctggaggaatgaaactttctgtcccatggaatgccctcagaacagtcactacgagctctgtgcggacacctgctccctgggctgctcggctctcagtgcccctctgcagtgcccagatgggtgtgctgagggctgccagtgtgactccggcttcctctacaacggccaagcctgcgtgcccatccagcaatgtggctgctaccacaatggtgcctactatgagccggagcagacagtcctcattgacaactgtcggcagcagtgcacgtgccatgcgggtaaagtcgtggtgtgccaggaacacagctgcaagccggggcaggtgtgccagccctccggaggcatcctgagctgcgtcaccaaagacccgtgccacggcgtgacatgccggccacaggagacatgcaaggagcagggtggccagggcgtgtgcctgcccaactatgaggccacgtgctggctgtggggcgacccacactaccactccttcgatggccggaagtttgacttccagggcacctgtaactatgtgctggcaacaactggctgcccgggggtcagcacccagggcctgacacccttcaccgtcaccaccaagaaccagaaccggggcaaccctgctgtgtcctacgtgagagtcgtcaccgtggctgccctcggcaccaacatctccatccacaaggacgagatcggcaaagtccgggtgaacggtgtgctcacagccttgcctgtctctgtggccgacgggcggatttcagtgacccagggtgcatcgaaggcactgctggtggctgactttggactgcaagtcagctatgactggaactggcgggtagacgtgacgctgcccagcagctatcatggcgcagtgtgcgggctctgcggtaacatggaccgcaaccccaacaatgaccaggtcttccctaatggcacactggctccctccatacccatctggggcggcagctggcgagccccaggctgggacccactgtgttgggacgaatgtcgggggtcctgcccaacgtgccctgaggaccggttggagcagtacgagggccctggcttctgcggacccctggcccccggcacagggggccctttcaccacctgccatgctcatgtgccacctgagagcttcttcaagggctgtgttctggacgtctgcatgggtggtggggaccgtgacattctttgcaaggctctggcttcctatgtggccgcctgccaggctgctggggttgtcatcgaagactggcgggcacaggttggctgtgagatcacctgcccagaaaacagccactatgaggtctgtggcccaccctgcccggccagctgtccgtcccctgcaccccttacgacgccagccgtatgtgagggcccctgtgtggagggctgccagtgcgacgcgggtttcgtgttaagtgctgaccgctgtgttcccctcaacaacggctgcggctgctgggccaatggcacctaccacgaggcgggcagtgagttttgggctgatggcacctgctcccagtggtgtcgctgcgggcctgggggtggctcgctggtctgcacacctgccagctgtgggctgggtgaagtgtgtggcctcctgccatccggccagcacggctgccagcccgtcagcacagctgagtgccaggcgtggggtgacccccattacgtcactctggatgggcaccgattcgatttccaaggcacctgcgagtacctgctgagtgcaccctgccacggaccacccttgggggctgagaacttcactgtcactgtagccaatgagcaccggggcagccaggctgtcagctacacccgcagtgtcaccctgcaaatctacaaccacagcctgacactgagtgcccgctggccccggaagctacaggtggacggcgtgttcgtcactctgcccttccagctggactcgctcctgcacgcacacctgagcggcgccgacgtggtggtgaccacaacctcagggctctcgctggctttcgatggggacagcttcgtgcgcctgcgcgtgccggcggcgtacgcgggctctctctgtggcttatgcgggaactacaaccaggaccccgcagacgacctgaaggcggtgggcgggaagcccgccggatggcaggtgggcggcgcccagggctgcggggaatgtgtgtccaagccatgcccgtcgccgtgcaccccagagcagcaagagtccttcggcggcccggacgcctgcggcgtgatctccgccaccgacggcccgctggcgccctgccacggccttgtgccgcccgcgcagtacttccagggctgcttgctggacgcctgccaagttcagggccatcctggaggcctctgtcctgcagtggccacctacgtggcagcctgtcaggccgctggggcccagctccgcgagtggaggcggccggacttctgtcccttccagtgccctgcccacagccactacgagctctgcggtgactcctgtcctgggagctgcccgagcctgtcggcacccgagggctgtgagtcggcctgccgtgaaggctgtgtctgcgatgctggcttcgtgctcagtggtgacacgtgtgtacctgtgggccagtgtggctgcctccacgatgaccgctactacccactgggccagaccttctaccctggccctgggtgtgattccctttgccgctgccgggagggcggtgaggtgtcctgtgagccctccagctgcggcccgcatgagacctgccggccatccggtggcagcttgggctgcgtggccgtgggctctaccacctgccaggcgtcgggagatccccactacaccaccttcgatggccaccgcttcgacttcatgggcacctgcgtgtatgtgctggctcagacctgcggcacccggcctggcctgcatcggtttgccgtcctgcaggagaacgtggcctggggtaatgggcgagtcagtgtgaccagggtgatcacggtccaggtggcaaacttcaccctgcggctggagcagagacagtggaaggtcacggtgaacggtgtggacatgaagctgcccgtggtgctggccaacggccagatccgtgcctcccagcatggttcagatgttgtgattgagaccgacttcggcctgcgtgtggcctacgaccttgtgtactatgtgcgggtcaccgtccctggaaactactaccagctgatgtgtggcctgtgtgggaactacaacggcgaccccaaggatgacttccagaagcccaatggctcgcaggcaggcaacgccaatgagttcggcaactcctgggaggaggtggtgcccgactctccctgcctgccgccgcccacctgcccgccggggagcgcgggctgtatccccagcgacaagtgtcctcccgagctggagaagaagtatcagaaggaggagttctgtgggctcctctccagccccacagggccactgtcctcctgccacaagctggtggatccccagggtcccttgaaagattgcatctttgatctctgcctgggtggtgggaacctgagcattctctgcagcaacatccatgcctacgtgagtgcttgccaggcggctggaggccacgtggagccctggaggaatgaaactttctgtcccatggaatgccctcagaacagtcactacgagctctgtgcggacacctgctccctgggctgctcggctctcagtgcccctctgcagtgcccagatgggtgtgctgagggctgccagtgtgactccggcttcctctacaacggc

SEQ ID NO: 133811 - DNA, 12787 bp, Homo sapiens
  Payload ID: 6141
  Gene Symbol: FCGBP
  Gene Name: Fc fragment of IgG binding protein
  ENST ID: ENST00000616721
  CDS Start-End: 9-12623
ctgcagccatgggtgccctatggagctggtggatactctgggctggagcaaccctcctgtggggattgacccaggaggcttcagtggacctcaagaacactggcagagaggaattcctcacagccttcctgcagaactatcagctggcctacagcaaggcctacccccgcctccttatctccagtctgtcagagagccccgcttcagtctccatcctcagccaggcagacaacacctcaaagaaggtcacagtgaggcccggggagtcggtcatggtcaacatcagtgccaaggctgagatgataggcagcaagatcttccagcatgcggtggtgatccattctgactatgccatctctgtgcaggcactaaatgccaagcctgacacagcggagctgacactgctgcggcccatccaggccctaggcaccgagtattttgtgctcacaccccccggcacctcagccaggaatgtcaaggagtttgccgtggtggccggtgccgcaggtgcctcggtcagtgtcacgctgaaggggtcagtgacattcaatggcaagttctatccagcaggcgatgtcctaagagtgactctacagccctacaatgtggcccagctacagagctcagtggatctctcggggtcaaaggtcacagctagtagccccgtggctgtcctctctggccacagctgtgcgcagaaacatacgacctgcaaccatgtggttgagcagctgctacccacgtctgcctggggcacccactatgtagtacccacgctggcctcccaatctcgctatgatttggccttcgttgtggccagccaggccacaaagctgacctacaaccatgggggtatcactggctcccgtgggctccaggcaggtgatgtggtagagtttgaggtccggccatcctggccactctacctgtctgcaaatgtgggcatccaggtcctgttgtttggcacaggtgccataaggaatgaagtgacttatgacccctacctggtcctgatcccagatgtggcggcctactgcccagcctatgtggtcaagagtgtaccaggctgtgagggcgtggccctggtagtggcacagacgaaggctatcagcgggctgaccatagatgggcatgcagtgggggccaagctcacctgggaggctgtgccaggcagtgagttctcgtatgctgaagtggagctcggcacagctgacatgatccacacggccgaggccaccaccaacttgggactgctcaccttcgggctggccaaggctataggctacgcaacagctgctgattgcggccggactgtactgtccccagtggagccctcctgcgaaggcatgcagtgcgcagccgggcagcgctgccaggtggtaggcgggaaggccgggtgtgtggcggagtccaccgctgtctgccgcgcccagggcgacccccattacaccaccttcgacggccgtcgctacgacatgatgggcacctgttcgtacacgatggtggagctgtgcagcgaggacgacaccctgcccgccttcagcgtggaggccaagaacgagcaccggggcagccgccgcgtctcctacgtgggcctcgtcactgtgcgcgcctacagccactctgtgtcgctgacccgcggtgaagttggcttcgtcctggttgacaaccagcgctcgcgcctgccagtctccctgagtgagggtcgcctgcgtgtgtaccagagcggaccacgggccgtggtggagctggtctttgggctggtggtcacttatgactgggactgccagctggcactcagcctgcctgcacgcttccaagaccaggtgtgcgggctgtgtggcaactataatggtgacccagcagacgacttcctcacgcctgacggggctctggctcctgacgctgtggagttcgcaagtagctggaagctggatgatggggactacctgtgtgaggatggctgccagaacaactgtcccgcctgcaccccaggccaggcccaacactatgagggcgaccgactctgtggcatgctgaccaagctcgatggccccttcgctgtctgccatgacaccctggaccccaggcccttcctggagcagtgtgtatatgacctgtgtgtggtcggtggggagcggctcagcctgtgccgtggcctcagcgcctatgcccaggcctgtctggagcttggcatctcggttggggactggagatcaccagccaactgccccctgtcctgccctgccaacagccgctatgagctctgcggccctgcttgcccgacctcctgcaacggggctgcggcgccgtccaactgctccgggcgcccctgcgtggagggctgcgtgtgcctcccaggcttcgtggccagcggcggcgcctgcgtgccggcctcgtcgtgtggctgcaccttccagggtctccagctcgctccgggccaggaagtgtgggcggacgagttgtgccaaaggcgctgcacctgcaacggcgccacccatcaggtcacctgccgcgacaagcagagctgcccggcgggtgagcgctgcagcgtccagaacggcctcctgggctgctaccccgatcgcttcgggacctgccaggggtccggggacccacactatgtgagcttcgacggccggcgcttcgacttcatgggcacctgcacgtacctgctggtcggctcatgcggccagaacgcagcgctgcctgccttccgggtgctggtggaaaacgagcatcggggcagccagactgtgagctacacgcgcgccgtgcgggtggaggcccgcggggtgaaggtggccgtgcgccgggagtaccccgggcaagtgctggtggatgacgtccttcagtatctgcccttccaagcagcagatgggcaggtgcaggtgttccgacagggcagggatgccgtcgtgcgcacggactttggcctgactgtcacttatgactggaatgcacgagtgactgccaaggtgcccagcagctatgctgaggccctgtgtggactctgtgggaacttcaacggggacccagctgatgacctggctctgcggggtgggggtcaagctgccaatgcactggcctttgggaacagctggcaagaagagacgaggcccggctgtggagcaactgaaccgggtgactgtcccaagctggactccctggtggcccagcagctgcagagcaagaatgagtgtggaatccttgccgaccccaaggggcccttccgggagtgccatagcaagctggacccccagggtgccgtgcgcgactgtgtctatgaccgctgcctgctgccaggccagtctgggccactgtgtgacgcactggccacctatgctgctgcatgccaggctgctggagccacagtgcacccctggaggagtgaagaactttgcccactgagctgcccaccccacagccactatgaggcgtgttcctacggctgcccgctgtcctgtggagacctcccagtgcccgagggctgtgagtcggcctgccgtgaaggctgtgtctgcgatgctggcttcgtgctcagtggtgacacgtgtgtacctgtgggccagtgtggctgcctccacgatgaccgctactacccactgggccagaccttctaccctggccctgggtgtgattccctttgccgctgccgggagggcggtgaggtgtcctgtgagccctccagctgcggcccgcatgagacctgccggccatccggtggcagcttgggctgcgtggccgtgggctctaccacctgccaggcgtcgggagatccccactacaccaccttcgatggccaccgcttcgacttcatgggcacctgcgtgtatgtgctggctcagacctgcggcacccggcctggcctgcatcggtttgccgtcctgcaggagaacgtggcctggggtaatgggcgagtcagtgtgaccagggtgatcacggtccaggtggcaaacttcaccctgcggctggagcagagacagtggaaggtcacggtgaacggtgtggacatgaagctgcccgtggtgctggccaacggccagatccgtgcctcccagcatggttcagatgttgtgattgagaccgacttcggcctgcgtgtggcctacgaccttgtgtactatgtgcgggtcaccgtccctggaaactactaccagctgatgtgtggcctgtgtgggaactacaatggcgaccccaaggatgacttccagaagcccaatggctcgcaggcaggcaacgccaatgagttcggcaactcctgggaggaggtggtgtccgactctccctgcctgccgccgcccacctgcccgccggggagcgagggctgtatccccagcgaggagtgtcctcccgagctggagaagaagtatcagaaggaggagttctgtgggctcctctccagccccacagggccactgtcctcctgccacaagctggtggatccccagggtcccttgaaagattgcatctttgatctctgcctgggtggtgggaacctgagcattctctgcagcaacatccatgcctacgtgagtgcttgccaggtggctggaggccacgtggagccctggaggaatgaaactttctgtcccatggaatgccctcagaacagtcactacgagctctgtgcggacacctgctccctgggctgctcggctctcagtgcccctctgcagtgcccagatgggtgtgctgagggctgccagtgtgactccggcttcctctacaacggccaagcctgcgtgcccatccagcaatgtggctgctaccacaatggtgcctactatgagccggagcagacagtcctcattgacaactgtcggcagcagtgcacgtgccatgcgggtaaagtcgtggtgtgccaggaacacagctgcaagccggggcaggtgtgccagccctccggaggcatcctgagctgcgtcaccaaagacccgtgccacggcgtgacatgccggccacaggagacatgcaaggagcagggtggccagggcgtgtgcctgcccaactatgaggccacgtgctggctgtggggcgacccacactaccactccttcgatggccggaagtttgacttccagggcacctgtaactatgtgctggcaacaactggctgcccgggggtcagcacccagggcctgacacccttcaccgtcaccaccaagaaccagaaccggggcaaccctgctgtgtcctacgtgagagtcgtcaccgtggctgccctcggcaccaacatctccatccacaaggacgagatcggcaaagtccgggtgaacggtgtgctcacagccttgcctgtctctgtggccgacgggcggatttcagtgacccagggtgcatcgaaggcactgctggtggctgactttggactgcaagtcagctatgactggaactggcgggtagacgtgacgctgcccagcagctatcatggcgcagtgtgcgggctctgcggtaacatggaccgcaaccccaacaatgaccaggtcttccctaatggcacactggctccctccatacccatctggggcggcagctggcgagccccaggctgggacccactgtgttgggacgaatgtcgggggtcctgcccaacgtgccctgaggaccggttggagcagtacgagggccctggcttctgcggacccctggcccccggcacagggggccctttcaccacctgccatgctcatgtgccacctgagagcttcttcaagggctgtgttctggacgtctgcatgggtggtggggaccgtgacattctttgcaaggctctggcttcctatgtggccgcctgccaggctgctggggttgtcatcgaagactggcgggcacaggttggctgtgagatcacctgcccagaaaacagccactatgaggtctgtggcccaccctgcccggccagctgtccgtcccctgcaccccttacgacgccagccgtatgtgagggcccctgtgtggagggctgccagtgcgacgcgggtttcgtgttaagtgctgaccgctgtgttcccctcaacaacggctgcggctgctgggccaatggcacctaccacgaggcgggcagtgagttttgggctgatggcacctgctcccagtggtgtcgctgcgggcctgggggtggctcgctggtctgcacacctgccagctgtgggctgggtgaagtgtgtggcctcctgccatccggccagcacggctgccagcccgtcagcacagctgagtgccaggcgtggggtgacccccattacgtcactctggatgggcaccgattcgatttccaaggcacctgcgagtacctgctgagtgcaccctgccacggaccacccttgggggctgagaacttcactgtcactgtagccaatgagcaccggggcagccaggctgtcagctacacccgcagtgtcaccctgcaaatctacaaccacagcctgacactgagtgcccgctggccccggaagctacaggtggacggcgtgttcgtcactctgcccttccagctggactcgctcctgcacgcacacctgagcggcgccgacgtggtggtgaccacaacctcagggctctcgctggctttcgatggggacagcttcgtgcgcctgcgcgtgccggcggcgtacgcgggctctctctgtggcttatgcgggaactacaaccaggaccccgcagacgacctgaaggcggtgggcgggaagcccgccggatggcaggtgggcggcgcccagggctgcggggaatgtgtgtccaagccatgcccgtcgccgtgcaccccagagcagcaagagtccttcggcggcccggacgcctgcggcgtgatctccgccaccgacggcccgctggcgccctgccacggccttgtgccgcccgcgcagtacttccagggctgcttgctggacgcctgccaagttcagggccatcctggaggcctctgtcctgcagtggccacctacgtggcagcctgtcaggccgctggggcccagctccgcgagtggaggcggccggacttctgtcccttccagtgccctgcccacagccactacgagctctgcggtgactcctgtcctgggagctgcccgagcctgtcggcacccgagggctgtgagtcggcctgccgtgaaggctgtgtctgcgatgctggcttcgtgctcagtggtgacacgtgtgtacctgtgggccagtgtggctgcctccacgatgaccgctactacccactgggccagaccttctaccctggccctgggtgtgattccctttgccgctgccgggagggcggtgaggtgtcctgtgagccctccagctgcggcccgcatgagacctgccggccatccggtggcagcttgggctgcgtggccgtgggctctaccacctgccaggcgtcgggagatccccactacaccaccttcgatggccaccgcttcgacttcatgggcacctgcgtgtatgtgctggctcagacctgcggcacccggcctggcctgcatcggtttgccgtcctgcaggagaacgtggcctggggtaatgggcgagtcagtgtgaccagggtgatcacggtccaggtggcaaacttcaccctgcggctggagcagagacagtggaaggtcacggtgaacggtgtggacatgaagctgcccgtggtgctggccaacggccagatccgtgcctcccagcatggttcagatgttgtgattgagaccgacttcggcctgcgtgtggcctacgaccttgtgtactatgtgcgggtcaccgtccctggaaactactaccagctgatgtgtggcctgtgtgggaactacaacggcgaccccaaggatgacttccagaagcccaatggctcgcaggcaggcaacgccaatgagttcggcaactcctgggaggaggtggtgcccgactctccctgcctgccgccgcccacctgcccgccggggagcgcgggctgtatccccagcgacaagtgtcctcccgagctggagaagaagtatcagaaggaggagttctgtgggctcctctccagccccacagggccactgtcctcctgccacaagctggtggatccccagggtcccttgaaagattgcatctttgatctctgcctgggtggtgggaacctgagcattctctgcagcaacatccatgcctacgtgagtgcttgccaggcggctggaggccacgtggagccctggaggaatgaaactttctgtcccatggaatgccctcagaacagtcactacgagctctgtgcggacacctgctccctgggctgctcggctctcagtgcccctctgcagtgcccagatgggtgtgctgagggctgccagtgtgactccggcttcctctacaacggccaagcctgcgtgcccatccagcaatgtggctgctaccacaatggtgtctactatgagccggagcagacagtcctcattgacaactgtcggcagcagtgcacgtgccatgtgggtaaagtcgtggtgtgccaggaacacagctgcaagccggggcaggtgtgccagccctccggaggcatcctgagctgcgtcaccaaagacccgtgccacggcgtgacatgccggccacaggagacatgcaaggagcagggtggccagggcgtgtgcctgcccaactatgaggccacgtgctggctgtggggcgacccacactaccactccttcgatggccggaagtttgacttccagggcacctgtaactatgtgctggcaacaactggctgcccgggggtcagcacccagggcctgacacccttcaccgtcaccaccaagaaccagaaccggggcaaccctgctgtgtcctacgtgagagtcgtcaccgtggctgccctcggcaccaacatctccatccacaaggacgagatcggcaaagtccgggtgaacggtgtgctcacagccttgcctgtctccgtggccgacgggcggatttcagtggcccagggtgcatcgaaggcactgctggtggctgactttggactgcaagtcagctatgactggaactggcgggtagacgtgacgctccccagcagctatcatggcgcagtgtgcgggctctgcggtaacatggaccgcaaccccaacaatgaccaggtcttccctaatggcacactggctccctccatacccatctggggcggcagctggcgagccccaggctgggacccactgtgttgggacgaatgtcgggggtcctgcccaacgtgccctgaggaccggttggagcagtacgagggccctggcttctgcggacccctttcatctggcacagggggccccttcaccacctgccatgctcatgtgccacctgagagcttcttcaagggctgtgttctggacgtctgcatgggtggtggggaccgtgacattctttgcaaggctctggcttcctacgtggccgcctgccaggccgctggggttgtcatcgaagactggcgggcacaggttggctgtgagatcacctgcccagaaaacagccactatgaggtctgtggcccaccctgcccagccagctgtccgtcccctgcaccccttacgacgccagccgtatgtgagggcccctgtgtggagggctgccagtgcgacgcgggtttcgtgttaagtgctgaccgctgtgttcccctcaacaacggctgcggctgctgggccaatggcacctaccacgaggcgggcagtgagttttgggctgatggcacctgctcccagtggtgtcgctgcgggcctgggggtggctcgctggtctgcacacctgccagctgtgggctgggtgaagtgtgtggcctcctgccatccggccagcacggctgccagcccgtcagcacagctgagtgccaggcgtggggtgacccccattacgtcactctggatgggcaccgattcgatttccaaggcacctgcgagtacctgctgagtgcaccctgccacggaccacccttgggggctgagaacttcactgtcactgtagccaatgagcaccggggcagccaggctgtcagctacacccgcagtgtcaccctgcaaatctacaaccacagcctgacactgagtgcccgctggccccggaagctacaggtcgacggcgtgttcgtggctctgcctttccagctggactcgctcctgcacgcacacctgagcggcgccgacgtggtggtgaccacaacctcagggctctcgctggctttcgatggggacagcttcgtgcgcctgcgcgtgccggcggcgtacgcggcctctctctgtggcttatgcgggaactacaaccaggaccccgcagacgacctcaaggctgtgggcgggaagcccgctggatggcaggtgggcggggcccagggctgcggggaatgtgtgtccaagccatgcccgtcgccgtgcaccccagagcagcaggagtccttcggcggcccggacgcctgcggcgtgatctccgccaccgacggcccgctggcaccctgccacggccttgtgccgcccgcgcagtacttccagggctgcttgctggacgcctgccaagttcagggccatcctggaggcctctgtcctgcagtggctacctacgtggcagcctgtcaggccgctggggcccagctcggcgagtggaggcggccggacttctgtcccttgcagtgccctgcccacagccactatgagctctgcggtgactcctgccctgtgagctgcccgagcctctcagcacccgagggctgtgagtcggcctgccgtgaaggctgtgtctgcgatgctggcttcgtactcagtggtgacacctgcgtacccgtgggccagtgtggctgcctccatgatggccgctactacccactgggcgaggtcttctacccgggccctgagtgtgagcggcgctgtgagtgtgggccaggtggccatgtcacctgccaggagggcgcagcctgtgggccccatgaggagtgccggttagaggatggtgtccaggcctgtcatgccacaggctgtggccgctgcctggccaacgggggcatccactacatcacccttgatggccgtgtctacgacctgcatggctcctgctcctatgtcttggcccaagtctgccacccaaagcctggggacgaggacttttccatcgtgcttgagaagaatgcagctggagatctccaacgcctcctggttactgtggctggccaggttgtgagcctagctcaggggcagcaggtcaccgtggacggcgaggctgtggccctgcctgtggctgtgggccgcgtgcgggtgaccgccgagggccgaaacatggttctgcagacgaccaaggggctgcggcttctctttgatggcgatgcccacctcctcatgtccatccccagccccttccgtggacggctctgtggcctctgtgggaacttcaatggcaactggagtgacgactttgtcctgcccaatggctcagcagcgtccagtgtggagaccttcggggctgcatggcgggcgcccggctcctccaagggctgtggcgagggctgcgggccccaaggctgcccagtgtgcttggcagaggagactgcaccctatgagagcaacgaggcctgcgggcagctccggaacccccagggccccttcgcgacctgccaggcggtgctgagtccctctgagtacttccgccaatgcgtatacgacctgtgcgcgcaaaagggtgacaaagccttcctgtgccgcagcctggcagcctacacggcggcctgtcaggcagctggcgtggccgtgaagccctggaggacagacagcttctgcccgctccattgccccgcccacagccactactccatctgcactcgcacctgccagggatcctgtgcggctctctccggcctcacgggctgcaccacccgctgttttgagggctgtgagtgcgacgaccgcttcctgctttcccagggtgtctgcatccctgtccaagattgtggctgcacccataatggccgatacttgccggtaaactcctccctgctgacctcagactgcagcgagcgctgttcctgttcctcaagctctggcctgacatgccaggcagctggctgcccaccaggccgtgtatgtgaggtcaaggctgaagcccggaactgctgggccacccgtggtctctgtgtcctgtctgtgggtgccaacctcaccacctttgatggggcccgtggtgccaccacctctcctggtgtctatgagctctcttcccgctgcccaggactacagaataccatcccctggtaccgtgtagttgccgaagtccagatctgccatggcaaaacggaggctgtgggccaggtccacatcttcttccaggatgggatggtgacgttgactccaaacaagggtgtgtgggtgaatggtctccgagtggatctcccagctgagaagttagcatctgtgtccgtgagtcgtacacctgatggctccctgctagtccgccagaaggcaggggtccaggtgtggcttggagccaatgggaaggtggctgtgattgtcagcaatgaccatgctgggaaactgtgtggggcctgtggaaactttgacggggaccagaccaatgattggcatgactcccaggagaagccagcgatggagaaatggagagcgcaggacttctccccatgttatggctgatcagtcatccaccaggaacgaagatttcctgaagaagacctggtccctctggaggttgcagtggctgaaggatgcatcatgtgctcctaccctgctctaccgcttttctgggtcacagaggccaaatgtgagagcattgaataaatatcttaagctaagctgca

SEQ ID NO: 133812 - DNA, 2180 bp, Homo sapiens
  Payload ID: 6142
  Gene Symbol: FCGR1A
  Gene Name: Fc fragment of IgG, high affinity Ia, receptor (CD64)
  Uniprot ID: P12314
  ENST ID: ENST00000369168
  CDS Start-End: 55-1179
cttcaatatcttgcatgttacagatttcactgctcccaccagcttggagacaacatgtggttcttgacaactctgctcctttgggttccagttgatgggcaagtggacaccacaaaggcagtgatcactttgcagcctccatgggtcagcgtgttccaagaggaaaccgtaaccttgcactgtgaggtgctccatctgcctgggagcagctctacacagtggtttctcaatggcacagccactcagacctcgacccccagctacagaatcacctctgccagtgtcaatgacagtggtgaatacaggtgccagagaggtctctcagggcgaagtgaccccatacagctggaaatccacagaggctggctactactgcaggtctccagcagagtcttcacggaaggagaacctctggccttgaggtgtcatgcgtggaaggataagctggtgtacaatgtgctttactatcgaaatggcaaagcctttaagtttttccactggaattctaacctcaccattctgaaaaccaacataagtcacaatggcacctaccattgctcaggcatgggaaagcatcgctacacatcagcaggaatatctgtcactgtgaaagagctatttccagctccagtgctgaatgcatctgtgacatccccactcctggaggggaatctggtcaccctgagctgtgaaacaaagttgctcttgcagaggcctggtttgcagctttacttctccttctacatgggcagcaagaccctgcgaggcaggaacacatcctctgaataccaaatactaactgctagaagagaagactctgggttatactggtgcgaggctgccacagaggatggaaatgtccttaagcgcagccctgagttggagcttcaagtgcttggcctccagttaccaactcctgtctggtttcatgtccttttctatctggcagtgggaataatgtttttagtgaacactgttctctgggtgacaatacgtaaagaactgaaaagaaagaaaaagtgggatttagaaatctctttggattctggtcatgagaagaaggtaatttccagccttcaagaagacagacatttagaagaagagctgaaatgtcaggaacaaaaagaagaacagctgcaggaaggggtgcaccggaaggagccccagggggccacgtagcagcggctcagtgggtggccatcgatctggaccgtcccctgcccacttgctccccgtgagcactgcgtacaaacatccaaaagttcaacaacaccagaactgtgtgtctcatggtatgtaactcttaaagcaaataaatgaactgacttcaactgggatacatttggaaatgtggtcatcaaagatgacttgaaatgaggcctactctaaagaattcttgaaaaacttacaagtcaagcctagcctgataatcctattacatagtttgaaaaatagtattttatttctcagaacaaggtaaaaaggtgagtgggtgcatatgtacagaagattaagacagagaaacagacagaaagagacacacacacagccaggagtgggtagatttcagggagacaagagggaatagtatagacaataaggaaggaaatagtacttacaaatgactcctaagggactgtgagactgagagggctcacgcctctgtgttcaggatacttagttcatggcttttctctttgactttactaaaagagaatgtctccatacgcgttctaggcatacaagggggtaactcatgatgagaaatggatgtgttattcttgccctctcttttgaggctctctcataacccctctatttctagagacaacaaaaatgctgccagtcctaggcccctgccctgtaggaaggcagaatgtaactgttctgtttgtttaacgattaagtccaaatctccaagtgcggcactgcaaagagacgcttcaagtggggagaagcggcgataccatagagtccagatcttgcctccagagatttgctttaccttcctgattttctggttactaattagcttcaggatacgctgctctcatacttgggctgtagtttggagacaaaatattttcctgccactgtgtaacatagctgaggtaaaaactgaactatgtaaatgactctactaaaagtttagggaaaaaaaacaggaggagtatgacaca

SEQ ID NO: 133813 - DNA, 795 bp, Homo sapiens
  Payload ID: 6142
  Gene Symbol: FCGR1A
  Gene Name: Fc fragment of IgG, high affinity Ia, receptor (CD64)
  ENST ID: ENST00000444948
  CDS Start-End: 74-795
ggagccaccagcagaacctcttcaatatcttgcatgttacagatttcactgctcccaccagcttggagacaacatgtggttcttgacaactctgctcctttggggctggctactactgcaggtctccagcagagtcttcacggaaggagaacctctggccttgaggtgtcatgcgtggaaggataagctggtgtacaatgtgctttactatcgaaatggcaaagcctttaagtttttccactggaattctaacctcaccattctgaaaaccaacataagtcacaatggcacctaccattgctcaggcatgggaaagcatcgctacacatcagcaggaatatctgtcactgtgaaagagctatttccagctccagtgctgaatgcatctgtgacatccccactcctggaggggaatctggtcaccctgagctgtgaaacaaagttgctcttgcagaggcctggtttgcagctttacttctccttctacatgggcagcaagaccctgcgaggcaggaacacatcctctgaataccaaatactaactgctagaagagaagactctgggttatactggtgcgaggctgccacagaggatggaaatgtccttaagcgcagccctgagttggagcttcaagtgcttggcctccagttaccaactcctgtctggtttcatgtccttttctatctggcagtgggaataatgtttttagtgaacactgttctctgggtgacaatacgtaaagaactgaaaagaaagaaaaagtgggatttagaaatctctttggattctggtca

SEQ ID NO: 133814 - DNA, 570 bp, Homo sapiens
  Payload ID: 6143
  Gene Symbol: FCGR1B
  Gene Name: Fc fragment of IgG, high affinity Ib, receptor (CD64)
  Uniprot ID: Q92637
  ENST ID: ENST00000369383
  CDS Start-End: 1-567
atgtggttcttgacaactctgctcctttggggctggctactactgcaggtctccagcagagtcttcatggaaggagaacctctggccttgaggtgtcatgcgtggaaggataagctggtgtacaatgtgctttactatcgaaatggcaaagcctttaagtttttccactggaattctaacctcaccattctgaaaaccaacataagtcacaatggcacctaccattgctcaggcatgggaaagcatcgctacacatcagcaggaatatcacaatacactgtgaaaggcctccagttaccaactcctgtctggtttcatgtccttttctatctggcagtgggaataatgtttttagtgaacactgttctctgggtgacaatacgtaaagaactgaaaagaaagaaaaagtggaatttagaaatctctttggattctggtcatgagaagaaggtaatttccagccttcaagaagacagacatttagaagaagagctgaaatgtcaggaacaaaaagaagaacagctgcaggaaggggtgcaccggaaggagccccagggggccacgtagcag

SEQ ID NO: 133815 - DNA, 1044 bp, Homo sapiens
  Payload ID: 6143
  Gene Symbol: FCGR1B
  Gene Name: Fc fragment of IgG, high affinity Ib, receptor (CD64)
  ENST ID: ENST00000369384
  CDS Start-End: 44-886
tgcatgttacagatttcactactcccaccagcttggagacaacatgtggttcttgacaactctgctcctttgggttccagttgatgggcaagtggacaccacaaaggcagtgatcactttgcagcctccatgggtcagcgtgttccaagaggaaaccataaccttgcactgtgaggtgctccatctgcctgggagcagctccacacagtggtttctcaatggcacagccactcagacctcgacccccagctacagaatcacctctgccagtgtcaatgacagtggtgaatacaggtgccagagaggtctctcagggcgaagtgaccccatacagctggaaatccacagaggctggctactactgcaggtctccagcagagtcttcatggaaggagaacctctggccttgaggtgtcatgcgtggaaggataagctggtgtacaatgtgctttactatcgaaatggcaaagcctttaagtttttccactggaattctaacctcaccattctgaaaaccaacataagtcacaatggcacctaccattgctcaggcatgggaaagcatcgctacacatcagcaggaatatcacaatacactgtgaaaggcctccagttaccaactcctgtctggtttcatgtccttttctatctggcagtgggaataatgtttttagtgaacactgttctctgggtgacaatacgtaaagaactgaaaagaaagaaaaagtggaatttagaaatctctttggattctggtcatgagaagaaggtaatttccagccttcaagaagacagacatttagaagaagagctgaaatgtcaggaacaaaaagaagaacagctgcaggaaggggtgcaccggaaggagccccagggggccacgtagcagcggctcagttggtggccatcgatctggaccgtcccctgcccacttgctccccgtgagcactgcgtacaaacatccaaaagttcaacaacaccagaactgtgtgtctcatggtatataactcttaaagcaaataaatgaactgacttcaactggga

SEQ ID NO: 133816 - DNA, 1584 bp, Homo sapiens
  Payload ID: 6143
  Gene Symbol: FCGR1B
  Gene Name: Fc fragment of IgG, high affinity Ib, receptor (CD64)
  ENST ID: ENST00000616817
  CDS Start-End: 51-728
aatatcttgcatgttacagatttcactactcccaccagcttggagacaacatgtggttcttgacaactctgctcctttgggttccagttgatgggcaagtggtagacaccacaaaggcagtgatcactttgcagcctccatgggtcagcgtgttccaagaggaaaccataaccttgcactgtgaggtgctccatctgcctgggagcagctccacacagtggtttctcaatggcacagccactcagacctcgacccccagctacagaatcacctctgccagtgtcaatgacagtggtgaatacaggtgccagagaggtctctcagggcgaagtgaccccatacagctggaaatccacagaggctggctactactgcaggtctccagcagagtcttcatggaaggagaacctctggccttgaggtgtcatgcgtggaaggataagctggtgtacaatgtgctttactatcgaaatggcaaagcctttaagtttttccactggaattctaacctcaccattctgaaaaccaacataagtcacaatggcacctaccattgctcaggcatgggaaagcatcgctacacatcagcaggaatatcacaatacactgtgaaagagctatttccagctccagtgctgaatgcatctgtgacatccccactcctggaggggaatctggtcaccctgagctgtgaaacaaagttgctcttgcagaggcctggtttgtagctttacttctccttctacatgggcagcaagaccctgcgaggcaggaacacatcctctgaataccaaatactaactgctagaagagaagactctgggttatactggtgcgaggctgccacagaggatggaaatgtccttaagcacagccctgagttggagcttcaagtgcttggtgagaatgacgggaagccactggcacagaagaagggactcccttatctcccatgggactgaggtttgttcaagggtttttggcccagacaagaggggaaagtctcttcaggaaaagcccacaagcaggcctttccatccttgattcacaacatcactcttctcctcgcaaactgttaaatttcctttcctttctttttctttttcctttgcctttccttcctctatttctttccttcctccatttctttccttcattttctcctctgtccttcttttcttctccttcattttattttcccctccctcccactcttccctccactccatgacccctccttctctctctctctctctccctgcttccctgcctccctcctcctcaccaacaatctcaccaacaatttatcaagttcttcctatctgttgtcatacgtctggggatataaagacatttgagtatagttcttgcttcaaggagctcacaaggtggatttatcagacagtgattttgtaaactgcaaatcaccacctccccaagtatctctgtttaactgaggcagagggattgtgagctctagaacaaagtctccttgggggggaaaaaagttcatcttcaacccaaattcatttcaagtattaaatggcacagagatatcagttgtctctggaactagggagtaag

SEQ ID NO: 133817 - DNA, 947 bp, Homo sapiens
  Payload ID: 6143
  Gene Symbol: FCGR1B
  Gene Name: Fc fragment of IgG, high affinity Ib, receptor (CD64)
  ENST ID: ENST00000472543
  CDS Start-End: 38-712
ttacagatttcactactcccaccagcttggagacaacatgtggttcttgacaactctgctcctttgggttccagttgatgggcaagtggacaccacaaaggcagtgatcactttgcagcctccatgggtcagcgtgttccaagaggaaaccataaccttgcactgtgaggtgctccatctgcctgggagcagctccacacagtggtttctcaatggcacagccactcagacctcgacccccagctacagaatcacctctgccagtgtcaatgacagtggtgaatacaggtgccagagaggtctctcagggcgaagtgaccccatacagctggaaatccacagaggctggctactactgcaggtctccagcagagtcttcatggaaggagaacctctggccttgaggtgtcatgcgtggaaggataagctggtgtacaatgtgctttactatcgaaatggcaaagcctttaagtttttccactggaattctaacctcaccattctgaaaaccaacataagtcacaatggcacctaccattgctcaggcatgggaaagcatcgctacacatcagcaggaatatcacaatacactgtgaaagagctatttccagctccagtgctgaatgcatctgtgacatccccactcctggaggggaatctggtcaccctgagctgtgaaacaaagttgctcttgcagaggcctggtttgtagctttacttctccttctacatgggcagcaagaccctgcgaggcaggaacacatcctctgaataccaaatactaactgctagaagagaagactctgggttatactggtgcgaggctgccacagaggatggaaatgtccttaagcacagccctgagttggagcttcaagtgcttggcctccagttaccaactcctgtctggtttcatgtccttttctatctggcagtgggaataatgt

SEQ ID NO: 133818 - DNA, 771 bp, Homo sapiens
  Payload ID: 6143
  Gene Symbol: FCGR1B
  Gene Name: Fc fragment of IgG, high affinity Ib, receptor (CD64)
  ENST ID: ENST00000369178
  CDS Start-End: 23-771
ctgctcctttgggttccagttgatgggcaagtggcctccatgggtcagcgtgttccaagaggaaaccataaccttgcactgtgaggtgctccatctgcctgggagcagctccacacagtggtttctcaatggcacagccactcagacctcgacccccagctacagaatcacctctgccagtgtcaatgacagtggtgaatacaggtgccagagaggtctctcagggcgaagtgaccccatacagctggaaatccacagaggctggctactactgcaggtctccagcagagtcttcatggaaggagaacctctggccttgaggtgtcatgcgtggaaggataagctggtgtacaatgtgctttactatcgaaatggcaaagcctttaagtttttccactggaattctaacctcaccattctgaaaaccaacataagtcacaatggcacctaccattgctcaggcatgggaaagcatcgctacacatcagcaggaatatcacaatacactgtgaaaggcctccagttaccaactcctgtctggtttcatgtccttttctatctggcagtgggaataatgtttttagtgaacactgttctctgggtgacaatacgtaaagaactgaaaagaaagaaaaagtggaatttagaaatctctttggattctggtcatgagaagaaggtaatttccagccttcaagaagacagacatttagaagaagagctgaaatgtcaggaacaaaaagaagaacagctgcaggaaggggtgcaccg

SEQ ID NO: 133819 - DNA, 1581 bp, Homo sapiens
  Payload ID: 6143
  Gene Symbol: FCGR1B
  Gene Name: Fc fragment of IgG, high affinity Ib, receptor (CD64)
  ENST ID: ENST00000623603
  CDS Start-End: 51-725
aatatcttgcatgttacagatttcactactcccaccagcttggagacaacatgtggttcttgacaactctgctcctttgggttccagttgatgggcaagtggacaccacaaaggcagtgatcactttgcagcctccatgggtcagcgtgttccaagaggaaaccataaccttgcactgtgaggtgctccatctgcctgggagcagctccacacagtggtttctcaatggcacagccactcagacctcgacccccagctacagaatcacctctgccagtgtcaatgacagtggtgaatacaggtgccagagaggtctctcagggcgaagtgaccccatacagctggaaatccacagaggctggctactactgcaggtctccagcagagtcttcatggaaggagaacctctggccttgaggtgtcatgcgtggaaggataagctggtgtacaatgtgctttactatcgaaatggcaaagcctttaagtttttccactggaattctaacctcaccattctgaaaaccaacataagtcacaatggcacctaccattgctcaggcatgggaaagcatcgctacacatcagcaggaatatcacaatacactgtgaaagagctatttccagctccagtgctgaatgcatctgtgacatccccactcctggaggggaatctggtcaccctgagctgtgaaacaaagttgctcttgcagaggcctggtttgtagctttacttctccttctacatgggcagcaagaccctgcgaggcaggaacacatcctctgaataccaaatactaactgctagaagagaagactctgggttatactggtgcgaggctgccacagaggatggaaatgtccttaagcacagccctgagttggagcttcaagtgcttggtgagaatgacgggaagccactggcacagaagaagggactcccttatctcccatgggactgaggtttgttcaagggtttttggcccagacaagaggggaaagtctcttcaggaaaagcccacaagcaggcctttccatccttgattcacaacatcactcttctcctcgcaaactgttaaatttcctttcctttctttttctttttcctttgcctttccttcctctatttctttccttcctccatttctttccttcattttctcctctgtccttcttttcttctccttcattttattttcccctccctcccactcttccctccactccatgacccctccttctctctctctctctctccctgcttccctgcctccctcctcctcaccaacaatctcaccaacaatttatcaagttcttcctatctgttgtcatacgtctggggatataaagacatttgagtatagttcttgcttcaaggagctcacaaggtggatttatcagacagtgattttgtaaactgcaaatcaccacctccccaagtatctctgtttaactgaggcagagggattgtgagctctagaacaaagtctccttgggggggaaaaaagttcatcttcaacccaaattcatttcaagtattaaatggcacagagatatcagttgtctctggaactagggagtaag

SEQ ID NO: 133820 - DNA, 2412 bp, Homo sapiens
  Payload ID: 6144
  Gene Symbol: FCGR2A
  Gene Name: Fc fragment of IgG, low affinity IIa, receptor (CD32)
  Uniprot ID: P12318
  ENST ID: ENST00000271450
  CDS Start-End: 39-992
gtctcttaaaacccactggacgttggcacagtgctgggatgactatggagacccaaatgtctcagaatgtatgtcccagaaacctgtggctgcttcaaccattgacagttttgctgctgctggcttctgcagacagtcaagctgcagctcccccaaaggctgtgctgaaacttgagcccccgtggatcaacgtgctccaggaggactctgtgactctgacatgccagggggctcgcagccctgagagcgactccattcagtggttccacaatgggaatctcattcccacccacacgcagcccagctacaggttcaaggccaacaacaatgacagcggggagtacacgtgccagactggccagaccagcctcagcgaccctgtgcatctgactgtgctttccgaatggctggtgctccagacccctcacctggagttccaggagggagaaaccatcatgctgaggtgccacagctggaaggacaagcctctggtcaaggtcacattcttccagaatggaaaatcccagaaattctcccatttggatcccaccttctccatcccacaagcaaaccacagtcacagtggtgattaccactgcacaggaaacataggctacacgctgttctcatccaagcctgtgaccatcactgtccaagtgcccagcatgggcagctcttcaccaatggggatcattgtggctgtggtcattgcgactgctgtagcagccattgttgctgctgtagtggccttgatctactgcaggaaaaagcggatttcagccaattccactgatcctgtgaaggctgcccaatttgagccacctggacgtcaaatgattgccatcagaaagagacaacttgaagaaaccaacaatgactatgaaacagctgacggcggctacatgactctgaaccccagggcacctactgacgatgataaaaacatctacctgactcttcctcccaacgaccatgtcaacagtaataactaaagagtaacgttatgccatgtggtcatactctcagcttgctgagtggatgacaaaaagaggggaattgttaaaggaaaatttaaatggagactggaaaaatcctgagcaaacaaaaccacctggcccttagaaatagctttaactttgcttaaactacaaacacaagcaaaacttcacggggtcatactacatacaagcataagcaaaacttaacttggatcatttctggtaaatgcttatgttagaaataagacaaccccagccaatcacaagcagcctactaacatataattaggtgactagggactttctaagaagatacctacccccaaaaaacaattatgtaattgaaaaccaaccgattgcctttattttgcttccacattttcccaataaatacttgcctgtgacattttgccactggaacactaaacttcatgaattgcgcctcagatttttcctttaacatcttttttttttttgacagagtctcaatctgttacccaggctggagtgcagtggtgctatcttggctcactgcaaacccgcctcccaggtttaagcgattctcatgcctcagcctcccagtagctgggattagaggcatgtgccatcatacccagctaatttttgtattttttattttttttttttagtagagacagggtttcgcaatgttggccaggccgatctcgaacttctggcctctagcgatctgcccgcctcggcctcccaaagtgctgggatgaccagcatcagccccaatgtccagcctctttaacatcttctttcctatgccctctctgtggatccctactgctggtttctgccttctccatgctgagaacaaaatcacctattcactgcttatgcagtcggaagctccagaagaacaaagagcccaattaccagaaccacattaagtctccattgttttgccttgggatttgagaagagaattagagaggtgaggatctggtatttcctggactaaattccccttggggaagacgaagggatgctgcagttccaaaagagaaggactcttccagagtcatctacctgagtcccaaagctccctgtcctgaaagccacagacaatatggtcccaaatgactgactgcaccttctgtgcctcagccgttcttgacatcaagaatcttctgttccacatccacacagccaatacaattagtcaaaccactgttattaacagatgtagcaacatgagaaacgcttatgttacaggttacatgagagcaatcatgtaagtctatatgacttcagaaatgttaaaatagactaacctctaacaacaaattaaaagtgattgtttcaaggtgatgcaattattgatgacctattttatttttctataatgatcatatattacctttgtaataaaacattataaccaaaa

SEQ ID NO: 133821 - DNA, 1399 bp, Homo sapiens
  Payload ID: 6144
  Gene Symbol: FCGR2A
  Gene Name: Fc fragment of IgG, low affinity IIa, receptor (CD32)
  Uniprot ID: P12318
  ENST ID: ENST00000367972
  CDS Start-End: 39-989
gtctcttaaaacccactggacgttggcacagtgctgggatgactatggagacccaaatgtctcagaatgtatgtcccagaaacctgtggctgcttcaaccattgacagttttgctgctgctggcttctgcagacagtcaagctgctcccccaaaggctgtgctgaaacttgagcccccgtggatcaacgtgctccaggaggactctgtgactctgacatgccagggggctcgcagccctgagagcgactccattcagtggttccacaatgggaatctcattcccacccacacgcagcccagctacaggttcaaggccaacaacaatgacagcggggagtacacgtgccagactggccagaccagcctcagcgaccctgtgcatctgactgtgctttccgaatggctggtgctccagacccctcacctggagttccaggagggagaaaccatcatgctgaggtgccacagctggaaggacaagcctctggtcaaggtcacattcttccagaatggaaaatcccagaaattctcccatttggatcccaccttctccatcccacaagcaaaccacagtcacagtggtgattaccactgcacaggaaacataggctacacgctgttctcatccaagcctgtgaccatcactgtccaagtgcccagcatgggcagctcttcaccaatggggatcattgtggctgtggtcattgcgactgctgtagcagccattgttgctgctgtagtggccttgatctactgcaggaaaaagcggatttcagccaattccactgatcctgtgaaggctgcccaatttgagccacctggacgtcaaatgattgccatcagaaagagacaacttgaagaaaccaacaatgactatgaaacagctgacggcggctacatgactctgaaccccagggcacctactgacgatgataaaaacatctacctgactcttcctcccaacgaccatgtcaacagtaataactaaagagtaacgttatgccatgtggtcatactctcagcttgctgagtggatgacaaaaagaggggaattgttaaaggaaaatttaaatggagactggaaaaatcctgagcaaacaaaaccacctggcccttagaaatagctttaactttgcttaaactacaaacacaagcaaaacttcacggggtcatactacatacaagcataagcaaaacttaacttggatcatttctggtaaatgcttatgttagaaataagacaaccccagccaatcacaagcagcctactaacatataattaggtgactagggactttctaagaagatacctacccccaaaaaacaattatgtaattgaaaaccaaccgattgcctttattttgcttccacattttcccaataaatacttgcctgtga

SEQ ID NO: 133822 - DNA, 1495 bp, Homo sapiens
  Payload ID: 6144
  Gene Symbol: FCGR2A
  Gene Name: Fc fragment of IgG, low affinity IIa, receptor (CD32)
  ENST ID: ENST00000483665
  CDS Start-End: 12-422
acagtgctgggatgactatggagacccaaatgtctcagaatgtatgtcccagaaacctgtggctgcttcaaccattgacagttttgctgctgctggcttctgcagacagtcaagctgctcccccaaaggctgtgctgaaacttgagcccccgtggatcaacgtgctccaggaggactctgtgactctgacatgccagggggctcgcagccctgagagcgactccattcagtggttccacaatgggaatctcattcccacccacacgcagcccagctacaggttcaaggccaacaacaatgacagcggggagtacacgtgccagactggccagaccagcctcagcgaccctgtgcatctgactgtgctttccggtcagtggaggaaggccccagggtggacctgggagggccaggacggatgaaatctgtttacagacagaggtttgcaggaaagagtgggcgtggactgcttactgggaagcactgttaatggctggtgctccagacccctcacctggagttccaggagggagaaaccatcatgctgaggtgccacagctggaaggacaagcctctggtcaaggtcacattcttccagaatggaaaatcccagaaattctcccatttggatcccaccttctccatcccacaagcaaaccacagtcacagtggtgattaccactgcacaggaaacataggctacacgctgttctcatccaagcctgtgaccatcactgtccaagtgcccagcatgggcagctcttcaccaatggggatcattgtggctgtggtcattgcgactgctgtagcagccattgttgctgctgtagtggccttgatctactgcaggaaaaagcggatttcagccaattccactgatcctgtgaaggctgcccaatttgagccacctggacgtcaaatgattgccatcagaaagagacaacttgaagaaaccaacaatgactatgaaacagctgacggcggctacatgactctgaaccccagggcacctactgacgatgataaaaacatctacctgactcttcctcccaacgaccatgtcaacagtaataactaaagagtaacgttatgccatgtggtcatactctcagcttgctgagtggatgacaaaaagaggggaattgttaaaggaaaatttaaatggagactggaaaaatcctgagcaaacaaaaccacctggcccttagaaatagctttaactttgcttaaactacaaacacaagcaaaacttcacggggtcatactacatacaagcataagcaaaacttaacttggatcatttctggtaaatgcttatgttagaaataagacaaccccagccaatcacaagcagcctactaacatataattaggtgactagggactttctaagaagatacctacccccaaaaaacaattatgtaattgaaaaccaaccgattgcctttattttgcttccacattttcccaataaatacttgcctgtgacattttg

SEQ ID NO: 133823 - DNA, 571 bp, Homo sapiens
  Payload ID: 6144
  Gene Symbol: FCGR2A
  Gene Name: Fc fragment of IgG, low affinity IIa, receptor (CD32)
  ENST ID: ENST00000536731
  CDS Start-End: 12-425
acagtgctgggatgactatggagacccaaatgtctcagaatgtatgtcccagaaacctgtggctgcttcaaccattgacagttttgctgctgctggcttctgcagacagtcaagctgcagctcccccaaaggctgtgctgaaacttgagcccccgtggatcaacgtgctccaggaggactctgtgactctgacatgccagggggctcgcagccctgagagcgactccattcagtggttccacaatgggaatctcattcccacccacacgcagcccagctacaggttcaaggccaacaacaatgacagcggggagtacacgtgccagactggccagaccagcctcagcgaccctgtgcatctgactgtgctttccggtcagtggaggaaggccccagggtggacctgggagggccaggacggatgaaatctgtttacagacagaggtttgcaggaaagagtgggcgtggactgcttactgggaagcactgttaatggctggtgctccagacccctcacctggagttccaggagggagaaaccatcatgctgaggtgccacagctggaaggac

SEQ ID NO: 133824 - DNA, 259 bp, Homo sapiens
  Payload ID: 6144
  Gene Symbol: FCGR2A
  Gene Name: Fc fragment of IgG, low affinity IIa, receptor (CD32)
  ENST ID: ENST00000459885
  CDS Start-End: 1-259
attccactgatcctgtgaaggctgcccaatttgagccacctggacgtcaaatgattgccatcagaaagagacaacttgaagaaaccaacaatgactatgaaacagctgacggcggctacatgactctgaaccccagggcacctactgacgatgataaaaacatctacctgactcttcctcccaacgaccatgtcaacatgcagttaccagaaggatgtgaccttctcagagaagtcattccaggcagattagaaacatg

SEQ ID NO: 133825 - DNA, 1642 bp, Homo sapiens
  Payload ID: 6144
  Gene Symbol: FCGR2A
  Gene Name: Fc fragment of IgG, low affinity IIa, receptor (CD32)
  ENST ID: ENST00000467525
  CDS Start-End: 1-573
gcagctcccccaaaggctgtgctgaaacttgagcccccgtggatcaacgtgctccaggaggactctgtgactctgacatgccagggggctcgcagccctgagagcgactccattcagtggttccacaatgggaatctcattcccacccacacgcagcccagctacaggttcaaggccaacaacaatgacagcggggagtacacgtgccagactggccagaccagcctcagcgaccctgtgcatctgactgtgctttccgaatggctggtgctccagacccctcacctggagttccaggagggagaaaccatcatgctgaggtgccacagctggaaggacaagcctctggtcaaggtcacattcttccagaatggaaaatcccagaaattctcccatttggatcccaccttctccatcccacaagcaaaccacagtcacagtggtgattaccactgcacaggaaacataggctacacgctgttctcatccaagcctgtgaccatcactgtccaagcatgggcagctcttcaccaatggggatcattgtggctgtggtcattgcgactgctgtagcagccattgttgctgctgtagtggccttgatctactgcaggaaaaagcggatttcagccacctggacgtcaaatgattgccatcagaaagagacaacttgaagaaaccaacaatgactatgaaacagctgacggcggctacatgactctgaaccccagggcacctactgacgatgataaaaacatctacctgactcttcctcccaacgaccatgtcaacaggctgtattgattggggtgtagactgaactatccggggtctgtttcttttcggtgatgaaagtcttgagaaggtagtaatggataagatgtgagggagaggagagagggagatttggagtgtaggcggaaatccgaacgccagcagatctgaatggaatgttctggattgaagaaagtgggaaatggcctcaattcacaaagtcacaacctgataaaaaccagtgtgactttactgcccagtgaacccatctcgtcctccagcctttaggaggtaggttggactggagcctgcagtagtttactctccacctgagtcctggtctccagctgggaacccacttaggccataaagaaaaacgcacactgtgcctctccaccgggcctctggagacgaggctcctcggggatacaaacagtggggagaacatgagggacatcccgaccgtactctgcgtcctcctttcccaggtgttgcgttctctcttgggctgagtggcgaggtctctcccgagtcccagggccacagtgcaatgtcacatctcctttgtggaaagtgactggtaaaggagagagaacaaaactggaggaatgtaaagtcttcagccacctggtttaatttattcaagagtgattaatcctagatgagaaaaagaattgaaatggatcggaaaaaaatgaaagtgcattggccgggaatcgaacccgggcctcccgcgtggcaggcgagaattctaccactgaaccaccaatgctactgtcagctaaagacctgcagtattgtctcttaaagctcactatctctggccattcactaaggaaccaggcaccgtcttaaatcgcggtttgga

SEQ ID NO: 133826 - DNA, 1440 bp, Homo sapiens
  Payload ID: 6145
  Gene Symbol: FCGR2B
  Gene Name: Fc fragment of IgG, low affinity IIb, receptor (CD32)
  Uniprot ID: P31994
  ENST ID: ENST00000236937
  CDS Start-End: 96-971
tccagaatttgtttgccctctagggtagaatccgccaagctttgagagaaggctgtgactgctgtgctctgggcgccagctcgctccagggagtgatgggaatcctgtcattcttacctgtccttgccactgagagtgactgggctgactgcaagtccccccagccttggggtcatatgcttctgtggacagctgtgctattcctggctcctgttgctgggacacctgcagctcccccaaaggctgtgctgaaactcgagccccagtggatcaacgtgctccaggaggactctgtgactctgacatgccgggggactcacagccctgagagcgactccattcagtggttccacaatgggaatctcattcccacccacacgcagcccagctacaggttcaaggccaacaacaatgacagcggggagtacacgtgccagactggccagaccagcctcagcgaccctgtgcatctgactgtgctttctgagtggctggtgctccagacccctcacctggagttccaggagggagaaaccatcgtgctgaggtgccacagctggaaggacaagcctctggtcaaggtcacattcttccagaatggaaaatccaagaaattttcccgttcggatcccaacttctccatcccacaagcaaaccacagtcacagtggtgattaccactgcacaggaaacataggctacacgctgtactcatccaagcctgtgaccatcactgtccaagctcccagctcttcaccgatggggatcattgtggctgtggtcactgggattgctgtagcggccattgttgctgctgtagtggccttgatctactgcaggaaaaagcggatttcagccaatcccactaatcctgatgaggctgacaaagttggggctgagaacacaatcacctattcacttctcatgcacccggatgctctggaagagcctgatgaccagaaccgtatttagtctccattgtcttgcattgggatttgagaagaaaatcagagagggaagatctggtatttcctggcctaaattccccttggggaggacagggagatgctgcagttccaaaagagaaggtttcttccagagtcatctacctgagtcctgaagctccctgtcctgaaagccacagacaatatggtcccaaataaccgactgcaccttctgtgcttcagctcttcttgacatcaaggctcttccgttccacatccacacagccaatccaattaatcaaaccactgttattaacagataatagcaacttgggaaatgcttatgttacaggttacgtgagaacaatcatgtaaatctatatgatttcagaaatgttaaaatagactaacctctaccagcacattaaaagtgattgtttctgggtgataaaattattgatgatttttattttctttatttttctataaagatcata

SEQ ID NO: 133827 - DNA, 2115 bp, Homo sapiens
  Payload ID: 6145
  Gene Symbol: FCGR2B
  Gene Name: Fc fragment of IgG, low affinity IIb, receptor (CD32)
  Uniprot ID: P31994
  ENST ID: ENST00000358671
  CDS Start-End: 82-1014
gccctctagggtagaatccgccaagctttgagagaaggctgtgactgctgtgctctgggcgccagctcgctccagggagtgatgggaatcctgtcattcttacctgtccttgccactgagagtgactgggctgactgcaagtccccccagccttggggtcatatgcttctgtggacagctgtgctattcctggctcctgttgctgggacacctgcagctcccccaaaggctgtgctgaaactcgagccccagtggatcaacgtgctccaggaggactctgtgactctgacatgccgggggactcacagccctgagagcgactccattcagtggttccacaatgggaatctcattcccacccacacgcagcccagctacaggttcaaggccaacaacaatgacagcggggagtacacgtgccagactggccagaccagcctcagcgaccctgtgcatctgactgtgctttctgagtggctggtgctccagacccctcacctggagttccaggagggagaaaccatcgtgctgaggtgccacagctggaaggacaagcctctggtcaaggtcacattcttccagaatggaaaatccaagaaattttcccgttcggatcccaacttctccatcccacaagcaaaccacagtcacagtggtgattaccactgcacaggaaacataggctacacgctgtactcatccaagcctgtgaccatcactgtccaagctcccagctcttcaccgatggggatcattgtggctgtggtcactgggattgctgtagcggccattgttgctgctgtagtggccttgatctactgcaggaaaaagcggatttcagctctcccaggataccctgagtgcagggaaatgggagagaccctccctgagaaaccagccaatcccactaatcctgatgaggctgacaaagttggggctgagaacacaatcacctattcacttctcatgcacccggatgctctggaagagcctgatgaccagaaccgtatttagtctccattgtcttgcattgggatttgagaagaaaatcagagagggaagatctggtatttcctggcctaaattccccttggggaggacagggagatgctgcagttccaaaagagaaggtttcttccagagtcatctacctgagtcctgaagctccctgtcctgaaagccacagacaatatggtcccaaataaccgactgcaccttctgtgcttcagctcttcttgacatcaaggctcttccgttccacatccacacagccaatccaattaatcaaaccactgttattaacagataatagcaacttgggaaatgcttatgttacaggttacgtgagaacaatcatgtaaatctatatgatttcagaaatgttaaaatagactaacctctaccagcacattaaaagtgattgtttctgggtgataaaattattgatgatttttattttctttatttttctataaagatcatatattacttttataataaaacattataaaaacaacattctgtttaccttttcaaggctgtattggttggagtgtagactgaactgcctggggtctgtttctcttcagtgatgagactcttaggaaggcaggaatggataggatagggggaggagaggagagatggggatttagaatgtagagtgagtgccccttttcttaaaactgaatacagtcacgcaccacataatgatgtttagttcaacaacagactgcatatatgatggtgatcccataaaattataataccatatttctattgtaccttttctattcctatgtttagatatatgagtacttaccattgtgttacaattgcctaaagtattcagtacagtagcatgctgtacaggtttgtagcctaggggcaataggctatacgctacagcctaggtgtgtagtaggccacaccatttaggtttgtataagtacctgctatgatgttcacacaacaaaattgcctgcatttctcaaaatgtatccccatatttcaacaatgcatgactgtactcttctgccaatgaccttgtattcttgtttccatgtcttcttctctttcctcctatggcaaataaaacactgttttgcaacacaa

SEQ ID NO: 133828 - DNA, 1472 bp, Homo sapiens
  Payload ID: 6145
  Gene Symbol: FCGR2B
  Gene Name: Fc fragment of IgG, low affinity IIb, receptor (CD32)
  Uniprot ID: P31994
  ENST ID: ENST00000367961
  CDS Start-End: 82-993
gccctctagggtagaatccgccaagctttgagagaaggctgtgactgctgtgctctgggcgccagctcgctccagggagtgatgggaatcctgtcattcttacctgtccttgccactgagagtgactgggctgactgcaagtccccccagccttggggtcatatgcttctgtggacagctgtgctattcctggcagctcccccaaaggctgtgctgaaactcgagccccagtggatcaacgtgctccaggaggactctgtgactctgacatgccgggggactcacagccctgagagcgactccattcagtggttccacaatgggaatctcattcccacccacacgcagcccagctacaggttcaaggccaacaacaatgacagcggggagtacacgtgccagactggccagaccagcctcagcgaccctgtgcatctgactgtgctttctgagtggctggtgctccagacccctcacctggagttccaggagggagaaaccatcgtgctgaggtgccacagctggaaggacaagcctctggtcaaggtcacattcttccagaatggaaaatccaagaaattttcccgttcggatcccaacttctccatcccacaagcaaaccacagtcacagtggtgattaccactgcacaggaaacataggctacacgctgtactcatccaagcctgtgaccatcactgtccaagctcccagctcttcaccgatggggatcattgtggctgtggtcactgggattgctgtagcggccattgttgctgctgtagtggccttgatctactgcaggaaaaagcggatttcagctctcccaggataccctgagtgcagggaaatgggagagaccctccctgagaaaccagccaatcccactaatcctgatgaggctgacaaagttggggctgagaacacaatcacctattcacttctcatgcacccggatgctctggaagagcctgatgaccagaaccgtatttagtctccattgtcttgcattgggatttgagaagaaaatcagagagggaagatctggtatttcctggcctaaattccccttggggaggacagggagatgctgcagttccaaaagagaaggtttcttccagagtcatctacctgagtcctgaagctccctgtcctgaaagccacagacaatatggtcccaaataaccgactgcaccttctgtgcttcagctcttcttgacatcaaggctcttccgttccacatccacacagccaatccaattaatcaaaccactgttattaacagataatagcaacttgggaaatgcttatgttacaggttacgtgagaacaatcatgtaaatctatatgatttcagaaatgttaaaatagactaacctctaccagcacattaaaagtgattgtttctgggtgataaaattattgatgatttttattttctttatttttctataaagatcatatattactttt

SEQ ID NO: 133829 - DNA, 962 bp, Homo sapiens
  Payload ID: 6145
  Gene Symbol: FCGR2B
  Gene Name: Fc fragment of IgG, low affinity IIb, receptor (CD32)
  Uniprot ID: P31994
  ENST ID: ENST00000428605
  CDS Start-End: 14-946
agctcgctccaggatgggaatcctgtcattcttacctgtccttgccactgagagtgactgggctgactgcaagtccccccagccttggggtcatatgcttctgtggacagctgtgctattcctggctcctgttgctgggacacctgcagctcccccaaaggctgtgctgaaactcgagccccagtggatcaacgtgctccaggaggactctgtgactctgacatgccgggggactcacagccctgagagcgactccattcagtggttccacaatgggaatctcattcccacccacacgcagcccagctacaggttcaaggccaacaacaatgacagcggggagtacacgtgccagactggccagaccagcctcagcgaccctgtgcatctgactgtgctttctgagtggctggtgctccagacccctcacctggagttccaggagggagaaaccatcgtgctgaggtgccacagctggaaggacaagcctctggtcaaggtcacattcttccagaatggaaaatccaagaaattttcccgttcggatcccaacttctccatcccacaagcaaaccacagtcacagtggtgattaccactgcacaggaaacataggctacacgctgtactcatccaagcctgtgaccatcactgtccaagctcccagctcttcaccgatggggatcattgtggctgtggtcactgggattgctgtagcggccattgttgctgctgtagtggccttgatctactgcaggaaaaagcggatttcagctctcccaggataccctgagtgcagggaaatgggagagaccctccctgagaaaccagccaatcccactaatcctgatgaggctgacaaagttggggctgagaacacaatcacctattcacttctcatgcacccggatgctctggaagagcctgatgaccagaaccgtatttagtctccattgtcttgca

SEQ ID NO: 133830 - DNA, 1070 bp, Homo sapiens
  Payload ID: 6146
  Gene Symbol: FCGR2C
  Gene Name: Fc fragment of IgG, low affinity IIc, receptor for (CD32) (gene/pseudogene)
  ENST ID: ENST00000466542
  CDS Start-End: 99-1070
gactccagaatttgtttgccctctagggtagaatccgccaagctttgagagaaggctgtgactgctgtgctctgggcgccagctcgctccagggagtgatgggaatcctgtcattcttacctgtccttgccactgagagtgactgggctgactgcaagtccccccagccttggggtcatatgcttctgtggacagctgtgctattcctggctcctgttgctgggacacctgcagctcccccaaaggctgtgctgaaactcgagccctagtggatcaacgtgctccaagaggactctgtgactctgacatgccgggggactcacagccctgagagcgactccattccgtggttccacaatgggaatctcattcccacccacacgcagcccagctacaggttcaaggccaacaacaatgacagcggggagtacacgtgccagactggccagaccagcctcagcgaccctgtgcatctgactgtgctttctgagtggctggtgctccagacccctcacctggagttccaggagggagaaaccatcgtgctgaggtgccacagctggaaggacaagcctctggtcaaggtcacattcttccagaatggaaaatccaagaaattttcccgttcggatcccaacttctccatcccacaagcaaaccacagtcacagtggtgattaccactgcacaggaaacataggctacacgctgtactcatccaagcctgtgaccatcactgtccaagctcccagctcttcaccgatggggatcattgtggctgtggtcactgggattgctgtagcggccattgttgctgctgtagtggccttgatctactgcaggaaaaagcggatttcagccaattccactgatcctgtgaaggctgcccaatttgagccacctggacgtcaaatgattgccatcagaaagagacaacctgaagaaaccaacaatgactatgaaacagctgacggcggctacatgactctgaaccccagggcacctactgacgatgataaaaacatctacctgactcttcctcccaacgaccatgtcaacagtaataactaa

SEQ ID NO: 133831 - DNA, 1507 bp, Homo sapiens
  Payload ID: 6146
  Gene Symbol: FCGR2C
  Gene Name: Fc fragment of IgG, low affinity IIc, receptor for (CD32) (gene/pseudogene)
  ENST ID: ENST00000543859
  CDS Start-End: 100-1068
agactccagaatttgtttgccctctagggtagaatccgccaagctttgagagaaggctgtgactgctgtgctctgggcgccagctcgctccagggagtgatgggaatcctgtcattcttacctgtccttgccactgagagtgactgggctgactgcaagtccccccagccttggggtcatatgcttctgtggacagctgtgctattcctggctcctgttgctgggacacctgcagctcccccaaaggctgtgctgaaactcgagccctggatcaacgtgctccaagaggactctgtgactctgacatgccgggggactcacagccctgagagcgactccattccgtggttccacaatgggaatctcattcccacccacacgcagcccagctacaggttcaaggccaacaacaatgacagcggggagtacacgtgccagactggccagaccagcctcagcgaccctgtgcatctgactgtgctttctgagtggctggtgctccagacccctcacctggagttccaggagggagaaaccatcgtgctgaggtgccacagctggaaggacaagcctctggtcaaggtcacattcttccagaatggaaaatccaagaaattttcccgttcggatcccaacttctccatcccacaagcaaaccacagtcacagtggtgattaccactgcacaggaaacataggctacacgctgtactcatccaagcctgtgaccatcactgtccaagctcccagctcttcaccgatggggatcattgtggctgtggtcactgggattgctgtagcggccattgttgctgctgtagtggccttgatctactgcaggaaaaagcggatttcagccaattccactgatcctgtgaaggctgcccaatttgagccacctggacgtcaaatgattgccatcagaaagagacaacctgaagaaaccaacaatgactatgaaacagctgacggcggctacatgactctgaaccccagggcacctactgacgatgataaaaacatctacctgactcttcctcccaacgaccatgtcaacagtaataactaaagagtaacgttatgccatgtggtcacactctcagcttgctgagtggatgacaaaaagaggggaattgttaaaggaaaatttaaatggagactggaaaaattcctgagcaaacaaaaccacctggcccttagaaatagctttaactttgcttaaactacaaacacaagcaaaacttcacggggtcatactacatacaagcataagcaaaacttaacttggatgatttctggtaaatgcttatgttagaaataagacaaccccagccaatcacaagcagcctactaacatataattaggtgactagggactttctaagaagatacctacccccaaaaaacaattatgtaattgaaaacccatcgattgcctttattttgcttccacattttcccaataaatacttgcctgtgacattttgccactggaacactaaacttca

SEQ ID NO: 133832 - DNA, 958 bp, Homo sapiens
  Payload ID: 6146
  Gene Symbol: FCGR2C
  Gene Name: Fc fragment of IgG, low affinity IIc, receptor for (CD32) (gene/pseudogene)
  ENST ID: ENST00000611236
  CDS Start-End: 3-803
tgatgggaatcctgtcattcttacctgtccttgccactgagagtgactgggctgactgcaagtccccccagccttggggtcatatgcttctgtggacagctgtgctattcctggctcctgttgctgggacacctgcagctcccccaaaggctgtgctgaaactcgagccctggatcaacgtgctccaagaggactctgtgactctgacatgccgggggactcacagccctgagagcgactccattccgtggttccacaatgggaatctcattcccacccacacgcagcccagctacaggttcaaggccaacaacaatgacagcggggagtacacgtgccagactggccagaccagcctcagcgaccctgtgcatctgactgtgctttctgagtggctggtgctccagacccctcacctggagttccaggagggagaaaccatcgtgctgaggtgccacagctggaaggacaagcctctggtcaaggtcacattcttccagaatggaaaatccaagaaattttcccgttcggatcccaacttctccatcccacaagcaaaccacagtcacagtggtgattaccactgcacaggaaacataggctacacgctgtactcatccaagcctgtgaccatcactgtccaagctcccagctcttcaccgatggggatcattgtggctgtggtcactgggattgctgtagcggccattgttgctgctgtagtggccttgatctactgcaggaaaaagcggatttcagccacctggacgtcaaatgattgccatcagaaagagacaacctgaagaaaccaacaatgactatgaaacagctgacggcggctacatgactctgaaccccagggcacctactgacgatgataaaaacatctacctgactcttcctcccaacgaccatgtcaacagtaataactaaagagtaacgttatgccatgtggtca

SEQ ID NO: 133833 - DNA, 2086 bp, Homo sapiens
  Payload ID: 6147
  Gene Symbol: FCGR3A
  Gene Name: Fc fragment of IgG, low affinity IIIa, receptor (CD16a)
  Uniprot ID: P08637
  ENST ID: ENST00000367967
  CDS Start-End: 106-870
cagatccagtggcccggaggggcctgagctaaatccgcaggacctgggtaacacgaggaagggctccggatatctttggtgacttgtccactccagtgtggcatcatgtggcagctgctcctcccaactgctctgctacttctagtttcagctggcatgcggactgaagatctcccaaaggctgtggtgttcctggagcctcaatggtacagggtgctcgagaaggacagtgtgactctgaagtgccagggagcctactcccctgaggacaattccacacagtggtttcacaatgagagcctcatctcaagccaggcctcgagctacttcattgacgctgccacagtcgacgacagtggagagtacaggtgccagacaaacctctccaccctcagtgacccggtgcagctagaagtccatatcggctggctgttgctccaggcccctcggtgggtgttcaaggaggaagaccctattcacctgaggtgtcacagctggaagaacactgctctgcataaggtcacatatttacagaatggcaaaggcaggaagtattttcatcataattctgacttctacattccaaaagccacactcaaagacagcggctcctacttctgcagggggctttttgggagtaaaaatgtgtcttcagagactgtgaacatcaccatcactcaaggtttggcagtgtcaaccatctcatcattctttccacctgggtaccaagtctctttctgcttggtgatggtactcctttttgcagtggacacaggactatatttctctgtgaagacaaacattcgaagctcaacaagagactggaaggaccataaatttaaatggagaaaggaccctcaagacaaatgacccccatcccatgggggtaataagagcagtagcagcagcatctctgaacatttctctggatttgcaaccccatcatcctcaggcctctctacaagcagcaggaaacatagaactcagagccagatcccttatccaactctcgacttttccttggtctccagtggaagggaaaagcccatgatcttcaagcagggaagccccagtgagtagctgcattcctagaaattgaagtttcagagctacacaaacactttttctgtcccaaccgttccctcacagcaaagcaacaatacaggctagggatggtaatcctttaaacatacaaaaattgctcgtgttataaattacccagtttagaggggaaaaaaaaacaattattcctaaataaatggataagtagaattaatggttgaggcaggaccatacagagtgtgggaactgctggggatctagggaattcagtgggaccaatgaaagcatggctgagaaatagcaggtagtccaggatagtctaagggaggtgttcccatctgagcccagagataagggtgtcttcctagaacattagccgtagtggaattaacaggaaatcatgagggtgacgtagaattgagtcttccaggggactctatcagaactggaccatctccaagtatataacgatgagtcctcttaatgctaggagtagaaaatggtcctaggaaggggactgaggattgcggtggggggtggggtggaaaagaaagtacagaacaaaccctgtgtcactgtcccaagttgctaagtgaacagaactatctcagcatcagaatgagaaagcctgagaagaaagaaccaaccacaagcacacaggaaggaaagcgcaggaggtgaaaatgctttcttggccagggtagtaagaattagaggttaatgcagggactgtaaaaccaccttttctgcttcaatatctaattcctgtgtagctttgttcattgcatttattaaacaaatgttgtataaccaatactaaatgtactactgagcttcgctgagttaagttatgaaactttcaaatccttcatcatgtcagttccaatgaggtggggatggagaagacaattgttgcttatgaaagaaagctttagctgtctctgttttgtaagctttaagcgcaacatttcttggttccaataaagcattttacaagatcttgcatgctactcttagatagaag

SEQ ID NO: 133834 - DNA, 2310 bp, Homo sapiens
  Payload ID: 6147
  Gene Symbol: FCGR3A
  Gene Name: Fc fragment of IgG, low affinity IIIa, receptor (CD16a)
  ENST ID: ENST00000367969
  CDS Start-End: 185-1057
gattctgtgtgtgtcctcagatgctcagccacagacctttgagggagtaaagggggcagacccacccaccttgcctccaggctctttccttcctggtcctgttctatggtggggctcccttgccagacttcagactgagaagtcagatgaagtttcaagaaaaggaaattggtgggtgacagagatgggtggaggggctggggaaaggctgtttacttcctcctgtctagtcggtttggtccctttagggctccggatatctttggtgacttgtccactccagtgtggcatcatgtggcagctgctcctcccaactgctctgctacttctagtttcagctggcatgcggactgaagatctcccaaaggctgtggtgttcctggagcctcaatggtacagggtgctcgagaaggacagtgtgactctgaagtgccagggagcctactcccctgaggacaattccacacagtggtttcacaatgagagcctcatctcaagccaggcctcgagctacttcattgacgctgccacagtcgacgacagtggagagtacaggtgccagacaaacctctccaccctcagtgacccggtgcagctagaagtccatatcggctggctgttgctccaggcccctcggtgggtgttcaaggaggaagaccctattcacctgaggtgtcacagctggaagaacactgctctgcataaggtcacatatttacagaatggcaaaggcaggaagtattttcatcataattctgacttctacattccaaaagccacactcaaagacagcggctcctacttctgcagggggctttttgggagtaaaaatgtgtcttcagagactgtgaacatcaccatcactcaaggtttggcagtgtcaaccatctcatcattctttccacctgggtaccaagtctctttctgcttggtgatggtactcctttttgcagtggacacaggactatatttctctgtgaagacaaacattcgaagctcaacaagagactggaaggaccataaatttaaatggagaaaggaccctcaagacaaatgacccccatcccatgggggtaataagagcagtagcagcagcatctctgaacatttctctggatttgcaaccccatcatcctcaggcctctctacaagcagcaggaaacatagaactcagagccagatcccttatccaactctcgacttttccttggtctccagtggaagggaaaagcccatgatcttcaagcagggaagccccagtgagtagctgcattcctagaaattgaagtttcagagctacacaaacactttttctgtcccaaccgttccctcacagcaaagcaacaatacaggctagggatggtaatcctttaaacatacaaaaattgctcgtgttataaattacccagtttagaggggaaaaaaaaacaattattcctaaataaatggataagtagaattaatggttgaggcaggaccatacagagtgtgggaactgctggggatctagggaattcagtgggaccaatgaaagcatggctgagaaatagcaggtagtccaggatagtctaagggaggtgttcccatctgagcccagagataagggtgtcttcctagaacattagccgtagtggaattaacaggaaatcatgagggtgacgtagaattgagtcttccaggggactctatcagaactggaccatctccaagtatataacgatgagtcctcttaatgctaggagtagaaaatggtcctaggaaggggactgaggattgcggtggggggtggggtggaaaagaaagtacagaacaaaccctgtgtcactgtcccaagttgctaagtgaacagaactatctcagcatcagaatgagaaagcctgagaagaaagaaccaaccacaagcacacaggaaggaaagcgcaggaggtgaaaatgctttcttggccagggtagtaagaattagaggttaatgcagggactgtaaaaccaccttttctgcttcaatatctaattcctgtgtagctttgttcattgcatttattaaacaaatgttgtataaccaatactaaatgtactactgagcttcgctgagttaagttatgaaactttcaaatccttcatcatgtcagttccaatgaggtggggatggagaagacaattgttgcttatgaaagaaagctttagctgtctctgttttgtaagctttaagcgcaacatttcttggttccaataaagcattttacaagatcttgcatgctactcttagatagaagatgggaaaaccatggtaataaaatatgaatgataaaa

SEQ ID NO: 133835 - DNA, 2306 bp, Homo sapiens
  Payload ID: 6147
  Gene Symbol: FCGR3A
  Gene Name: Fc fragment of IgG, low affinity IIIa, receptor (CD16a)
  Uniprot ID: P08637
  ENST ID: ENST00000443193
  CDS Start-End: 293-1057
gattctgtgtgtgtcctcagatgctcagccacagacctttgagggagtaaagggggcagacccacccaccttgcctccaggctctttccttcctggtcctgttctatggtggggctcccttgccagacttcagactgagaagtcagatgaagtttcaagaaaaggaaattggtgggtgacagagatgggtggaggggctggggaaaggctgtttacttcctcctgtctagtcggtttggtccctttagggctccggatatctttggtgacttgtccactccagtgtggcatcatgtggcagctgctcctcccaactgctctgctacttctagtttcagctggcatgcggactgaagatctcccaaaggctgtggtgttcctggagcctcaatggtacagggtgctcgagaaggacagtgtgactctgaagtgccagggagcctactcccctgaggacaattccacacagtggtttcacaatgagagcctcatctcaagccaggcctcgagctacttcattgacgctgccacagtcgacgacagtggagagtacaggtgccagacaaacctctccaccctcagtgacccggtgcagctagaagtccatatcggctggctgttgctccaggcccctcggtgggtgttcaaggaggaagaccctattcacctgaggtgtcacagctggaagaacactgctctgcataaggtcacatatttacagaatggcaaaggcaggaagtattttcatcataattctgacttctacattccaaaagccacactcaaagacagcggctcctacttctgcagggggctttttgggagtaaaaatgtgtcttcagagactgtgaacatcaccatcactcaaggtttggcagtgtcaaccatctcatcattctttccacctgggtaccaagtctctttctgcttggtgatggtactcctttttgcagtggacacaggactatatttctctgtgaagacaaacattcgaagctcaacaagagactggaaggaccataaatttaaatggagaaaggaccctcaagacaaatgacccccatcccatgggggtaataagagcagtagcagcagcatctctgaacatttctctggatttgcaaccccatcatcctcaggcctctctacaagcagcaggaaacatagaactcagagccagatcccttatccaactctcgacttttccttggtctccagtggaagggaaaagcccatgatcttcaagcagggaagccccagtgagtagctgcattcctagaaattgaagtttcagagctacacaaacactttttctgtcccaaccgttccctcacagcaaagcaacaatacaggctagggatggtaatcctttaaacatacaaaaattgctcgtgttataaattacccagtttagaggggaaaaaaaaacaattattcctaaataaatggataagtagaattaatggttgaggcaggaccatacagagtgtgggaactgctggggatctagggaattcagtgggaccaatgaaagcatggctgagaaatagcaggtagtccaggatagtctaagggaggtgttcccatctgagcccagagataagggtgtcttcctagaacattagccgtagtggaattaacaggaaatcatgagggtgacgtagaattgagtcttccaggggactctatcagaactggaccatctccaagtatataacgatgagtcctcttaatgctaggagtagaaaatggtcctaggaaggggactgaggattgcggtggggggtggggtggaaaagaaagtacagaacaaaccctgtgtcactgtcccaagttgctaagtgaacagaactatctcagcatcagaatgagaaagcctgagaagaaagaaccaaccacaagcacacaggaaggaaagcgcaggaggtgaaaatgctttcttggccagggtagtaagaattagaggttaatgcagggactgtaaaaccaccttttctgcttcaatatctaattcctgtgtagctttgttcattgcatttattaaacaaatgttgtataaccaatactaaatgtactactgagcttcgctgagttaagttatgaaactttcaaatccttcatcatgtcagttccaatgaggtggggatggagaagacaattgttgcttatgaaagaaagctttagctgtctctgttttgtaagctttaagcgcaacatttcttggttccaataaagcattttacaagatcttgcatgctactcttagatagaagatgggaaaaccatggtaataaaatatgaatgat

SEQ ID NO: 133836 - DNA, 462 bp, Homo sapiens
  Payload ID: 6147
  Gene Symbol: FCGR3A
  Gene Name: Fc fragment of IgG, low affinity IIIa, receptor (CD16a)
  ENST ID: ENST00000442336
  CDS Start-End: 147-462
attgtgagagtaaccaacgtggggttacgggggagaatctggagagaagagaagaggttaacaaccctcccacttcctggccacccccctccaccttttctgggctccggatatctttggtgacttgtccactccagtgtggcatcatgtggcagctgctcctcccaactgctctgctacttctagtttcagctggcatgcggactgatctcccaaaggctgtggtgttcctggagcctcaatggtacagggtgctcgagaaggacagtgtgactctgaagtgccagggagcctactcccctgaggacaattccacacagtggtttcacaatgagagcctcatctcaagccaggcctcgagctacttcattgacgctgccacagtcgacgacagtggagagtacaggtgccagacaaacctctccaccctcagtgacccggtgcagctagaagtccatatcg

SEQ ID NO: 133837 - DNA, 1972 bp, Homo sapiens
  Payload ID: 6147
  Gene Symbol: FCGR3A
  Gene Name: Fc fragment of IgG, low affinity IIIa, receptor (CD16a)
  ENST ID: ENST00000426740
  CDS Start-End: 1-815
tccctttagggctccggatatctttggtgacttgtccactccagtgtggcatcatgtggcagctgctcctcccaactgctctgctacttctagtttcagctggcatgcggactgatctcccaaaggctgtggtgttcctggagcctcaatggtacagggtgctcgagaaggacagtgtgactctgaagtgccagggagcctactcccctgaggacaattccacacagtggtttcacaatgagagcctcatctcaagccaggcctcgagctacttcattgacgctgccacagtcgacgacagtggagagtacaggtgccagacaaacctctccaccctcagtgacccggtgcagctagaagtccatatcggctggctgttgctccaggcccctcggtgggtgttcaaggaggaagaccctattcacctgaggtgtcacagctggaagaacactgctctgcataaggtcacatatttacagaatggcaaaggcaggaagtattttcatcataattctgacttctacattccaaaagccacactcaaagacagcggctcctacttctgcagggggctttttgggagtaaaaatgtgtcttcagagactgtgaacatcaccatcactcaaggtttggcagtgtcaaccatctcatcattctttccacctgggtaccaagtctctttctgcttggtgatggtactcctttttgcagtggacacaggactatatttctctgtgaagacaaacattcgaagctcaacaagagactggaaggaccataaatttaaatggagaaaggaccctcaagacaaatgacccccatcccatgggggtaataagagcagtagcagcagcatctctgaacatttctctggatttgcaaccccatcatcctcaggcctctctacaagcagcaggaaacatagaactcagagccagatcccttatccaactctcgacttttccttggtctccagtggaagggaaaagcccatgatcttcaagcagggaagccccagtgagtagctgcattcctagaaattgaagtttcagagctacacaaacactttttctgtcccaaccgttccctcacagcaaagcaacaatacaggctagggatggtaatcctttaaacatacaaaaattgctcgtgttataaattacccagtttagaggggaaaaaaaaacaattattcctaaataaatggataagtagaattaatggttgaggcaggaccatacagagtgtgggaactgctggggatctagggaattcagtgggaccaatgaaagcatggctgagaaatagcaggtagtccaggatagtctaagggaggtgttcccatctgagcccagagataagggtgtcttcctagaacattagccgtagtggaattaacaggaaatcatgagggtgacgtagaattgagtcttccaggggactctatcagaactggaccatctccaagtatataacgatgagtcctcttaatgctaggagtagaaaatggtcctaggaaggggactgaggattgcggtggggggtggggtggaaaagaaagtacagaacaaaccctgtgtcactgtcccaagttgctaagtgaacagaactatctcagcatcagaatgagaaagcctgagaagaaagaaccaaccacaagcacacaggaaggaaagcgcaggaggtgaaaatgctttcttggccagggtagtaagaattagaggttaatgcagggactgtaaaaccaccttttctgcttcaatatctaattcctgtgtagctttgttcattgcatttattaaacaaatgttgtataaccaatactaaatgtactactgagcttcgctgagttaagttatgaaactttcaaatccttcatcatgtcagttccaatgaggtggggatggagaagacaattgttgcttatgaaagaaagctttagctgtctctgttttgtaagctttaagcgcaa

SEQ ID NO: 133838 - DNA, 2167 bp, Homo sapiens
  Payload ID: 6147
  Gene Symbol: FCGR3A
  Gene Name: Fc fragment of IgG, low affinity IIIa, receptor (CD16a)
  Uniprot ID: P08637
  ENST ID: ENST00000436743
  CDS Start-End: 156-920
ggagccccggctcctaggctgacagaccagcccagatccagtggcccggaggggcctgagctaaatccgcaggacctgggtaacacgaggaagtcggtttggtccctttagggctccggatatctttggtgacttgtccactccagtgtggcatcatgtggcagctgctcctcccaactgctctgctacttctagtttcagctggcatgcggactgaagatctcccaaaggctgtggtgttcctggagcctcaatggtacagggtgctcgagaaggacagtgtgactctgaagtgccagggagcctactcccctgaggacaattccacacagtggtttcacaatgagagcctcatctcaagccaggcctcgagctacttcattgacgctgccacagtcgacgacagtggagagtacaggtgccagacaaacctctccaccctcagtgacccggtgcagctagaagtccatatcggctggctgttgctccaggcccctcggtgggtgttcaaggaggaagaccctattcacctgaggtgtcacagctggaagaacactgctctgcataaggtcacatatttacagaatggcaaaggcaggaagtattttcatcataattctgacttctacattccaaaagccacactcaaagacagcggctcctacttctgcagggggctttttgggagtaaaaatgtgtcttcagagactgtgaacatcaccatcactcaaggtttggcagtgtcaaccatctcatcattctttccacctgggtaccaagtctctttctgcttggtgatggtactcctttttgcagtggacacaggactatatttctctgtgaagacaaacattcgaagctcaacaagagactggaaggaccataaatttaaatggagaaaggaccctcaagacaaatgacccccatcccatgggggtaataagagcagtagcagcagcatctctgaacatttctctggatttgcaaccccatcatcctcaggcctctctacaagcagcaggaaacatagaactcagagccagatcccttatccaactctcgacttttccttggtctccagtggaagggaaaagcccatgatcttcaagcagggaagccccagtgagtagctgcattcctagaaattgaagtttcagagctacacaaacactttttctgtcccaaccgttccctcacagcaaagcaacaatacaggctagggatggtaatcctttaaacatacaaaaattgctcgtgttataaattacccagtttagaggggaaaaaaaaacaattattcctaaataaatggataagtagaattaatggttgaggcaggaccatacagagtgtgggaactgctggggatctagggaattcagtgggaccaatgaaagcatggctgagaaatagcaggtagtccaggatagtctaagggaggtgttcccatctgagcccagagataagggtgtcttcctagaacattagccgtagtggaattaacaggaaatcatgagggtgacgtagaattgagtcttccaggggactctatcagaactggaccatctccaagtatataacgatgagtcctcttaatgctaggagtagaaaatggtcctaggaaggggactgaggattgcggtggggggtggggtggaaaagaaagtacagaacaaaccctgtgtcactgtcccaagttgctaagtgaacagaactatctcagcatcagaatgagaaagcctgagaagaaagaaccaaccacaagcacacaggaaggaaagcgcaggaggtgaaaatgctttcttggccagggtagtaagaattagaggttaatgcagggactgtaaaaccaccttttctgcttcaatatctaattcctgtgtagctttgttcattgcatttattaaacaaatgttgtataaccaatactaaatgtactactgagcttcgctgagttaagttatgaaactttcaaatccttcatcatgtcagttccaatgaggtggggatggagaagacaattgttgcttatgaaagaaagctttagctgtctctgttttgtaagctttaagcgcaacatttcttggttccaataaagcattttacaagatcttgcatgctactcttagatagaagatgggaaaaccatggtaataaaatatgaatg

SEQ ID NO: 133839 - DNA, 2385 bp, Homo sapiens
  Payload ID: 6148
  Gene Symbol: FCGR3B
  Gene Name: Fc fragment of IgG, low affinity IIIb, receptor (CD16b)
  Uniprot ID: O75015
  ENST ID: ENST00000294800
  CDS Start-End: 369-1070
attcttggtgctgggtggatctaaatccaggagatgggggcaagcatcctgggaaagctgagggcacactctggcagattctgtgtgtgtcctcagatgctcagccgcagacctttgggagagtaaagggggcacacccacccaccttgcctccaggctctttccttcctattcctgttctatggtggggctccattgcgagacttcagattgagaaatcagatgaagtttcaagaaaaggaaactggcaggtgacagagatgggtggagggactggggaaaggctgtttactccctcctgtctagtcggcttggtccctttagggctccggatatctttggtgacttgtccactccagtgtggcatcatgtggcagctgctcctcccaactgctctgctacttctagtttcagctggcatgcggactgaagatctcccaaaggctgtggtgttcctggagcctcaatggtacagcgtgcttgagaaggacagtgtgactctgaagtgccagggagcctactcccctgaggacaattccacacagtggtttcacaatgagaacctcatctcaagccaggcctcgagctacttcattgacgctgccacagtcaacgacagtggagagtacaggtgccagacaaacctctccaccctcagtgacccggtgcagctagaagtccatatcggctggctgttgctccaggcccctcggtgggtgttcaaggaggaagaccctattcacctgaggtgtcacagctggaagaacactgctctgcataaggtcacatatttacagaatggcaaagacaggaagtattttcatcataattctgacttccacattccaaaagccacactcaaagatagcggctcctacttctgcagggggcttgttgggagtaaaaatgtgtcttcagagactgtgaacatcaccatcactcaaggtttggcagtgtcaaccatctcatcattctctccacctgggtaccaagtctctttctgcttggtgatggtactcctttttgcagtggacacaggactatatttctctgtgaagacaaacatttgaagctcaacaagagactggaaggaccataaacttaaatggagaaaggaccctcaagacacatgacccccatcccatgggggtaataagagcagtggcagcagcatctctgaacatttctctggatttgcaaccccatcatcctcaggcctctctacaagcagcaggaaacatagaactcagagccagatcctttatccaactctcgatttttccttggtctccagtggaagggaaaagcccatgatcttcaagcagggaagccccagtgagtagctgcattcctagaaattgaagtttcagagctacacaaacactttttctgtcccaaccattccctcacagcaaagcaacaatacaggctagggatggtaatcctttaaacatacaaaaattgctcgtattataaattacccagtttagagggaaaaaaagaaaataattattcctaaacaaatggataagtagaattaatggttgaggcaggaccctacagagtgtgggaactgctggggatctagagaattcagtgggaccaatgaaagcatggctgagaaatagcagggtagtccaggatagtctaagggaggtgttcccatctgagcccagagataagggtgtcttcctagaacattagccgtagtggaattaacaggaaatcatgagggtgacgtagaattgagtcttccaggggactctatcagaactggaccatttccaagtatataacgatgagtcctctaatgctaggagtagaaaatggtcctaggaaggggactgaggattggggtgggggtggggtggaaaagaaagtacagaacaaaccctgtgtcactgtctcaagttaagctaagtgaacagaactatctcagcatcagaatgagaaagcctgagaagaaagaaccaaccagaagcacacaggaaggaaagcgcaggaggtgaaaatgctttcttggccggggtagtaagaattagaggttaatgcagggactgtaaaaccaccttttctgcttcaatgtctagttcctgtatagctttgttcattgcatttattaaacaaatgttgtataaccaatactaaatgtactactgagcttcactgagttacgctgtgaaactttcaaatccttcttcatgtcagttccaatgaggtggggatggagaagacaattgttgcttatgaaagaaagctttagctgtctctgttttgtaagctttcagtgcaacatttcttggttccaataaagcattttacaagatcttgcatgctactcttagatagaagatggcaaaaccatggtaataaaatatgaatgat

SEQ ID NO: 133840 - DNA, 2143 bp, Homo sapiens
  Payload ID: 6148
  Gene Symbol: FCGR3B
  Gene Name: Fc fragment of IgG, low affinity IIIb, receptor (CD16b)
  Uniprot ID: O75015
  ENST ID: ENST00000367964
  CDS Start-End: 123-824
aggctgacagaccagcccagatccagtggcccggaggggcctgagctaaatccgcaggacctgggtaacacgaggaagggctccggatatctttggtgacttgtccactccagtgtggcatcatgtggcagctgctcctcccaactgctctgctacttctagtttcagctggcatgcggactgaagatctcccaaaggctgtggtgttcctggagcctcaatggtacagcgtgcttgagaaggacagtgtgactctgaagtgccagggagcctactcccctgaggacaattccacacagtggtttcacaatgagaacctcatctcaagccaggcctcgagctacttcattgacgctgccacagtcaacgacagtggagagtacaggtgccagacaaacctctccaccctcagtgacccggtgcagctagaagtccatatcggctggctgttgctccaggcccctcggtgggtgttcaaggaggaagaccctattcacctgaggtgtcacagctggaagaacactgctctgcataaggtcacatatttacagaatggcaaagacaggaagtattttcatcataattctgacttccacattccaaaagccacactcaaagatagcggctcctacttctgcagggggcttgttgggagtaaaaatgtgtcttcagagactgtgaacatcaccatcactcaaggtttggcagtgtcaaccatctcatcattctctccacctgggtaccaagtctctttctgcttggtgatggtactcctttttgcagtggacacaggactatatttctctgtgaagacaaacatttgaagctcaacaagagactggaaggaccataaacttaaatggagaaaggaccctcaagacacatgacccccatcccatgggggtaataagagcagtggcagcagcatctctgaacatttctctggatttgcaaccccatcatcctcaggcctctctacaagcagcaggaaacatagaactcagagccagatcctttatccaactctcgatttttccttggtctccagtggaagggaaaagcccatgatcttcaagcagggaagccccagtgagtagctgcattcctagaaattgaagtttcagagctacacaaacactttttctgtcccaaccattccctcacagcaaagcaacaatacaggctagggatggtaatcctttaaacatacaaaaattgctcgtattataaattacccagtttagagggaaaaaaagaaaataattattcctaaacaaatggataagtagaattaatggttgaggcaggaccctacagagtgtgggaactgctggggatctagagaattcagtgggaccaatgaaagcatggctgagaaatagcagggtagtccaggatagtctaagggaggtgttcccatctgagcccagagataagggtgtcttcctagaacattagccgtagtggaattaacaggaaatcatgagggtgacgtagaattgagtcttccaggggactctatcagaactggaccatttccaagtatataacgatgagtcctctaatgctaggagtagaaaatggtcctaggaaggggactgaggattggggtgggggtggggtggaaaagaaagtacagaacaaaccctgtgtcactgtctcaagttaagctaagtgaacagaactatctcagcatcagaatgagaaagcctgagaagaaagaaccaaccagaagcacacaggaaggaaagcgcaggaggtgaaaatgctttcttggccggggtagtaagaattagaggttaatgcagggactgtaaaaccaccttttctgcttcaatgtctagttcctgtatagctttgttcattgcatttattaaacaaatgttgtataaccaatactaaatgtactactgagcttcactgagttacgctgtgaaactttcaaatccttcttcatgtcagttccaatgaggtggggatggagaagacaattgttgcttatgaaagaaagctttagctgtctctgttttgtaagctttcagtgcaacatttcttggttccaataaagcattttacaagatcttgcatgctactcttagatagaagatggcaaaaccatggtaataaaatatgaatgataaaa

SEQ ID NO: 133841 - DNA, 1055 bp, Homo sapiens
  Payload ID: 6148
  Gene Symbol: FCGR3B
  Gene Name: Fc fragment of IgG, low affinity IIIb, receptor (CD16b)
  ENST ID: ENST00000421702
  CDS Start-End: 1-763
agtcggcttggtccctttagggctccggatatctttggtgacttgtccactccagtgtggcatcatgtggcagctgctcctcccaactgctctgctacttctagtttcagctggcatgcggactgatctcccaaaggctgtggtgttcctggagcctcaatggtacagcgtgcttgagaaggacagtgtgactctgaagtgccagggagcctactcccctgaggacaattccacacagtggtttcacaatgagaacctcatctcaagccaggcctcgagctacttcattgacgctgccacagtcaacgacagtggagagtacaggtgccagacaaacctctccaccctcagtgacccggtgcagctagaagtccatatcggctggctgttgctccaggcccctcggtgggtgttcaaggaggaagaccctattcacctgaggtgtcacagctggaagaacactgctctgcataaggtcacatatttacagaatggcaaagacaggaagtattttcatcataattctgacttccacattccaaaagccacactcaaagatagcggctcctacttctgcagggggcttgttgggagtaaaaatgtgtcttcagagactgtgaacatcaccatcactcaaggtttggcagtgtcaaccatctcatcattctctccacctgggtaccaagtctctttctgcttggtgatggtactcctttttgcagtggacacaggactatatttctctgtgaagacaaacatttgaagctcaacaagagactggaaggaccataaacttaaatggagaaaggaccctcaagacacatgacccccatcccatgggggtaataagagcagtggcagcagcatctctgaacatttctctggatttgcaaccccatcatcctcaggcctctctacaagcagcaggaaacatagaactcagagccagatcctttatccaactctcgatttttccttggtctccagtggaagggaaaagcccatgatcttcaagcagggaagccccagtgagtagctgcattcctagaaattga

SEQ ID NO: 133842 - DNA, 1339 bp, Homo sapiens
  Payload ID: 6148
  Gene Symbol: FCGR3B
  Gene Name: Fc fragment of IgG, low affinity IIIb, receptor (CD16b)
  ENST ID: ENST00000531221
  CDS Start-End: 5-814
agagatgggtggagggactggggaaaggctgtttactccctcctgtctagtcggcttggtccctttagggctccggatatctttggtgacttgtccactccagtgtggcatcatgtggcagctgctcctcccaactgctctgctacttctagtttcagctggcatgcggactgaagatctcccaaaggctgtggtgttcctggagcctcaatggtacagcgtgcttgagaaggacagtgtgactctgaagtgccagggagcctactcccctgaggacaattccacacagtggtttcacaatgagaacctcatctcaagccaggcctcgagctacttcattgacgctgccacagtcaacgacagtggagagtacaggtgccagacaaacctctccaccctcagtgacccggtgcagctagaagtccatatcggctggctgttgctccaggcccctcggtgggtgttcaaggaggaagaccctattcacctgaggtgtcacagctggaagaacactgctctgcataaggtcacatatttacagaatggcaaagacaggaagtattttcatcataattctgacttccacattccaaaagccacactcaaagatagcggctcctacttctgcagggggcttgttgggagtaaaaatgtgtcttcagagactgtgaacatcaccatcactcaaggtttggcagtgtcaaccatctcatcattctctccacctgggtaccaagtctctttctgcttggtgatggtactcctttttgcagtggacacaggactatatttctctgtgaagacaaacatttgaagctcaacaagagactggaaggaccataaacttaaatggagaaaggaccctcaagacacatgacccccatcccatgggggtaataagagcagtggcagcagcatctctgaacatttctctggatttgcaaccccatcatcctcaggcctctctacaagcagcaggaaacatagaactcagagccagatcctttatccaactctcgatttttccttggtctccagtggaagggaaaagcccatgatcttcaagcagggaagccccagtgagtagctgcattcctagaaattgaagtttcagagctacacaaacactttttctgtcccaaccattccctcacagcaaagcaacaatacaggctagggatggtaatcctttaaacatacaaaaattgctcgtattataaattacccagtttagagggaaaaaaagaaaataattattcctaaacaaatggataagtagaattaatggttgaggcaggaccctacagagtgtgggaactgctggggatctagagaattc

SEQ ID NO: 133843 - DNA, 584 bp, Homo sapiens
  Payload ID: 6148
  Gene Symbol: FCGR3B
  Gene Name: Fc fragment of IgG, low affinity IIIb, receptor (CD16b)
  ENST ID: ENST00000534776
  CDS Start-End: 271-584
gagggagaagtttgagatgccttgggttcatcagacaccccttttcaggctacgaatgagactcccacaaagggatgggacccctcaccacatctatagctgtggattgagctaccaggacaagccaagatggggctagaaatgaggagaatgctggttccaattgggtcatagtcatgagtgaggccagtcacttcacccctctgggtcccagaatcactatgtggaaccaaagagcttcgactagatggtccctaggtttcagctggcatgcggactgaagatctcccaaaggctgtggtgttcctggagcctcaatggtacagcgtgcttgagaaggacagtgtgactctgaagtgccagggagcctactcccctgaggacaattccacacagtggtttcacaatgagaacctcatctcaagccaggcctcgagctacttcattgacgctgccacagtcaacgacagtggagagtacaggtgccagacaaacctctccaccctcagtgacccggtgcagctagaagtccatatcggctggctgttgctccaggcccctcggtgggtgttcaaggaggaaga

SEQ ID NO: 133844 - DNA, 1993 bp, Homo sapiens
  Payload ID: 6148
  Gene Symbol: FCGR3B
  Gene Name: Fc fragment of IgG, low affinity IIIb, receptor (CD16b)
  ENST ID: ENST00000614870
  CDS Start-End: 286-678
aggatctccctggttgagggagaagtttgagatgccttgggttcatcagacaccccttttcaggctacgaatgagactcccacaaagggatgggacccctcaccacatctatagctgtggattgagctaccaggacaagccaagatggggctagaaatgaggagaatgctggttccaattgggtcatagtcatgagtgaggccagtcacttcacccctctgggtcccagaatcactatgtggaaccaaagagcttcgactagatggtccctaggtttcagctggcatgcggactgaagatctcccaaaggctgtggtgttcctggagcctcaatggtacagcgtgcttgagaaggacagtgtgactctgaagtgccagggagcctactcccctgaggacaattccacacagtggtttcacaatgagaacctcatctcaagccaggcctcgagctacttcattgacgctgccacagtcaacgacagtggagagtacaggtgccagacaaacctctccaccctcagtgacccggtgcagctagaagtccatatcggtttggcagtgtcaaccatctcatcattctctccacctgggtaccaagtctctttctgcttggtgatggtactcctttttgcagtggacacaggactatatttctctgtgaagacaaacatttgaagctcaacaagagactggaaggaccataaacttaaatggagaaaggaccctcaagacacatgacccccatcccatgggggtaataagagcagtggcagcagcatctctgaacatttctctggatttgcaaccccatcatcctcaggcctctctacaagcagcaggaaacatagaactcagagccagatcctttatccaactctcgatttttccttggtctccagtggaagggaaaagcccatgatcttcaagcagggaagccccagtgagtagctgcattcctagaaattgaagtttcagagctacacaaacactttttctgtcccaaccattccctcacagcaaagcaacaatacaggctagggatggtaatcctttaaacatacaaaaattgctcgtattataaattacccagtttagagggaaaaaaagaaaataattattcctaaacaaatggataagtagaattaatggttgaggcaggaccctacagagtgtgggaactgctggggatctagagaattcagtgggaccaatgaaagcatggctgagaaatagcagggtagtccaggatagtctaagggaggtgttcccatctgagcccagagataagggtgtcttcctagaacattagccgtagtggaattaacaggaaatcatgagggtgacgtagaattgagtcttccaggggactctatcagaactggaccatttccaagtatataacgatgagtcctctaatgctaggagtagaaaatggtcctaggaaggggactgaggattggggtgggggtggggtggaaaagaaagtacagaacaaaccctgtgtcactgtctcaagttaagctaagtgaacagaactatctcagcatcagaatgagaaagcctgagaagaaagaaccaaccagaagcacacaggaaggaaagcgcaggaggtgaaaatgctttcttggccggggtagtaagaattagaggttaatgcagggactgtaaaaccaccttttctgcttcaatgtctagttcctgtatagctttgttcattgcatttattaaacaaatgttgtataaccaatactaaatgtactactgagcttcactgagttacgctgtgaaactttcaaatccttcttcatgtcagttccaatgaggtggggatggagaagacaattgttgcttatgaaagaaagctttagctgtctctgttttgtaagctttcagtgcaacatttcttggttccaataaagcattttacaagatcttgcatgctactcttagatagaagatggcaaaaccatggtaataaaatatgaatgat

SEQ ID NO: 133845 - DNA, 2251 bp, Homo sapiens
  Payload ID: 6148
  Gene Symbol: FCGR3B
  Gene Name: Fc fragment of IgG, low affinity IIIb, receptor (CD16b)
  ENST ID: ENST00000613418
  CDS Start-End: 286-936
aggatctccctggttgagggagaagtttgagatgccttgggttcatcagacaccccttttcaggctacgaatgagactcccacaaagggatgggacccctcaccacatctatagctgtggattgagctaccaggacaagccaagatggggctagaaatgaggagaatgctggttccaattgggtcatagtcatgagtgaggccagtcacttcacccctctgggtcccagaatcactatgtggaaccaaagagcttcgactagatggtccctaggtttcagctggcatgcggactgaagatctcccaaaggctgtggtgttcctggagcctcaatggtacagcgtgcttgagaaggacagtgtgactctgaagtgccagggagcctactcccctgaggacaattccacacagtggtttcacaatgagaacctcatctcaagccaggcctcgagctacttcattgacgctgccacagtcaacgacagtggagagtacaggtgccagacaaacctctccaccctcagtgacccggtgcagctagaagtccatatcggctggctgttgctccaggcccctcggtgggtgttcaaggaggaagaccctattcacctgaggtgtcacagctggaagaacactgctctgcataaggtcacatatttacagaatggcaaagacaggaagtattttcatcataattctgacttccacattccaaaagccacactcaaagatagcggctcctacttctgcagggggcttgttgggagtaaaaatgtgtcttcagagactgtgaacatcaccatcactcaaggtttggcagtgtcaaccatctcatcattctctccacctgggtaccaagtctctttctgcttggtgatggtactcctttttgcagtggacacaggactatatttctctgtgaagacaaacatttgaagctcaacaagagactggaaggaccataaacttaaatggagaaaggaccctcaagacacatgacccccatcccatgggggtaataagagcagtggcagcagcatctctgaacatttctctggatttgcaaccccatcatcctcaggcctctctacaagcagcaggaaacatagaactcagagccagatcctttatccaactctcgatttttccttggtctccagtggaagggaaaagcccatgatcttcaagcagggaagccccagtgagtagctgcattcctagaaattgaagtttcagagctacacaaacactttttctgtcccaaccattccctcacagcaaagcaacaatacaggctagggatggtaatcctttaaacatacaaaaattgctcgtattataaattacccagtttagagggaaaaaaagaaaataattattcctaaacaaatggataagtagaattaatggttgaggcaggaccctacagagtgtgggaactgctggggatctagagaattcagtgggaccaatgaaagcatggctgagaaatagcagggtagtccaggatagtctaagggaggtgttcccatctgagcccagagataagggtgtcttcctagaacattagccgtagtggaattaacaggaaatcatgagggtgacgtagaattgagtcttccaggggactctatcagaactggaccatttccaagtatataacgatgagtcctctaatgctaggagtagaaaatggtcctaggaaggggactgaggattggggtgggggtggggtggaaaagaaagtacagaacaaaccctgtgtcactgtctcaagttaagctaagtgaacagaactatctcagcatcagaatgagaaagcctgagaagaaagaaccaaccagaagcacacaggaaggaaagcgcaggaggtgaaaatgctttcttggccggggtagtaagaattagaggttaatgcagggactgtaaaaccaccttttctgcttcaatgtctagttcctgtatagctttgttcattgcatttattaaacaaatgttgtataaccaatactaaatgtactactgagcttcactgagttacgctgtgaaactttcaaatccttcttcatgtcagttccaatgaggtggggatggagaagacaattgttgcttatgaaagaaagctttagctgtctctgttttgtaagctttcagtgcaacatttcttggttccaataaagcattttacaagatcttgcatgctactcttagatagaagatggcaaaaccatggtaataaaatatgaatgat

SEQ ID NO: 133846 - DNA, 1798 bp, Homo sapiens
  Payload ID: 6149
  Gene Symbol: FCGRT
  Gene Name: Fc fragment of IgG, receptor, transporter, alpha
  Uniprot ID: P55899
  ENST ID: ENST00000221466
  CDS Start-End: 487-1584
gaaggatattaaagagcacctgcaggaattttttaaggggatgccgggggaagggcttgaaggaggaactaaggaggcttccagaagattttgattaacagcgagcgctagggaaggccacggggatacagaggggtaggaggaggatccagagacctccaagttgtggactccggaggcatcgagttcctttcccagttttgtcaagaattccctgagcggcagacaccctcaaagtaaaaaacgggaaccacagagaaggaaaaagaagaaccacaagcgttttgagaaacaaacaggctgggcctagggcctggggtgtgccctgcaactggggggtggggctggatgttcttggagtcagggagcagcagcctcccacaggatgtgagagaggaactggggtctccagtcacgggagccaggagccggccagggccgcaggcaggaagggagcgaggctgaagggaacgtcgtcctctcagcatgggggtcccgcggcctcagccctgggcgctggggctcctgctctttctccttcctgggagcctgggcgcagaaagccacctctccctcctgtaccaccttaccgcggtgtcctcgcctgccccggggactcctgccttctgggtgtccggctggctgggcccgcagcagtacctgagctacaatagcctgcggggcgaggcggagccctgtggagcttgggtctgggaaaaccaggtgtcctggtattgggagaaagagaccacagatctgaggatcaaggagaagctctttctggaagctttcaaagctttggggggaaaaggtccctacactctgcagggcctgctgggctgtgaactgggccctgacaacacctcggtgcccaccgccaagttcgccctgaacggcgaggagttcatgaatttcgacctcaagcagggcacctggggtggggactggcccgaggccctggctatcagtcagcggtggcagcagcaggacaaggcggccaacaaggagctcaccttcctgctattctcctgcccgcaccgcctgcgggagcacctggagaggggccgcggaaacctggagtggaaggagcccccctccatgcgcctgaaggcccgacccagcagccctggcttttccgtgcttacctgcagcgccttctccttctaccctccggagctgcaacttcggttcctgcggaatgggctggccgctggcaccggccagggtgacttcggccccaacagtgacggatccttccacgcctcgtcgtcactaacagtcaaaagtggcgatgagcaccactactgctgcattgtgcagcacgcggggctggcgcagcccctcagggtggagctggaatctccagccaagtcctccgtgctcgtggtgggaatcgtcatcggtgtcttgctactcacggcagcggctgtaggaggagctctgttgtggagaaggatgaggagtgggctgccagccccttggatctcccttcgtggagacgacaccggggtcctcctgcccaccccaggggaggcccaggatgctgatttgaaggatgtaaatgtgattccagccaccgcctgaccatccgccattccgactgctaaaagcgaatgtagtcaggcccctttcatgctgtgagacctcctggaacactggcatctctgagcctccagaaggggttctgggcctagttgtcctccctctggagccccgtcctgtggtctgcctcagtttcccctcctaatacatatggctgttttccacctcgataatataacacgagtttgggcccgaa

SEQ ID NO: 133847 - DNA, 1559 bp, Homo sapiens
  Payload ID: 6149
  Gene Symbol: FCGRT
  Gene Name: Fc fragment of IgG, receptor, transporter, alpha
  Uniprot ID: P55899
  ENST ID: ENST00000426395
  CDS Start-End: 248-1345
ggcggagctcggggccgggactctcagcctatcaagtgtctgtaattaattaaccaactgagatccagttcaggggtgaaagttcttcaggtacgaggagggcattgttgtcagtctggaccgagcccgcagagcccctcctcggcgtcctggtcccggccgtgcccgcggtgtcccgggaggaaggggcgggccgggggtcgggaggagtcacgtgccccctcccgccccaggtcgtcctctcagcatgggggtcccgcggcctcagccctgggcgctggggctcctgctctttctccttcctgggagcctgggcgcagaaagccacctctccctcctgtaccaccttaccgcggtgtcctcgcctgccccggggactcctgccttctgggtgtccggctggctgggcccgcagcagtacctgagctacaatagcctgcggggcgaggcggagccctgtggagcttgggtctgggaaaaccaggtgtcctggtattgggagaaagagaccacagatctgaggatcaaggagaagctctttctggaagctttcaaagctttggggggaaaaggtccctacactctgcagggcctgctgggctgtgaactgggccctgacaacacctcggtgcccaccgccaagttcgccctgaacggcgaggagttcatgaatttcgacctcaagcagggcacctggggtggggactggcccgaggccctggctatcagtcagcggtggcagcagcaggacaaggcggccaacaaggagctcaccttcctgctattctcctgcccgcaccgcctgcgggagcacctggagaggggccgcggaaacctggagtggaaggagcccccctccatgcgcctgaaggcccgacccagcagccctggcttttccgtgcttacctgcagcgccttctccttctaccctccggagctgcaacttcggttcctgcggaatgggctggccgctggcaccggccagggtgacttcggccccaacagtgacggatccttccacgcctcgtcgtcactaacagtcaaaagtggcgatgagcaccactactgctgcattgtgcagcacgcggggctggcgcagcccctcagggtggagctggaatctccagccaagtcctccgtgctcgtggtgggaatcgtcatcggtgtcttgctactcacggcagcggctgtaggaggagctctgttgtggagaaggatgaggagtgggctgccagccccttggatctcccttcgtggagacgacaccggggtcctcctgcccaccccaggggaggcccaggatgctgatttgaaggatgtaaatgtgattccagccaccgcctgaccatccgccattccgactgctaaaagcgaatgtagtcaggcccctttcatgctgtgagacctcctggaacactggcatctctgagcctccagaaggggttctgggcctagttgtcctccctctggagccccgtcctgtggtctgcctcagtttcccctcctaatacatatggctgttttccacctcgataatataacacgagtttgggcccgaa

SEQ ID NO: 133848 - DNA, 582 bp, Homo sapiens
  Payload ID: 6149
  Gene Symbol: FCGRT
  Gene Name: Fc fragment of IgG, receptor, transporter, alpha
  ENST ID: ENST00000600273
  CDS Start-End: 80-582
agcctatcaagtgtctgtaattaattaaccaactgagatccagttcaggggtgaaagttcttcaggtcgtcctctcagcatgggggtcccgcggcctcagccctgggcgctggggctcctgctctttctccttcctgggagcctgggcgcagaaagccacctctccctcctgtaccaccttaccgcggtgtcctcgcctgccccggggactcctgccttctgggtgtccggctggctgggcccgcagcagtacctgagctacaatagcctgcggggcgaggcggagccctgtggagcttgggtctgggaaaaccaggtgtcctggtattgggagaaagagaccacagatctgaggatcaaggagaagctctttctggaagctttcaaagctttggggggaaaaggtccctacactctgcagggcctgctgggctgtgaactgggccctgacaacacctcggtgcccaccgccaagttcgccctgaacggcgaggagttcatgaatttcgacctcaagcagggcacctggggtggggactggcccgaggccctggctatcagtcagcggtggcagcagcagga

SEQ ID NO: 133849 - DNA, 1616 bp, Homo sapiens
  Payload ID: 6149
  Gene Symbol: FCGRT
  Gene Name: Fc fragment of IgG, receptor, transporter, alpha
  ENST ID: ENST00000598927
  CDS Start-End: 104-781
ggatgtgagagaggaactggggtctccagtcacgggagccaggagccggccagggccgcaggcaggaagggagcgaggctgaagggaacgtcgtcctctcagcatgggggtcccgcggcctcagccctgggcgctggggctcctgctctttctccttcctgggagcctgggcgcagaaagccacctctccctcctgtaccaccttaccgcggtgtcctcgcctgccccggggactcctgccttctgggtgtccggctggctgggcccgcagcagtacctgagctacaatagcctgcggggcgaggcggagccctgtggagcttgggtctgggaaaaccaggtgtcctggtattgggagaaagagaccacagatctgaggatcaaggagaagctctttctggaagctttcaaagctttggggggaaaaggtccctacactctgcagggcctgctgggctgtgaactgggccctgacaacacctcggtgcccaccgccaagttcgccctgaacggcgaggagttcatgaatttcgacctcaagcagggcacctggggtggggactggcccgaggccctggctatcagtcagcggtggcagcagcaggacaaggcggccaacaaggagctcaccttcctgctattctcctgcccgcaccgcctgcgggagcacctggagaggggccgcggaaacctggagtggaaggacacggtgtctcactatgttgcccaggctggtcttgaactcctaggctccagcgattctcctgctttggtctcctgagtagctgagattacaggcacttgcactgttgcctagactggagtgcagtagcgggattagagttcactgcagcctcaacctcccaagctcaagcgatcctcccaccttacccttcctgaatggatggggccacagagcccccctccatgcgcctgaaggcccgacccagcagccctggcttttccgtgcttacctgcagcgccttctccttctaccctccggagctgcaacttcggttcctgcggaatgggctggccgctggcaccggccagggtgacttcggccccaacagtgacggatccttccacgcctcgtcgtcactaacagtcaaaagtggcgatgagcaccactactgctgcattgtgcagcacgcggggctggcgcagcccctcagggtggagctggaatctccagccaagtcctccgtgctcgtggtgggaatcgtcatcggtgtcttgctactcacggcagcggctgtaggaggagctctgttgtggagaaggatgaggaagattctgatgacctctccctctctctctctcctcagccccttggatctcccttcgtggagacgacaccggggtcctcctgcccaccccaggggaggcccaggatgctgatttgaaggatgtaaatgtgattccagccaccgcctgaccatccgccattccgactgctaaaagcgaatgtagtcaggcccctttcatgctgtgagacctcctggaacactggcatctctgagcctccagaaggggttctgggcctagttgtcctccctctggagccccgtcctgtggtctgcctcagtttcccctcctaatacatatggctgttt

SEQ ID NO: 133850 - DNA, 1054 bp, Homo sapiens
  Payload ID: 6149
  Gene Symbol: FCGRT
  Gene Name: Fc fragment of IgG, receptor, transporter, alpha
  ENST ID: ENST00000596975
  CDS Start-End: 23-844
cgccccaggtcgtcctctcagcatgggggtcccgcggcctcagccctgggcgctggggctcctgctctttctccttcctgggagcctgggcgcagaaagccacctctccctcctgtaccaccttaccgcggtgtcctcgcctgccccggggactcctgccttctgggtgtccggctggctgggcccgcagcagtacctgagctacaatagcctgcggggcgaggcggagccctgtggagcttgggtctgggaaaaccaggtgtcctggtattgggagaaagagaccacagatctgaggatcaaggagaagctctttctggaagctttcaaagctttggggggaaaagagcccccctccatgcgcctgaaggcccgacccagcagccctggcttttccgtgcttacctgcagcgccttctccttctaccctccggagctgcaacttcggttcctgcggaatgggctggccgctggcaccggccagggtgacttcggccccaacagtgacggatccttccacgcctcgtcgtcactaacagtcaaaagtggcgatgagcaccactactgctgcattgtgcagcacgcggggctggcgcagcccctcagggtggagctggaatctccagccaagtcctccgtgctcgtggtgggaatcgtcatcggtgtcttgctactcacggcagcggctgtaggaggagctctgttgtggagaaggatgaggagtgggctgccagccccttggatctcccttcgtggagacgacaccggggtcctcctgcccaccccaggggaggcccaggatgctgatttgaaggatgtaaatgtgattccagccaccgcctgaccatccgccattccgactgctaaaagcgaatgtagtcaggcccctttcatgctgtgagacctcctggaacactggcatctctgagcctccagaaggggttctgggcctagttgtcctccctctggagccccgtcctgtggtctgcctcagtttcccctcctaatacatatggctgttttccacctcgataatataacacgagtttgggcc

SEQ ID NO: 133851 - DNA, 676 bp, Homo sapiens
  Payload ID: 6149
  Gene Symbol: FCGRT
  Gene Name: Fc fragment of IgG, receptor, transporter, alpha
  ENST ID: ENST00000598076
  CDS Start-End: 1-462
tgggagaaagagaccacagatctgaggatcaaggagaagctctttctggaagctttcaaagctttggggggaaaaggtccctacactctgcagggcctgctgggctgtgaactgggccctgacaacacctcggtgcccaccgccaagttcgccctgaacggcgaggagttcatgaatttcgacctcaagcagggcacctggggtggggactggcccgaggccctggctatcagtcagcggtggcagcagcaggacaaggcggccaacaaggagctcaccttcctgctattctcctgcccgcaccgcctgcgggagcacctggagaggggccgcggaaacctggagtggaaggccccttggatctcccttcgtggagacgacaccggggtcctcctgcccaccccaggggaggcccaggatgctgatttgaaggatgtaaatgtgattccagccaccgcctgaccatccgccattccgactgctaaaagcgaatgtagtcaggcccctttcatgctgtgagacctcctggaacactggcatctctgagcctccagaaggggttctgggcctagttgtcctccctctggagccccgtcctgtggtctgcctcagtttcccctcctaatacatatggctgttttccacctcgataatataacacgagtttgggcccgaa

SEQ ID NO: 133852 - DNA, 660 bp, Homo sapiens
  Payload ID: 6149
  Gene Symbol: FCGRT
  Gene Name: Fc fragment of IgG, receptor, transporter, alpha
  ENST ID: ENST00000599988
  CDS Start-End: 147-446
gcattgttgtcagtctggaccgagcccgcagagcccctcctcggcgtcctggtcccggccgtgcccgcggtgtcccgggaggaaggggcgggccgggggtcgggaggagtcacgtgccccctcccgccccaggtcgtcctctcagcatgggggtcccgcggcctcagccctgggcgctggggctcctgctctttctccttcctgggagcctgggcgcagaatctccagccaagtcctccgtgctcgtggtgggaatcgtcatcggtgtcttgctactcacggcagcggctgtaggaggagctctgttgtggagaaggatgaggagtgggctgccagccccttggatctcccttcgtggagacgacaccggggtcctcctgcccaccccaggggaggcccaggatgctgatttgaaggatgtaaatgtgattccagccaccgcctgaccatccgccattccgactgctaaaagcgaatgtagtcaggcccctttcatgctgtgagacctcctggaacactggcatctctgagcctccagaaggggttctgggcctagttgtcctccctctggagccccgtcctgtggtctgcctcagtttcccctcctaatacatatggctgttttccacctcgataatataacacgagtttgggcccgaa

SEQ ID NO: 133853 - DNA, 566 bp, Homo sapiens
  Payload ID: 6149
  Gene Symbol: FCGRT
  Gene Name: Fc fragment of IgG, receptor, transporter, alpha
  ENST ID: ENST00000593381
  CDS Start-End: 1-566
tgtcctcgcctgccccggggactcctgccttctgggtgtccggctggctgggcccgcagcagtacctgagctacaatagcctgcggggcgaggcggagccctgtggagcttgggtctgggaaaaccaggtgtcctggtattgggagaaagagaccacagatctgaggatcaaggagaagctctttctggaagctttcaaagctttggggggaaaaggtccctacactctgcagggcctgctgggctgtgaactgggccctgacaacacctcggtgcccaccgccaagttcgccctgaacggcgaggagttcatgaatttcgacctcaagcagggcacctggggtggggactggcccgaggccctggctatcagtcagcggtggcagcagcaggacaaggcggccaacaaggagctcaccttcctgctattctcctgcccgcaccgcctgcgggagcacctggagaggggccgcggaaacctggagtggaaggcgccttctccttctaccctccggagctgcaacttcggttcctgcggaatgggctggccgctggcaccggccagg

SEQ ID NO: 133854 - DNA, 578 bp, Homo sapiens
  Payload ID: 6149
  Gene Symbol: FCGRT
  Gene Name: Fc fragment of IgG, receptor, transporter, alpha
  ENST ID: ENST00000598491
  CDS Start-End: 155-578
aacagcgagcgctagggaaggccacggggatacagaggggtaggaggaggatccagagacctccaagttgtggactccggaggcatcgagttcctttcccagttttgtcaagaattccctgagcggcagacaccctcaaagtcgtcctctcagcatgggggtcccgcggcctcagccctgggcgctggggctcctgctctttctccttcctgggagcctgggcgcagaaagccacctctccctcctgtaccaccttaccgcggtgtcctcgcctgccccggggactcctgccttctgggtgtccggctggctgggcccgcagcagtacctgagctacaatagcctgcggggcgaggcggagccctgtggagcttgggtctgggaaaaccaggtgtcctggtattgggagaaagagaccacagatctgaggatcaaggagaagctctttctggaagctttcaaagctttggggggaaaaggtccctacactctgcagggcctgctgggctgtgaactgggccctgacaacacctcggtgcccaccgccaagttcgccctgaacggcgaggagttcatga

SEQ ID NO: 133855 - DNA, 1888 bp, Homo sapiens
  Payload ID: 6149
  Gene Symbol: FCGRT
  Gene Name: Fc fragment of IgG, receptor, transporter, alpha
  ENST ID: ENST00000598319
  CDS Start-End: 1-636
ggggtcccgcggcctcagccctgggcgctggggctcctgctctttctccttcctgggagcctgggcgcagaaagccacctctccctcctgtaccaccttaccgcggtgtcctcgcctgccccggggactcctgccttctgggtgtccggctggctgggcccgcagcagtacctgagctacaatagcctgcggggcgaggcggagccctgtggagcttgggtctgggaaaaccaggtgtcctggtattgggagaaagagaccacagatctgaggatcaaggagaagctctttctggaagctttcaaagctttggggggaaaaggtccctacactctgcagggcctgctgggctgtgaactgggccctgacaacacctcggtgcccaccgccaagttcgccctgaacggcgaggagttcatgaatttcgacctcaagcagggcacctggggtggggactggcccgaggccctggctatcagtcagcggtggcagcagcaggacaaggcggccaacaaggagctcaccttcctgctattctcctgcccgcaccgcctgcgggagcacctggagaggggccgcggaaacctggagtggaaggaaccaaaggccagacagattttctgtgcttggatttagtctatattggaagtaccttgaggctgaaggcacgtggctgtgagcacgacacaggaagatacagatttgctgaaaagaatagtgaacataaagcagaagccagaactgctgatggccgtcagcccggtccctccattccacctgacggtgcagcaaattctgccgacttgccagagaggcagctccaggagggagaagctgctgtgctttcctgaagcagcaaatgtgttttctgctgagcaaccaaaaccaagatcccagccaagacccacgattgcccagatccaccctccctgaaaggaacttgggcagtaatgcccagtcctaggcagttgctgaaatctttgccttttattttcttttttgagctgggatcttgctctgtcgcccagactggagtggagtgcagtggcacagtcatagcgccatgtagccttggactcccaagctcaagagatcctcccgcctcagccttacaagtagctgggactatagagcccccctccatgcgcctgaaggcccgacccagcagccctggcttttccgtgcttacctgcagcgccttctccttctaccctccggagctgcaacttcggttcctgcggaatgggctggccgctggcaccggccagggtgacttcggccccaacagtgacggatccttccacgcctcgtcgtcactaacagtcaaaagtggcgatgagcaccactactgctgcattgtgcagcacgcggggctggcgcagcccctcagggtggagctgggtgaggtcccgccaggtggtgatgctcctggtttcccgttgccttgtctcactgctgcgccggtccttcctgagtctgaccttcctccccactgctgccacctccttgaatctgactgccttgaacctcacgcctgtcagtgcccccaaaacctgatggcttgtccttcccaaggccaactgccttccgtctcctgctgcttctggcctcactgagtctgaagagctgttaactaccatggccagtcctccctgagtctgaccatcttccatcctgctgctgctgctgctgctgctgcgggtcttcctggaatctgaccattcgttgtctgctatgcccgtcctcaccaagactgactgcctgctgctttgctactgcccgggcccatgagactgacttcccactgctctgcctgcctctccccactgcactggcacagccccgccttgccgctgctgatccattgccggtgtgaccgcggccgctc

SEQ ID NO: 133856 - DNA, 579 bp, Homo sapiens
  Payload ID: 6149
  Gene Symbol: FCGRT
  Gene Name: Fc fragment of IgG, receptor, transporter, alpha
  ENST ID: ENST00000599701
  CDS Start-End: 464-579
ggagtcagggagcagcagcctcccacaggatgtgagagaggaactggggtctccagtcacgggagccaggagccggccagggccgcaggcaggaagggagcgaggctgaagggaacaaagccacctctccctcctgtaccaccttaccgcggtgtcctcgcctgccccggggactcctgccttctgggtgtccggctggctgggcccgcagcagtacctgagctacaatagcctgcggggcgaggcggagccctgtggagcttgggtctgggaaaaccaggtgtcctggtattgggagaaagagaccacagatctgaggatcaaggagaagctctttctggaagctttcaaagctttggggggaaaaggtccctacactctgcagggcctgctgggctgtgaactgggccctgacaacacctcggtgcccaccgccaagttcgccctgaacggcgaggagttcatgaatttcgacctcaagcagggcacctggggtggggactggcccgaggccctggctatcagtcagcggtggcagcagcaggacaaggcggccaacaaggagctcaccttcctgct

SEQ ID NO: 133857 - DNA, 1950 bp, Homo sapiens
  Payload ID: 6150
  Gene Symbol: FCMR
  Gene Name: Fc fragment of IgM receptor
  Uniprot ID: O60667
  ENST ID: ENST00000367091
  CDS Start-End: 145-1317
atttcctcatcgtcaagctttgttcctcgtgggggctagaaatctctttccagttccagattgtgaagggttcctgagtaagcagcgtgtctccatccccctctctaggggctcttggatggaccttgcactctagaagggacaatggacttctggctttggccactttacttcctgccagtatcgggggccctgaggatcctcccagaagtaaaggtagagggggagctgggcggatcagttaccatcaagtgcccacttcctgaaatgcatgtgaggatatatctgtgccgggagatggctggatctggaacatgtggtaccgtggtatccaccaccaacttcatcaaggcagaatacaagggccgagttactctgaagcaatacccacgcaagaatctgttcctagtggaggtaacacagctgacagaaagtgacagcggagtctatgcctgcggagcgggcatgaacacagaccggggaaagacccagaaagtcaccctgaatgtccacagtgaatacgagccatcatgggaagagcagccaatgcctgagactccaaaatggtttcatctgccctatttgttccagatgcctgcatatgccagttcttccaaattcgtaaccagagttaccacaccagctcaaaggggcaaggtccctccagttcaccactcctcccccaccacccaaatcacccaccgccctcgagtgtccagagcatcttcagtagcaggtgacaagccccgaaccttcctgccatccactacagcctcaaaaatctcagctctggaggggctgctcaagccccagacgcccagctacaaccaccacaccaggctgcacaggcagagagcactggactatggctcacagtctgggagggaaggccaaggatttcacatcctgatcccgaccatcctgggccttttcctgctggcacttctggggctggtggtgaaaagggccgttgaaaggaggaaagccctctccaggcgggcccgccgactggccgtgaggatgcgcgccctggagagctcccagaggccccgcgggtcgccgcgaccgcgctcccaaaacaacatctacagcgcctgcccgcggcgcgctcgtggagcggacgctgcaggcacaggggaggcccccgttcccggccccggagcgccgttgccccccgccccgctgcaggtgtctgaatctccctggctccatgccccatctctgaagaccagctgtgaatacgtgagcctctaccaccagcctgccgccatgatggaggacagtgattcagatgactacatcaatgttcctgcctgacaactccccagctatcccccaaccccaggctcggactgtggtgccaaggagtctcatctatctgctgatgtccaatacctgcttcatgtgttctcagagccctcatcacttcccatgccccatctcgactcccatccccatctatctgtgccctgagcatggctctgcccccaggtcgtcttgcacaccttggcagccccctgtagttgacaggtaagctgtaggcatgtagagcaattgtcccaatgccacttgcttcctttccaagccgtcgaacagactgtgggatttgcagagtgtttcttccatgtctttgaccacagggttgttgctgcccaggctctagatcacatggcatcaggctggggcagaggcatagctattgtctcgggcatccttcccagggttgggtcttacacaaatagaaggctcttgctctgagttatgtgacatgcctcagccccatggactaagcaggggtctggtataaaaacactcctggaaacgcctttgccctgatccaaatgttagcacttgctagtgaacgtctacttatctcaagttctatgctaaaggcaatttatcttgatgtgatgataaaccaaacttattagcaagatatgcatatatatc

SEQ ID NO: 133858 - DNA, 1441 bp, Homo sapiens
  Payload ID: 6150
  Gene Symbol: FCMR
  Gene Name: Fc fragment of IgM receptor
  Uniprot ID: O60667
  ENST ID: ENST00000442471
  CDS Start-End: 145-981
atttcctcatcgtcaagctttgttcctcgtgggggctagaaatctctttccagttccagattgtgaagggttcctgagtaagcagcgtgtctccatccccctctctaggggctcttggatggaccttgcactctagaagggacaatggacttctggctttggccactttacttcctgccagaatacgagccatcatgggaagagcagccaatgcctgagactccaaaatggtttcatctgccctatttgttccagatgcctgcatatgccagttcttccaaattcgtaaccagagttaccacaccagctcaaaggggcaaggtccctccagttcaccactcctcccccaccacccaaatcacccaccgccctcgagtgtccagagcatcttcagtagcaggtgacaagccccgaaccttcctgccatccactacagcctcaaaaatctcagctctggaggggctgctcaagccccagacgcccagctacaaccaccacaccaggctgcacaggcagagagcactggactatggctcacagtctgggagggaaggccaaggatttcacatcctgatcccgaccatcctgggccttttcctgctggcacttctggggctggtggtgaaaagggccgttgaaaggaggaaagccctctccaggcgggcccgccgactggccgtgaggatgcgcgccctggagagctcccagaggccccgcgggtcgccgcgaccgcgctcccaaaacaacatctacagcgcctgcccgcggcgcgctcgtggagcggacgctgcaggcacaggggaggcccccgttcccggccccggagcgccgttgccccccgccccgctgcaggtgtctgaatctccctggctccatgccccatctctgaagaccagctgtgaatacgtgagcctctaccaccagcctgccgccatgatggaggacagtgattcagatgactacatcaatgttcctgcctgacaactccccagctatcccccaaccccaggctcggactgtggtgccaaggagtctcatctatctgctgatgtccaatacctgcttcatgtgttctcagagccctcatcacttcccatgccccatctcgactcccatccccatctatctgtgccctgagcatggctctgcccccaggtcgtcttgcacaccttggcagccccctgtagttgacaggtaagctgtaggcatgtagagcaattgtcccaatgccacttgcttcctttccaagccgtcgaacagactgtgggatttgcagagtgtttcttccatgtctttgaccacagggttgttgctgcccaggctctagatcacatggcatcaggctggggcagaggcatagctattgtctcgggcatccttcccagggttgggtcttacacaaatagaaggctcttgctctgagttatgtgacatgcctcag

SEQ ID NO: 133859 - DNA, 594 bp, Homo sapiens
  Payload ID: 6150
  Gene Symbol: FCMR
  Gene Name: Fc fragment of IgM receptor
  ENST ID: ENST00000525793
  CDS Start-End: 142-594
acaaccactgtggagcccgggtctgtcaggcacatccccccagaaacagtttccagattgtgaagggttcctgagtaagcagcgtgtctccatccccctctctaggggctcttggatggaccttgcactctagaagggacaatggacttctggctttggccactttacttcctgccagtatcgggggccctgaggatcctcccagaagtaaaggtagagggggagctgggcggatcagttaccatcaagtgcccacttcctgaaatgcatgtgaggatatatctgtgccgggagatggctggatctggaacatgtggtaccgtggtatccaccaccaacttcatcaaggcagaatacaagggccgagttactctgaagcaatacccacgcaagaatctgttcctagtggaggtaacacagctgacagaaagtgacagcggagtctatgcctgcggagcgggcatgaacacagaccggggaaagacccagaaagtcaccctgaatgtccacagtgaatacgagccatcatgggaagagcagccaatgcctgagactccaaaatggtttcatctgccctatttgttccagatgcct

SEQ ID NO: 133860 - DNA, 567 bp, Homo sapiens
  Payload ID: 6150
  Gene Symbol: FCMR
  Gene Name: Fc fragment of IgM receptor
  ENST ID: ENST00000530505
  CDS Start-End: 144-567
tttcctcatcgtcaagctttgttcctcgtgggggctagaaatctctttccagttccagattgtgaagggttcctgagtaagcagcgtgtctccatccccctctctaggggctcttggatggaccttgcactctagaagggacaatggacttctggctttggccactttacttcctgccagagatggagtcttgctgtgttgcccaggatggtcttgaacttgtggccttaagtgatcctcctggctcagcttcacaaagcgctgggattacagtatcgggggccctgaggatcctcccagaagtaaaggtagagggggagctgggcggatcagttaccatcaagtgcccacttcctgaaatgcatgtgaggatatatctgtgccgggagatggctggatctggaacatgtggtaccgtggtatccaccaccaacttcatcaaggcagaatacaagggccgagttactctgaagcaatacccacgcaagaatctgttcctagtggaggtaacacagctgacagaaagtgacagcggagtctatgcctgcggagcgggcatgaacacag

SEQ ID NO: 133861 - DNA, 1282 bp, Homo sapiens
  Payload ID: 6150
  Gene Symbol: FCMR
  Gene Name: Fc fragment of IgM receptor
  ENST ID: ENST00000463473
  CDS Start-End: 88-465
agattgtgaagggttcctgagtaagcagcgtgtctccatccccctctctaggggctcttggatggaccttgcactctagaagggacaatggacttctggctttggccactttacttcctgccagtatcgggggccctgaggatcctcccagaagtaaaggtagagggggagctgggcggatcagttaccatcaagtgcccacttcctgaaatgcatgtgaggatatatctgtgccgggagatggctggatctggaacatgtggtaccgtggtatccaccaccaacttcatcaaggcagaatacaagggccgagttactctgaagcaatacccacgcaagaatctgttcctagtggagaatacgagccatcatgggaagagcagccaatgcctgagactccaaaatggtttcatctgccctatttgttccagatgcctgcatatgccagttcttccaaattcgtaaccagagttaccacaccagctcaaaggggcaaggtccctccagttcaccactcctcccccaccacccaaatcacccaccgccctcgagtgtccagagcatcttcagtagcaggtgacaagccccgaaccttcctgccatccactacagcctcaaaaatctcagctctggaggggctgctcaagccccagacgcccagctacaaccaccacaccaggctgcacaggcagagagcactggactatggctcacagtctgggagggaaggccaaggatttcacatcctgatcccgaccatcctgggccttttcctgctggcacttctggggctggtggtgaaaagggccgttgaaaggaggaaagccctctccaggcgggcccgccgactggccgtgaggatgcgcgccctggagagctcccagaggccccgcgggtcgccgcgaccgcgctcccaaaacaacatctacagcgcctgcccgcggcgcgctcgtggagcggacgctgcaggcacaggggaggcccccgttcccggccccggagcgccgttgccccccgccccgctgcaggtgtctgaatctccctggctccatgccccatctctgaagaccagctgtgaatacgtgagcctctaccaccagcctgccgccatgatggaggacagtgattcagatgactacatcaatgttcctgcctgacaactccccagctatcccccaaccccaggctcggactgtggtgccaaggagtctcatctatctgctgatgtccaatacctgcttcatgtgttctcagagccctcatcacttcccatgccccatct

SEQ ID NO: 133862 - DNA, 580 bp, Homo sapiens
  Payload ID: 6150
  Gene Symbol: FCMR
  Gene Name: Fc fragment of IgM receptor
  ENST ID: ENST00000529560
  CDS Start-End: 138-580
agagaacatgtgacaaatctgctgtgtgggggcgagcagggagtggctgacacaaccactgtggagcccgggtctgtcaggcacatccccccagaaacagtgggctcttggatggaccttgcactctagaagggacaatggacttctggctttggccactttacttcctgccagtatcgggggccctgaggatcctcccagaagtaaaggtagagggggagctgggcggatcagttaccatcaagtgcccacttcctgaaatgcatgtgaggatatatctgtgccgggagatggctggatctggaacatgtggtaccgtggtatccaccaccaacttcatcaaggcagaatacaagggccgagttactctgaagcaatacccacgcaagaatctgttcctagtggaggtaacacagctgacagaaagtgacagcggagtctatgcctgcggagcgggcatgaacacagaccggggaaagacccagaaagtcaccctgaatgtccacagtgaatacgagccatcatgggaagagcagccaatgcctgagactccaaaatggtttcatctgccctatttgtt

SEQ ID NO: 133863 - DNA, 1055 bp, Homo sapiens
  Payload ID: 6150
  Gene Symbol: FCMR
  Gene Name: Fc fragment of IgM receptor
  Uniprot ID: O60667
  ENST ID: ENST00000628511
  CDS Start-End: 14-934
tctagaagggacaatggacttctggctttggccactttacttcctgccagtatcgggggccctgaggatcctcccagaagtaaaggtagagggggagctgggcggatcagttaccatcaagtgcccacttcctgaaatgcatgtgaggatatatctgtgccgggagatggctggatctggaacatgtggtaccgtggtatccaccaccaacttcatcaaggcagaatacaagggccgagttactctgaagcaatacccacgcaagaatctgttcctagtggaggtaacacagctgacagaaagtgacagcggagtctatgcctgcggagcgggcatgaacacagaccggggaaagacccagaaagtcaccctgaatgtccacagtgaatacgagccatcatgggaagagcagccaatgcctgagactccaaaatggtttcatctgccctatttgttccagatgcctgcatatgccagttcttccaaattcgtaaccagagttaccacaccagctcaaaggggcaaggtccctccagttcaccactcctcccccaccacccaaatcacccaccgccctcgagtgtccagagcatcttcagtagcaggtgacaagccccgaaccttcctgccatccactacagcctcaaaaatctcagctctggaggggctgctcaagccccagacgcccagctacaaccaccacaccaggctgcacaggcagagccctctccaggcgggcccgccgactggccgtgaggatgcgcgccctggagagctcccagaggccccgcgggtcgccgcgaccgcgctcccaaaacaacatctacagcgcctgcccgcggcgcgctcgtggagcggacgctgcaggcacaggggaggcccccgttcccggccccggagcgccgttgccccccgccccgctgcaggtgtctgaatctccctggctccatgccccatctctgaagaccagctgtgaatacgtgagcctctaccaccagcctgccgccatgatggaggacagtgattcagatgactacatcaatgttcctgcctga

SEQ ID NO: 133864 - DNA, 2605 bp, Homo sapiens
  Payload ID: 6151
  Gene Symbol: FCAMR
  Gene Name: Fc receptor, IgA, IgM, high affinity
  ENST ID: ENST00000324852
  CDS Start-End: 476-2209
aaatggcaggggaattcctctcctgaattttgaattttccctgccctcctgcccaagttgttgcatcacttgtccgggagatgcctgaatgggctggtaagctggggcaccctaaatagtctgagacccctgaaggggacacaagaggaggaaggatatggatcagtgttttcttttttgaagctactgttaccactcctggaaaagttcttcaggaataagtgacagtaagaatgacaagggattaggactggcttcctcttataaataataaaatccaaagagaagtgacttgaggtgagtggcagagctacgccttgcaccccgaccttccgttgctagctccagctgctttccaaaataccaccttgacttctcagtctccaggtttaaaggagagcaactagaagtcgtccaaacacctgcatctcataaggagaagaaaagtccacctggatcttgtttctggactgagatggatggagaggccacagtgaagcctggagaacaaaaggaagtggtgaggagaggaagagaagtggactactccaggctcattgctggcactttaccacaatctcacgtcaccagcaggagggcgggatggaaaatgcccctcttcctcatactgtgcctgctacaaggttcttctttcgcccttccacaaaaaagaccccatccgagatggctgtgggagggctctctcccctccaggacccatctccgggccatgggaacactcaggccttcctcgcccctctgctggcgggaggagagctcctttgcagctccaaattcattgaagggctcaaggctggtgtcaggggagcctggaggagctgtcaccatccagtgccattatgccccctcatctgtcaacaggcaccagaggaagtactggtgccgtctggggcccccaagatggatctgccagaccattgtgtccaccaaccagtatactcaccatcgctatcgtgaccgtgtggccctcacagactttccacagagaggcttgtttgtggtgaggctgtcccaactgtccccggatgacatcggatgctacctctgcggcattggaagtgaaaacaacatgctgttcttaagcatgaatctgaccatctctgcaggtcccgccagcaccctccccacagccactccagctgctggggagctcaccatgagatcctatggaacagcgtctccagtggccaacagatggaccccaggaaccacccagaccttaggacaggggacagcatgggacacagttgcttccactccaggaaccagcaagactacagcttcagctgagggaagacgaaccccaggagcaaccaggccagcagctccagggacaggcagctgggcagagggttctgtcaaagcacctgctccgattccagagagtccaccttcaaagagcagaagcatgtccaatacaacagaaggtgtttgggagggcaccagaagctcggtgacaaacagggctagagccagcaaggacaggagggagatgacaactaccaaggctgataggccaagggaggacatagagggggtcaggatagctcttgatgcagccaaaaaggtcctaggaaccattgggccaccagctctggtctcagaaactttggcctgggaaatcctcccacaagcaacgccagtttctaagcaacaatctcagggttccattggagaaacaactccagctgcaggcatgtggaccttgggaactccagctgcagatgtgtggatcttgggaactccagctgcagatgtgtggaccagcatggaggcagcatctggggaaggaagcgctgcaggggacctagatgctgccactggagacagaggtccccaagcaacactgagccagaccccggcagtaggaccctggggaccccctggcaaggagtcctccgtgaagcgtacttttccagaagatgaaagcagctctcggaccctggctcctgtctctaccatgctggccctgtttatgcttatggctctggttctattgcaaaggaagctctggagaaggaggacctctcaggaggcagaaagggtcaccttaattcagatgacacattttctggaagtgaacccccaagcagaccagctgccccatgtggaaagaaagatgctccaggatgactctcttcctgctggggccagcctgactgccccagagagaaatccaggaccctgagggacagagagatgaactgctcagttaccatgggagaaggaccaagatcaaaggccttcaggaccccagcctctttccatcatccttcctccacctgtgggaagagaagctgatgcagccggtgctccacccatggaagaaaggctggctgtccttgggcccaagaaagtcaagcattatccacgtccaaaggtgacaagatgactcaaaggagacttcaagaacagtgtatgaaacactggaagaggtcacctaggaaaagcatgaaatttccattcctgaatgtttgaaaatagaagaggcttccaatcagtgtggaaagtgacaaatcccctatcaacactcccagcccttgctgggggctccttttctgactactgttagcactcagcctcc

SEQ ID NO: 133865 - DNA, 2752 bp, Homo sapiens
  Payload ID: 6151
  Gene Symbol: FCAMR
  Gene Name: Fc receptor, IgA, IgM, high affinity
  ENST ID: ENST00000324863
  CDS Start-End: 336-488
acaagaggaggaaggatatggatcagtgttttcttttttgaagctactgttaccactcctggaaaagttcttcaggaataagtgacagtaagaatgacaagggattaggactggcttcctcttataaataataaaatccaaagagaagtgacttgaggtgagtggcagagctacgccttgcaccccgaccttccgttgctagctccagctgctttccaaaataccaccttgacttctcagtctccaggtttaaaggagagcaactagaagtcgtccaaacacctgcatctcataaggagaagaaaagtccacctggatcttgtttctggactgagatggatggagaggccacagtgaagcctggagaacaaaagcctccaatcaaagctgataactccctggaaacattttatctcatactcctgcttcctcattgccccacggagccggcttttctccctgaagcccagagattgctgcaccggtgacttcagaggaactggatggaagtggtgaggagaggaagagaagtggactactccaggctcattgctggcactttaccacaatctcacgtcaccagcaggagggcgggatggaaaatgcccctcttcctcatactgtgcctgctacaaggttcttctttcgcccttccacaaaaaagaccccatccgagatggctgtgggagggctctctcccctccaggacccatctccgggccatgggaacactcaggccttcctcgcccctctgctggcgggaggagagctcctttgcagctccaaattcattgaagggctcaaggctggtgtcaggggagcctggaggagctgtcaccatccagtgccattatgccccctcatctgtcaacaggcaccagaggaagtactggtgccgtctggggcccccaagatggatctgccagaccattgtgtccaccaaccagtatactcaccatcgctatcgtgaccgtgtggccctcacagactttccacagagaggcttgtttgtggtgaggctgtcccaactgtccccggatgacatcggatgctacctctgcggcattggaagtgaaaacaacatgctgttcttaagcatgaatctgaccatctctgcaggtcccgccagcaccctccccacagccactccagctgctggggagctcaccatgagatcctatggaacagcgtctccagtggccaacagatggaccccaggaaccacccagaccttaggacaggggacagcatgggacacagttgcttccactccaggaaccagcaagactacagcttcagctgagggaagacgaaccccaggagcaaccaggccagcagctccagggacaggcagctgggcagagggttctgtcaaagcacctgctccgattccagagagtccaccttcaaagagcagaagcatgtccaatacaacagaaggtgtttgggagggcaccagaagctcggtgacaaacagggctagagccagcaaggacaggagggagatgacaactaccaaggctgataggccaagggaggacatagagggggtcaggatagctcttgatgcagccaaaaaggtcctaggaaccattgggccaccagctctggtctcagaaactttggcctgggaaatcctcccacaagcaacgccagtttctaagcaacaatctcagggttccattggagaaacaactccagctgcaggcatgtggaccttgggaactccagctgcagatgtgtggatcttgggaactccagctgcagatgtgtggaccagcatggaggcagcatctggggaaggaagcgctgcaggggacctagatgctgccactggagacagaggtccccaagcaacactgagccagaccccggcagtaggaccctggggaccccctggcaaggagtcctccgtgaagcgtacttttccagaagatgaaagcagctctcggaccctggctcctgtctctaccatgctggccctgtttatgcttatggctctggttctattgcaaaggaagctctggagaaggaggacctctcaggaggcagaaagggtcaccttaattcagatgacacattttctggaagtgaacccccaagcagaccagctgccccatgtggaaagaaagatgctccaggatgactctcttcctgctggggccagcctgactgccccagagagaaatccaggaccctgagggacagagagatgaactgctcagttaccatgggagaaggaccaagatcaaaggccttcaggaccccagcctctttccatcatccttcctccacctgtgggaagagaagctgatgcagccggtgctccacccatggaagaaaggctggctgtccttgggcccaagaaagtcaagcattatccacgtccaaaggtgacaagatgactcaaaggagacttcaagaacagtgtatgaaacactggaagaggtcacctaggaaaagcatgaaatttccattcctgaatgtttgaaaatagaagaggcttccaatcagtgtggaaagtgacaaatcccctatcaacactcccagcccttgctgggggctccttttctgactactgttagcactcagcctcccattcacatgtattatatttaagtgtaccagccttgccttctcaagtagattctaagctcctttaaggcagtaattgcattttatctgtctcatgatgcccccagagaacttccaactcagtaggaccccaataaatacctgtgtctgattgact

SEQ ID NO: 133866 - DNA, 1898 bp, Homo sapiens
  Payload ID: 6151
  Gene Symbol: FCAMR
  Gene Name: Fc receptor, IgA, IgM, high affinity
  Uniprot ID: Q8WWV6
  ENST ID: ENST00000400962
  CDS Start-End: 418-1215
agctggagggcaccagctgccagccaaatggcaggggaattcctctcctgaattttgaattttccctgccctcctgcccaagttgttgcatcacttgtccgggagatgcctgaatgggctggtaagctggggcaccctaaatagtctgagacccctgaaggggacacaagaggaggaaggatatggatcagtgttttcttttttgaagctactgttaccactcctggaaaagttcttcaggaataagtgacagtaagaatgacaagggattaggactggcttcctcttataaataataaaatccaaagagaagtgacttgagtctccaggtttaaaggagagcaactagaagtcgtccaaacacctgcatctcataaggagaagaaaagtccacctggatcttgtttctggactgagatggatggagaggccacagtgaagcctggagaacaaaaggaagtggtgaggagaggaagagaagtggactactccaggctcattgctggcactttaccacaatctcacgtcaccagcaggagggcgggatggaaaatgcccctcttcctcatactgtgcctgctacaaggttcttctttcgcccttccacaaaaaagaccccatccgagatggctgtgggagggctctctcccctccaggacccatctccgggccatgggaacactcaggccttcctcgcccctctgctggcgggaggagagctcctttgcagctccaaattcattgaagggctcaaggctggtgtcaggggagcctggaggagctgtcaccatccagtgccattatgccccctcatctgtcaacaggcaccagaggaagtactggtgccgtctggggcccccaagatggatctgccagaccattgtgtccaccaaccagtatactcaccatcgctatcgtgaccgtgtggccctcacagactttccacagagaggcttgtttgtggtgaggctgtcccaactgtccccggatgacatcggatgctacctctgcggcattggaagtgaaaacaacatgctgttcttaagcatgaatctgaccatctctgcagtacttttccagaagatgaaagcagctctcggaccctggctcctgtctctaccatgctggccctgtttatgcttatggctctggttctattgcaaaggaagctctggagaaggaggacctctcaggaggcagaaagggtcaccttaattcagatgacacattttctggaagtgaacccccaagcagaccagctgccccatgtggaaagaaagatgctccaggatgactctcttcctgctggggccagcctgactgccccagagagaaatccaggaccctgagggacagagagatgaactgctcagttaccatgggagaaggaccaagatcaaaggccttcaggaccccagcctctttccatcatccttcctccacctgtgggaagagaagctgatgcagccggtgctccacccatggaagaaaggctggctgtccttgggcccaagaaagtcaagcattatccacgtccaaaggtgacaagatgactcaaaggagacttcaagaacagtgtatgaaacactggaagaggtcacctaggaaaagcatgaaatttccattcctgaatgtttgaaaatagaagaggcttccaatcagtgtggaaagtgacaaatcccctatcaacactcccagcccttgctgggggctccttttctgactactgttagcactcagcctcccattcacatgtattatatttaagtgtaccagccttgccttctcaagtagattctaagctcctttaaggcagtaattgcattttatctgtctcatgatgcccccagagaacttccaactcagtaggaccccaataaatacctgtgtctgattga

SEQ ID NO: 133867 - DNA, 1307 bp, Homo sapiens
  Payload ID: 6151
  Gene Symbol: FCAMR
  Gene Name: Fc receptor, IgA, IgM, high affinity
  Uniprot ID: Q8WWV6
  ENST ID: ENST00000450945
  CDS Start-End: 25-822
cctggatcttgtttctggactgagatggatggagaggccacagtgaagcctggagaacaaaaggaagtggtgaggagaggaagagaagtggactactccaggctcattgctggcactttaccacaatctcacgtcaccagcaggagggcgggatggaaaatgcccctcttcctcatactgtgcctgctacaaggttcttctttcgcccttccacaaaaaagaccccatccgagatggctgtgggagggctctctcccctccaggacccatctccgggccatgggaacactcaggccttcctcgcccctctgctggcgggaggagagctcctttgcagctccaaattcattgaagggctcaaggctggtgtcaggggagcctggaggagctgtcaccatccagtgccattatgccccctcatctgtcaacaggcaccagaggaagtactggtgccgtctggggcccccaagatggatctgccagaccattgtgtccaccaaccagtatactcaccatcgctatcgtgaccgtgtggccctcacagactttccacagagaggcttgtttgtggtgaggctgtcccaactgtccccggatgacatcggatgctacctctgcggcattggaagtgaaaacaacatgctgttcttaagcatgaatctgaccatctctgcagtacttttccagaagatgaaagcagctctcggaccctggctcctgtctctaccatgctggccctgtttatgcttatggctctggttctattgcaaaggaagctctggagaaggaggacctctcaggaggcagaaagggtcaccttaattcagatgacacattttctggaagtgaacccccaagcagaccagctgccccatgtggaaagaaagatgctccaggatgactctcttcctgctggggccagcctgactgccccagagagaaatccaggaccctgagggacagagagatgaactgctcagttaccatgggagaaggaccaagatcaaaggccttcaggaccccagcctctttccatcatccttcctccacctgtgggaagagaagctgatgcagccggtgctccacccatggaagaaaggctggctgtccttgggcccaagaaagtcaagcattatccacgtccaaaggtgacaagatgactcaaaggagacttcaagaacagtgtatgaaacactggaagaggtcacctaggaaaagcatgaaatttccattcctgaatgtttgaaaatagaagaggcttccaatcagtgtggaaagtgacaaatcccctatcaacactcccagcc

SEQ ID NO: 133868 - DNA, 2778 bp, Homo sapiens
  Payload ID: 6152
  Gene Symbol: FCRL1
  Gene Name: Fc receptor-like 1
  Uniprot ID: Q96LA6
  ENST ID: ENST00000358292
  CDS Start-End: 53-1153
attctttttttgatgagaggcatctctaggtaccatccctgacctggtcctcatgctgccgaggctgttgctgttgatctgtgctccactctgtgaacctgccgagctgtttttgatagccagcccctcccatcccacagaggggagcccagtgaccctgacgtgtaagatgccctttctacagagttcagatgcccagttccagttctgctttttcagagacacccgggccttgggcccaggctggagcagctcccccaagctccagatcgctgccatgtggaaagaagacacagggtcatactggtgcgaggcacagacaatggcgtccaaagtcttgaggagcaggagatcccagataaatgtgcacagggtccctgtcgctgatgtgagcttggagactcagcccccaggaggacaggtgatggagggagacaggctggtcctcatctgctcagttgctatgggcacaggagacatcaccttcctttggtacaaaggggctgtaggtttaaaccttcagtcaaagacccagcgttcactgacagcagagtatgagattccttcagtgagggagagtgatgctgagcaatattactgtgtagctgaaaatggctatggtcccagccccagtgggctggtgagcatcactgtcagaatcccggtgtctcgcccaatcctcatgctcagggctcccagggcccaggctgcagtggaggatgtgctggagcttcactgtgaggccctgagaggctctcctccgatcctgtactggttttatcacgaggatatcaccctggggagcaggtcggccccctctggaggaggagcctccttcaacctttccctgactgaagaacattctggaaactactcctgtgaggccaacaatggcctgggggcccagcgcagtgaggcggtgacactcaacttcacaggaagacgttcagccagggatccactcaggagccttcccagccctctaccccaagagttcacctacctcaactcacctaccccagggcagctacagcctatatatgaaaatgaaccaagagaacaatcagtggctgtgcatggcagacaacagcattcctcagagcagaaggctcagaaaccctggggacacatatggaggacaaggtttccttagacatctattccaggctgaggaaagcaaacattacagatgtggactatgaagatgctatgtaaggttatggaagattctgctctttgaaaaccatccatgaccccaagcctcaggcctgatatgttcttcagagatcctggggcattagctttccagtatacctcttctggatgccattctccatggcactattccttcatctactgtgaagtgaagttggcgcagccctgaagaaactacctaggagaactaatagacacaggagtgacagggactttgttatcagaaccagattcctgccggctcctttgaaaacaggtcatattgtgctcttctgtttacaagaggaaacaagatggaataaaagaaattgggatcttgggttggagggacagtgaagcttagagcacatgaactcaaggttagtgactctgcaggacttcacagagagagctgtgcccatcattcagtccaagtgctttctctgcccagacagcacagaactccagccccgctacttacatggatcatcgagtttccacctaaaatatgattctatttattttgagtcactgttaccaaattagaactaaaacaaagttacataaaaagttattgtgactccacttaattttagtgacgtatttttgtatatataggccaacctataccacatccaaaattatgtatctattacagcccctagaagctttataaatacagtgtgtcttcttttattcacaaaatttttgaaatcgtggtaatatggtttgaaacctgtatcttaattattttttttttaaattgagacagggtctcactctgtcactcaatctggaatgcagtggcacaatcttgcctcactgcaacgcctgcctctcaggctcaagcaaacctctcacctcagcctgctgagtagctgggactacaggcacatgccaccaaacttggccattttttgtcttacgtagagacaagatttcaccgttttgcccaggctggtctcaaactcctgggctcaagcaatgtattgaattttaaaataaccaggcactcactcttatgaattaataaacatttggaggtatataaagtaaaaagttaaagtctttcctgtaagttaacacaaatgttaactattgttaaaaactttacaggtagctctctagatatttttctatttttgtatgtatacttatgcatacatgtaagtatataaacatttagaagtgtacctatctaacaaactattatgaaatactttcaaatctgtaaatagatctattatactattttaaaagtctctatagtagtgtgttatatagataaatcataacttttttctttttttattgtagtaaatatgcacaacataaaattgatcattttaaccatttttaagtgtacaattcagtggcattaagtactatcataatatattttaatccttctcatcactggtggacattaaggagactctcaaaaaattcatattataaaaacaaagttcaaacaaatgtctttgtactagcatattatggcactcctgctggattatctgaaggataaatttgtaaatctagtattgctagattatgcatattaaatattcttgttaaatagtc

SEQ ID NO: 133869 - DNA, 2596 bp, Homo sapiens
  Payload ID: 6152
  Gene Symbol: FCRL1
  Gene Name: Fc receptor-like 1
  Uniprot ID: Q96LA6
  ENST ID: ENST00000368176
  CDS Start-End: 69-1358
ctcgactctgaggtgcattctttttttgatgagaggcatctctaggtaccatccctgacctggtcctcatgctgccgaggctgttgctgttgatctgtgctccactctgtgaacctgccgagctgtttttgatagccagcccctcccatcccacagaggggagcccagtgaccctgacgtgtaagatgccctttctacagagttcagatgcccagttccagttctgctttttcagagacacccgggccttgggcccaggctggagcagctcccccaagctccagatcgctgccatgtggaaagaagacacagggtcatactggtgcgaggcacagacaatggcgtccaaagtcttgaggagcaggagatcccagataaatgtgcacagggtccctgtcgctgatgtgagcttggagactcagcccccaggaggacaggtgatggagggagacaggctggtcctcatctgctcagttgctatgggcacaggagacatcaccttcctttggtacaaaggggctgtaggtttaaaccttcagtcaaagacccagcgttcactgacagcagagtatgagattccttcagtgagggagagtgatgctgagcaatattactgtgtagctgaaaatggctatggtcccagccccagtgggctggtgagcatcactgtcagaatcccggtgtctcgcccaatcctcatgctcagggctcccagggcccaggctgcagtggaggatgtgctggagcttcactgtgaggccctgagaggctctcctccgatcctgtactggttttatcacgaggatatcaccctggggagcaggtcggccccctctggaggaggagcctccttcaacctttccctgactgaagaacattctggaaactactcctgtgaggccaacaatggcctgggggcccagcgcagtgaggcggtgacactcaacttcacagtgcctactggggccagaagcaatcatcttacctcaggagtcattgaggggctgctcagcacccttggtccagccaccgtggccttattattttgctacggcctcaaaagaaaaataggaagacgttcagccagggatccactcaggagccttcccagccctctaccccaagagttcacctacctcaactcacctaccccagggcagctacagcctatatatgaaaatgtgaatgttgtaagtggggatgaggtttattcactggcgtactataaccagccggagcaggaatcagtagcagcagaaaccctggggacacatatggaggacaaggtttccttagacatctattccaggctgaggaaagcaaacattacagatgtggactatgaagatgctatgtaaggttatggaagattctgctctttgaaaaccatccatgaccccaagcctcaggcctgatatgttcttcagagatcctggggcattagctttccagtatacctcttctggatgccattctccatggcactattccttcatctactgtgaagtgaagttggcgcagccctgaagaaactacctaggagaactaatagacacaggagtgacagggactttgttatcagaaccagattcctgccggctcctttgaaaacaggtcatattgtgctcttctgtttacaagaggaaacaagatggaataaaagaaattgggatcttgggttggagggacagtgaagcttagagcacatgaactcaaggttagtgactctgcaggacttcacagagagagctgtgcccatcattcagtccaagtgctttctctgcccagacagcacagaactccagccccgctacttacatggatcatcgagtttccacctaaaatatgattctatttattttgagtcactgttaccaaattagaactaaaacaaagttacataaaaagttattgtgactccacttaattttagtgacgtatttttgtatatataggccaacctataccacatccaaaattatgtatctattacagcccctagaagctttataaatacagtgtgtcttcttttattcacaaaatttttgaaatcgtggtaatatggtttgaaacctgtatcttaattattttttttttaaattgagacagggtctcactctgtcactcaatctggaatgcagtggcacaatcttgcctcactgcaacgcctgcctctcaggctcaagcaaacctctcacctcagcctgctgagtagctgggactacaggcacatgccaccaaacttggccattttttgtcttacgtagagacaagatttcaccgttttgcccaggctggtctcaaactcctgggctcaagcaatgtattgaattttaaaataaccaggcactcactcttatgaattaataaacatttggaggtatataaagtaaaaagttaaagtctttcctgtaagttaacacaaatgttaactattgttaaaaactttacaggtagctctctagatatttttctatttttgtatgtatacttatgcatacatgtaagtatataaacatttagaagtgtacctatctaacaaactattatgaaatactttcaaatctgtaaatagatctattatactattttaaaa

SEQ ID NO: 133870 - DNA, 1554 bp, Homo sapiens
  Payload ID: 6152
  Gene Symbol: FCRL1
  Gene Name: Fc receptor-like 1
  Uniprot ID: Q96LA6
  ENST ID: ENST00000491942
  CDS Start-End: 24-1310
gtaccatccctgacctggtcctcatgctgccgaggctgttgctgttgatctgtgctccactctgtgaacctgccgagctgtttttgatagccagcccctcccatcccacagaggggagcccagtgaccctgacgtgtaagatgccctttctacagagttcagatgcccagttccagttctgctttttcagagacacccgggccttgggcccaggctggagcagctcccccaagctccagatcgctgccatgtggaaagaagacacagggtcatactggtgcgaggcacagacaatggcgtccaaagtcttgaggagcaggagatcccagataaatgtgcacagggtccctgtcgctgatgtgagcttggagactcagcccccaggaggacaggtgatggagggagacaggctggtcctcatctgctcagttgctatgggcacaggagacatcaccttcctttggtacaaaggggctgtaggtttaaaccttcagtcaaagacccagcgttcactgacagcagagtatgagattccttcagtgagggagagtgatgctgagcaatattactgtgtagctgaaaatggctatggtcccagccccagtgggctggtgagcatcactgtcagaatcccggtgtctcgcccaatcctcatgctcagggctcccagggcccaggctgcagtggaggatgtgctggagcttcactgtgaggccctgagaggctctcctccgatcctgtactggttttatcacgaggatatcaccctggggagcaggtcggccccctctggaggaggagcctccttcaacctttccctgactgaagaacattctggaaactactcctgtgaggccaacaatggcctgggggcccagcgcagtgaggcggtgacactcaacttcacagtgcctactggggccagaagcaatcatcttacctcaggagtcattgaggggctgctcagcacccttggtccagccaccgtggccttattattttgctacggcctcaaaagaaaaataggaagacgttcagccagggatccactcaggagccttcccagccctctaccccaagagttcacctacctcaactcacctaccccagggcagctacagcctatatatgaaaatgtgaatgttgtaagtggggatgaggtttattcactggcgtactataaccagccggagcaggaatcagtagcagaaaccctggggacacatatggaggacaaggtttccttagacatctattccaggctgaggaaagcaaacattacagatgtggactatgaagatgctatgtaaggttatggaagattctgctctttgaaaaccatccatgaccccaagcctcaggcctgatatgttcttcagagatcctggggcattagctttccagtatacctcttctggatgccattctccatggcactattccttcatctactgtgaagtgaagttggcgcagccctgaagaaactacctaggagaactaatagacacaggagtgacagggactttgttatcagaaccagattcctgccggctc

SEQ ID NO: 133871 - DNA, 2579 bp, Homo sapiens
  Payload ID: 6153
  Gene Symbol: FCRL2
  Gene Name: Fc receptor-like 2
  Uniprot ID: Q96LA5
  ENST ID: ENST00000361516
  CDS Start-End: 50-1576
gttggtgaccaagagtacatctcttttcaaatagctggattaggtcctcatgctgctgtggtcattgctggtcatctttgatgcagtcactgaacaggcagattcgctgacccttgtggcgccctcttctgtcttcgaaggagacagcatcgttctgaaatgccagggagaacagaactggaaaattcagaagatggcttaccataaggataacaaagagttatctgttttcaaaaaattctcagatttccttatccaaagtgcagttttaagtgacagtggtaactatttctgtagtaccaaaggacaactctttctctgggataaaacttcaaatatagtaaagataaaagtccaagagctctttcaacgtcctgtgctgactgccagctccttccagcccatcgaagggggtccagtgagcctgaaatgtgagacccggctctctccacagaggttggatgttcaactccagttctgcttcttcagagaaaaccaggtcctggggtcaggctggagcagctctccggagctccagatttctgccgtgtggagtgaagacacagggtcttactggtgcaaggcagaaacggtgactcacaggatcagaaaacagagcctccaatcccagattcacgtgcagagaatccccatctctaatgtaagcttggagatccgggcccccgggggacaggtgactgaaggacaaaaactgatcctgctctgctcagtggctgggggtacaggaaatgtcacattctcctggtacagagaggccacaggaaccagtatgggaaagaaaacccagcgttccctgtcagcagagctggagatcccagctgtgaaagagagtgatgccggcaaatattactgtagagctgacaacggccatgtgcctatccagagcaaggtggtgaatatccctgtgagaattccagtgtctcgccctgtcctcaccctcaggtctcctggggcccaggctgcagtgggggacctgctggagcttcactgtgaggccctgagaggctctcccccaatcttgtaccaattttatcatgaggatgtcacccttgggaacagctcggccccctctggaggaggggcctccttcaacctctctttgactgcagaacattctggaaactactcctgtgaggccaacaacggcctgggggcccagtgcagtgaggcagtgccagtctccatctcaggacctgatggctatagaagagacctcatgacagctggagttctctggggactgtttggtgtccttggtttcactggtgttgctttgctgttgtatgccttgttccacaagatatcaggagaaagttctgccactaatgaacccagaggggcttccaggccaaatcctcaagagttcacctattcaagcccaaccccagacatggaggagctgcagccagtgtatgtcaatgtgggctctgtagatgtggatgtggtttattctcaggtctggagcatgcagcagccagaaagctcagcaaacatcaggacacttctggagaacaaggactcccaagtcatctactcttctgtgaagaaatcataacacttggaggaatcagaagggaagatcaacagcaaggatggggcatcattaagacttgctataaaaccttatgaaaatgcttgaggcttatcacctgccacagccagaacgtgcctcaggaggcacctcctgtcatttttgtcctgatgatgtttcttctccaatatcttcttttacctatcaatattcattgaactgctgctacatccagacactgtgcaaataaattatttctgctaccttctcttaagcaatcagtgtgtaaagatttgagggaagaatgaataagagatacaaggtctcaccttcatctactgtgaagtgatgagaacaggacttgatagtggtgtattaacttatttatgtgctgctggatacagtttgctaatattttgttgagaatttttgcaaatatgttcattgggaatattggcctgaaattttcttttccactgtgtctctgccagaatgtttgtatcaggctgatgctggcttcatagaatgagttaggcaggagcccttcctccttgattttttggcatagtttcagcaggattggtaccagttattctttctgcatcttgtagaattcagctatgaatccatctggtctagggcttttgtgttggttggtaagttttttattactaattcaacttcagcgcttgatattggtctaggaggggtttctgtctcttcctggttcaatcttgggagattgtgtgtttccaggaatttagccgtttcctccagattttcttctttatgtgcatcgacttgagtgtaaacataacttatatgcactgggaaaccaaaaaatctgtgtgacttgctttattgcagcatttgttttattttggtagtctggaactgaacctgcaatatcaccaaagtatgcatatagttgcaaaaatgtgatttttgacatagtaaatatgagtatttgcaataaactatgatattacttttgtaagtatatagaataaaatgtaaataatctata

SEQ ID NO: 133872 - DNA, 1669 bp, Homo sapiens
  Payload ID: 6153
  Gene Symbol: FCRL2
  Gene Name: Fc receptor-like 2
  Uniprot ID: Q96LA5
  ENST ID: ENST00000368181
  CDS Start-End: 60-668
agagtctccagttggtgaccaagagtacatctcttttcaaatagctggattaggtcctcatgctgctgtggtcattgctggtcatctttgatgcagtcactgaacaggcagattcgctgacccttgtggcgccctcttctgtcttcgaaggagacagcatcgttctgaaatgccagggagaacagaactggaaaattcagaagatggcttaccataaggataacaaagagttatctgttttcaaaaaattctcagatttccttatccaaagtgcagttttaagtgacagtggtaactatttctgtagtaccaaaggacaactctttctctgggataaaacttcaaatatagtaaagataaaagtccaaggacctgatggctatagaagagacctcatgacagctggagttctctggggactgtttggtgtccttggtttcactggtgttgctttgctgttgtatgccttgttccacaagatatcaggagaaagttctgccactaatgaacccagaggggcttccaggccaaatcctcaagagttcacctattcaagcccaaccccagacatggaggagctgcagccagtgtatgtcaatgcaaacatcaggacacttctggagaacaaggactcccaagtcatctactcttctgtgaagaaatcataacacttggaggaatcagaagggaagatcaacagcaaggatggggcatcattaagacttgctataaaaccttatgaaaatgcttgaggcttatcacctgccacagccagaacgtgcctcaggaggcacctcctgtcatttttgtcctgatgatgtttcttctccaatatcttcttttacctatcaatattcattgaactgctgctacatccagacactgtgcaaataaattatttctgctaccttctcttaagcaatcagtgtgtaaagatttgagggaagaatgaataagagatacaaggtctcaccttcatctactgtgaagtgatgagaacaggacttgatagtggtgtattaacttatttatgtgctgctggatacagtttgctaatattttgttgagaatttttgcaaatatgttcattgggaatattggcctgaaattttcttttccactgtgtctctgccagaatgtttgtatcaggctgatgctggcttcatagaatgagttaggcaggagcccttcctccttgattttttggcatagtttcagcaggattggtaccagttattctttctgcatcttgtagaattcagctatgaatccatctggtctagggcttttgtgttggttggtaagttttttattactaattcaacttcagcgcttgatattggtctaggaggggtttctgtctcttcctggttcaatcttgggagattgtgtgtttccaggaatttagccgtttcctccagattttcttctttatgtgcatcgacttgagtgtaaacataacttatatgcactgggaaaccaaaaaatctgtgtgacttgctttattgcagcatttgttttattttggtagtctggaactgaacctgcaatatcaccaaagtatgcatatagttgcaaaaatgtgatttttgacatagtaaatatgagtatttgcaataaactatgatattacttttgtaagtatatagaataaaatgtaaataatcta

SEQ ID NO: 133873 - DNA, 902 bp, Homo sapiens
  Payload ID: 6153
  Gene Symbol: FCRL2
  Gene Name: Fc receptor-like 2
  Uniprot ID: Q96LA5
  ENST ID: ENST00000469986
  CDS Start-End: 142-720
gaagagggctggatgggcacaggaaaacaatcagatgagaacaacagatgaccgtgtctgcaggcagcacccagaactgatattcccctcaaacgtctaaatatattgttgagaaaattatctctaactgttctagtgggaatgtgggaatggaaaatatgcaacagccatggggccaggccctttgctgagcctgcaggttgggagtttgtgaatctattgaggcatcacaaatcttttctgatagcccctctgtgtctgtcagttccagtgtctcgccctgtcctcaccctcaggtctcctggggcccaggctgcagtgggggacctgctggagcttcactgtgaggccctgagaggctctcccccaatcttgtaccaattttatcatgaggatgtcacccttgggaacagctcggccccctctggaggaggggcctccttcaacctctctttgactgcagaacattctggaaactactcctgtgaggccaacaacggcctgggggcccagtgcagtgaggcagtgccagtctccatctcaggacctgatggctatagaagagacctcatgacagctggagttctctggggactgtttggtgtccttggtttcactggtgttgctttgctgttgtatgccttgttccacaagatatcaggttgtatctaccatttggattctccatattttgctatgacctttccactactgatatagattgaaattacaaaaaaagaagagagaaaagaaaactctccaaaagccaataatttctttttatgcttcataattctgcaaggctctgtgcaatgctcaatgtggtcatactgctaattatacaatatgtcactgttccctgtgcatagtcactggagattaaattatttacacattctttc

SEQ ID NO: 133874 - DNA, 4725 bp, Homo sapiens
  Payload ID: 6154
  Gene Symbol: FCRL3
  Gene Name: Fc receptor-like 3
  Uniprot ID: Q96P31
  ENST ID: ENST00000368184
  CDS Start-End: 293-2497
agtgaaggggtttcccatatgaaaaatacagaaagaattatttgaatactagcaaatacacaacttgatatttctagagaacccaggcacagtcttggagacattactcctgagagactgcagctgatggaagatgagccccaacttctaaaaatgtatcactaccgggattgagatacaaacagcatttaggaaggtctcatctgagtagcagcttcctgccctccttcttggagataagtcgggcttttggtgagacagactttcccaaccctctgcccggccggtgcccatgcttctgtggctgctgctgctgatcctgactcctggaagagaacaatcaggggtggccccaaaagctgtacttctcctcaatcctccatggtccacagccttcaaaggagaaaaagtggctctcatatgcagcagcatatcacattccctagcccagggagacacatattggtatcacgatgagaagttgttgaaaataaaacatgacaagatccaaattacagagcctggaaattaccaatgtaagacccgaggatcctccctcagtgatgccgtgcatgtggaattttcacctgactggctgatcctgcaggctttacatcctgtctttgaaggagacaatgtcattctgagatgtcaggggaaagacaacaaaaacactcatcaaaaggtttactacaaggatggaaaacagcttcctaatagttataatttagagaagatcacagtgaattcagtctccagggataatagcaaatatcattgtactgcttataggaagttttacatacttgacattgaagtaacttcaaaacccctaaatatccaagttcaagagctgtttctacatcctgtgctgagagccagctcttccacgcccatagaggggagtcccatgaccctgacctgtgagacccagctctctccacagaggccagatgtccagctgcaattctccctcttcagagatagccagaccctcggattgggctggagcaggtcccccagactccagatccctgccatgtggactgaagactcagggtcttactggtgtgaggtggagacagtgactcacagcatcaaaaaaaggagcctgagatctcagatacgtgtacagagagtccctgtgtctaatgtgaatctagagatccggcccaccggagggcagctgattgaaggagaaaatatggtccttatttgctcagtagcccagggttcagggactgtcacattctcctggcacaaagaaggaagagtaagaagcctgggtagaaagacccagcgttccctgttggcagagctgcatgttctcaccgtgaaggagagtgatgcagggagatactactgtgcagctgataacgttcacagccccatcctcagcacgtggattcgagtcaccgtgagaattccggtatctcaccctgtcctcaccttcagggctcccagggcccacactgtggtgggggacctgctggagcttcactgtgagtccctgagaggctctcccccgatcctgtaccgattttatcatgaggatgtcaccctggggaacagctcagccccctctggaggaggagcctccttcaacctctctctgactgcagaacattctggaaactactcctgtgatgcagacaatggcctgggggcccagcacagtcatggagtgagtctcagggtcacagttccggtgtctcgccccgtcctcaccctcagggctcccggggcccaggctgtggtgggggacctgctggagcttcactgtgagtccctgagaggctccttcccgatcctgtactggttttatcacgaggatgacaccttggggaacatctcggcccactctggaggaggggcatccttcaacctctctctgactacagaacattctggaaactactcatgtgaggctgacaatggcctgggggcccagcacagtaaagtggtgacactcaatgttacaggaacttccaggaacagaacaggccttaccgctgcgggaatcacggggctggtgctcagcatcctcgtccttgctgctgctgctgctctgctgcattacgccagggcccgaaggaaaccaggaggactttctgccactggaacatctagtcacagtcctagtgagtgtcaggagccttcctcgtccaggccttccaggatagaccctcaagagcccactcactctaaaccactagccccaatggagctggagccaatgtacagcaatgtaaatcctggagatagcaacccgatttattcccagatctggagcatccagcatacaaaagaaaactcagctaattgtccaatgatgcatcaagagcatgaggaacttacagtcctctattcagaactgaagaagacacacccagacgactctgcaggggaggctagcagcagaggcagggcccatgaagaagatgatgaagaaaactatgagaatgtaccacgtgtattactggcctcagaccactagccccttacccagagtggcccacaggaaacagcctgcaccatttttttttctgttctctccaaccacacatcatccatctctccagactctgcctcctacgaggctgggctgcagggtatgtgaggctgagcaaaaggtctgcaaatctcccctgtgcctgatctgtgtgttccccaggaagagagcaggcagcctctgagcaagcactgtgttattttcacagtggagacacgtggcaaggcaggagggccctcagctcctagggctgtcgaatagaggaggagagagaaatggtctagccagggttacaagggcacaatcatgaccatttgatccaagtgtgatcgaaagctgttaatgtgctctctgtataaacaatttgctccaaatattttgtttcccttttttgtgtggctggtagtggcattgctgatgttttggtgtatatgctgtatccttgctaccatattgggaacagccaaaagaagttatagaacaagaatttaaggtgactctatctgaagtgtatttttgtacttacagggtgacattcccaaccaaattaccctagttatgatgaaaaataacttcagcatttcattaaagactctgctagtttaatatgtgacttgtatccccactgcaaagaccttatgtgtgaagaatcacattaattgtaatttttgcttcatgacatagtctcatcatttgccatacatgatagatttctagtcagtcagttttattcttataagcacccattaaccccgagacaataacctactatatctatgtggcttctcccattctcttcctctacctcactccatctgataaaaaaccattctaaatctcatgttcattattcccatgctctcctatttctatcatattaatgtatctacatgttttccttaaatatgtttttatattagttttaactataagttaaagaccatattgttgtagataattttttttagtactttctcttcatgttgtatttctaagattcatccatattgttgcgtgttgctatagttcatttgtttttattgctgtttagtatttacttgtgtaaaatatctggcttaatgttttcctagctatcaccatcaaaaactctttccacagtgtgttgaatttttaatatgacaaaaatgaaaatgtaccaacaattttcagtgacttcacctccattctgaaatcctgatgtttccaaatatctctgaacacctcaagtcctagggacaactgagattatattaacattaatctctgaatgttgccaattctaggccttcacttggttcatgtaggaacaccaagtccctttcaaagcaccacatcttcctctaatcaatatttcttggagtccctagggaatgtcttacatgcattcaaacaatcaccatttctggagatacactacagggtcaccataaactctgctacccttaggttccatcactatggaagctgagtttcaccagaaggcacttttgtcctccattacgaccagcaaagccagctaagccacagctgctggcctcaaaaaatgtgatgatcaatccacactgctcccactggcctctgttacccttatcctggcctttgagtgcagggcatgatgtcctgcccgtactgagatgctgatctctgccagttcatgttcatattggcattaaaattttaaggtcccttgaagagggaggaggcaaatgtctctgtcttctatgtgatacattctgctgtttttttctctatggtgaaaatatgtaaaccggttttgggtaccaaccaccaggctgtatatggaggctctcctcctttctaaccctgctgctgatttggaattaccttgccaagcccctttgtgccttatagtgaactttctctaagggacctgtcatctcttatcattgtttatccattttctagattctgaacccaagaaagaacaaagttcaagattttccatgtctttgtaacacttagccctgtgcaaatcagagtatgtgagtggaagaaggggtgagtcctaactgtacatctcggatataacaaatgtgcaaattctgattgattgccctgtaaaatgaattattctcatgcagtgctctacttgacttttatctttgaattcacaactaaaaacccatagcccagaaatctaaaaaaagtaattttagtggagcctttgaaaataaaagaccattggaaaaagt

SEQ ID NO: 133875 - DNA, 2633 bp, Homo sapiens
  Payload ID: 6154
  Gene Symbol: FCRL3
  Gene Name: Fc receptor-like 3
  Uniprot ID: Q96P31
  ENST ID: ENST00000368186
  CDS Start-End: 174-2402
gcagctgatggaagatgagccccaacttctaaaaatgtatcactaccgggattgagatacaaacagcatttaggaaggtctcatctgagtagcagcttcctgccctccttcttggagataagtcgggcttttggtgagacagactttcccaaccctctgcccggccggtgcccatgcttctgtggctgctgctgctgatcctgactcctggaagagaacaatcaggggtggccccaaaagctgtacttctcctcaatcctccatggtccacagccttcaaaggagaaaaagtggctctcatatgcagcagcatatcacattccctagcccagggagacacatattggtatcacgatgagaagttgttgaaaataaaacatgacaagatccaaattacagagcctggaaattaccaatgtaagacccgaggatcctccctcagtgatgccgtgcatgtggaattttcacctgactggctgatcctgcaggctttacatcctgtctttgaaggagacaatgtcattctgagatgtcaggggaaagacaacaaaaacactcatcaaaaggtttactacaaggatggaaaacagcttcctaatagttataatttagagaagatcacagtgaattcagtctccagggataatagcaaatatcattgtactgcttataggaagttttacatacttgacattgaagtaacttcaaaacccctaaatatccaagttcaagagctgtttctacatcctgtgctgagagccagctcttccacgcccatagaggggagtcccatgaccctgacctgtgagacccagctctctccacagaggccagatgtccagctgcaattctccctcttcagagatagccagaccctcggattgggctggagcaggtcccccagactccagatccctgccatgtggactgaagactcagggtcttactggtgtgaggtggagacagtgactcacagcatcaaaaaaaggagcctgagatctcagatacgtgtacagagagtccctgtgtctaatgtgaatctagagatccggcccaccggagggcagctgattgaaggagaaaatatggtccttatttgctcagtagcccagggttcagggactgtcacattctcctggcacaaagaaggaagagtaagaagcctgggtagaaagacccagcgttccctgttggcagagctgcatgttctcaccgtgaaggagagtgatgcagggagatactactgtgcagctgataacgttcacagccccatcctcagcacgtggattcgagtcaccgtgagaattccggtatctcaccctgtcctcaccttcagggctcccagggcccacactgtggtgggggacctgctggagcttcactgtgagtccctgagaggctctcccccgatcctgtaccgattttatcatgaggatgtcaccctggggaacagctcagccccctctggaggaggagcctccttcaacctctctctgactgcagaacattctggaaactactcctgtgatgcagacaatggcctgggggcccagcacagtcatggagtgagtctcagggtcacagttccggtgtctcgccccgtcctcaccctcagggctcccggggcccaggctgtggtgggggacctgctggagcttcactgtgagtccctgagaggctccttcccgatcctgtactggttttatcacgaggatgacaccttggggaacatctcggcccactctggaggaggggcatccttcaacctctctctgactacagaacattctggaaactactcatgtgaggctgacaatggcctgggggcccagcacagtaaagtggtgacactcaatgttacaggaacttccaggaacagaacaggccttaccgctgcgggaatcacggggctggtgctcagcatcctcgtccttgctgctgctgctgctctgctgcattacgccagggcccgaaggaaaccaggaggactttctgccactggaacatctagtcacagtcctagtgagtgtcaggagccttcctcgtccaggccttccaggatagaccctcaagagcccactcactctaaaccactagccccaatggagctggagccaatgtacagcaatgtaaatcctggagatagcaacccgatttattcccagatctggagcatccagcatacaaaagaaaactcagctaattgtccaatgatgcatcaagagcatgaggaacttacagtcctctattcagaactgaagaagacacacccagacgactctgcaggggaggctagcagcagaggcagggcccatgaagaagatgatgaagaaaactatgagaatattctgaacccaagaaagaacaaagttcaagattttccatgtctttgtaacacttagccctgtgcaaatcagagtatgtgagtggaagaaggggtgagtcctaactgtacatctcggatataacaaatgtgcaaattctgattgattgccctgtaaaatgaattattctcatgcagtgctctacttgacttttatctttgaattcacaactaaaaacccatagcccagaaatctaaaaaaagtaattttagtggagcctttgaaaataaaagaccattggaaaaagta

SEQ ID NO: 133876 - DNA, 2488 bp, Homo sapiens
  Payload ID: 6154
  Gene Symbol: FCRL3
  Gene Name: Fc receptor-like 3
  Uniprot ID: Q96P31
  ENST ID: ENST00000477837
  CDS Start-End: 166-2085
tggaagatgagccccaacttctaaaaatgtatcactaccgggattgagatacaaacagcatttaggaaggtctcatctgagtagcagcttcctgccctccttcttggagataagtcgggcttttggtgagacagactttcccaaccctctgcccggccggtgcccatgcttctgtggctgctgctgctgatcctgactcctggaagagaacaatcaggggtggccccaaaagctgtacttctcctcaatcctccatggtccacagccttcaaaggagaaaaagtggctctcatatgcagcagcatatcacattccctagcccagggagacacatattggtatcacgatgagaagttgttgaaaataaaacatgacaagatccaaattacagagcctggaaattaccaatgtaagacccgaggatcctccctcagtgatgccgtgcatgtggaattttcacctgactggctgatcctgcaggctttacatcctgtctttgaaggagacaatgtcattctgagatgtcaggggaaagacaacaaaaacactcatcaaaaggtttactacaaggatggaaaacagcttcctaatagttataatttagagaagatcacagtgaattcagtctccagggataatagcaaatatcattgtactgcttataggaagttttacatacttgacattgaagtaacttcaaaacccctaaatatccaagttcaaggagtccctgtgtctaatgtgaatctagagatccggcccaccggagggcagctgattgaaggagaaaatatggtccttatttgctcagtagcccagggttcagggactgtcacattctcctggcacaaagaaggaagagtaagaagcctgggtagaaagacccagcgttccctgttggcagagctgcatgttctcaccgtgaaggagagtgatgcagggagatactactgtgcagctgataacgttcacagccccatcctcagcacgtggattcgagtcaccgtgagaattccggtatctcaccctgtcctcaccttcagggctcccagggcccacactgtggtgggggacctgctggagcttcactgtgagtccctgagaggctctcccccgatcctgtaccgattttatcatgaggatgtcaccctggggaacagctcagccccctctggaggaggagcctccttcaacctctctctgactgcagaacattctggaaactactcctgtgatgcagacaatggcctgggggcccagcacagtcatggagtgagtctcagggtcacagttccggtgtctcgccccgtcctcaccctcagggctcccggggcccaggctgtggtgggggacctgctggagcttcactgtgagtccctgagaggctccttcccgatcctgtactggttttatcacgaggatgacaccttggggaacatctcggcccactctggaggaggggcatccttcaacctctctctgactacagaacattctggaaactactcatgtgaggctgacaatggcctgggggcccagcacagtaaagtggtgacactcaatgttacaggaacttccaggaacagaacaggccttaccgctgcgggaatcacggggctggtgctcagcatcctcgtccttgctgctgctgctgctctgctgcattacgccagggcccgaaggaaaccaggaggactttctgccactggaacatctagtcacagtcctagtgagtgtcaggagccttcctcgtccaggccttccaggatagaccctcaagagcccactcactctaaaccactagccccaatggagctggagccaatgtacagcaatgtaaatcctggagatagcaacccgatttattcccagatctggagcatccagcatacaaaagaaaactcagctaattgtccaatgatgcatcaagagcatgaggaacttacagtcctctattcagaactgaagaagacacacccagacgactctgcaggggaggctagcagcagaggcagggcccatgaagaagatgatgaagaaaactatgagaatgtaccacgtgtattactggcctcagaccactagccccttacccagagtggcccacaggaaacagcctgcaccatttttttttctgttctctccaaccacacatcatccatctctccagactctgcctcctacgaggctgggctgcaggattctgaacccaagaaagaacaaagttcaagattttccatgtctttgtaacacttagccctgtgcaaatcagagtatgtgagtggaagaaggggtgagtcctaactgtacatctcggatataacaaatgtgcaaattctgattgattgccctgtaaaatgaattattctcatgcagtgctctacttgacttttatctttgaattcacaactaaaaacccatagcccagaaatctaaaaaaagtaattttagtggagcctttgaaaataaaagaccattggaaaaagta

SEQ ID NO: 133877 - DNA, 2786 bp, Homo sapiens
  Payload ID: 6154
  Gene Symbol: FCRL3
  Gene Name: Fc receptor-like 3
  Uniprot ID: Q96P31
  ENST ID: ENST00000485028
  CDS Start-End: 179-2383
agactgcagctgatggaagatgagccccaacttctaaaaatgtatcactaccgggattgagatacaaacagcatttaggaaggtctcatctgagtagcagcttcctgccctccttcttggagataagtcgggcttttggtgagacagactttcccaaccctctgcccggccggtgcccatgcttctgtggctgctgctgctgatcctgactcctggaagagaacaatcaggggtggccccaaaagctgtacttctcctcaatcctccatggtccacagccttcaaaggagaaaaagtggctctcatatgcagcagcatatcacattccctagcccagggagacacatattggtatcacgatgagaagttgttgaaaataaaacatgacaagatccaaattacagagcctggaaattaccaatgtaagacccgaggatcctccctcagtgatgccgtgcatgtggaattttcacctgactggctgatcctgcaggctttacatcctgtctttgaaggagacaatgtcattctgagatgtcaggggaaagacaacaaaaacactcatcaaaaggtttactacaaggatggaaaacagcttcctaatagttataatttagagaagatcacagtgaattcagtctccagggataatagcaaatatcattgtactgcttataggaagttttacatacttgacattgaagtaacttcaaaacccctaaatatccaagttcaagagctgtttctacatcctgtgctgagagccagctcttccacgcccatagaggggagtcccatgaccctgacctgtgagacccagctctctccacagaggccagatgtccagctgcaattctccctcttcagagatagccagaccctcggattgggctggagcaggtcccccagactccagatccctgccatgtggactgaagactcagggtcttactggtgtgaggtggagacagtgactcacagcatcaaaaaaaggagcctgagatctcagatacgtgtacagagagtccctgtgtctaatgtgaatctagagatccggcccaccggagggcagctgattgaaggagaaaatatggtccttatttgctcagtagcccagggttcagggactgtcacattctcctggcacaaagaaggaagagtaagaagcctgggtagaaagacccagcgttccctgttggcagagctgcatgttctcaccgtgaaggagagtgatgcagggagatactactgtgcagctgataacgttcacagccccatcctcagcacgtggattcgagtcaccgtgagaattccggtatctcaccctgtcctcaccttcagggctcccagggcccacactgtggtgggggacctgctggagcttcactgtgagtccctgagaggctctcccccgatcctgtaccgattttatcatgaggatgtcaccctggggaacagctcagccccctctggaggaggagcctccttcaacctctctctgactgcagaacattctggaaactactcctgtgatgcagacaatggcctgggggcccagcacagtcatggagtgagtctcagggtcacagttccggtgtctcgccccgtcctcaccctcagggctcccggggcccaggctgtggtgggggacctgctggagcttcactgtgagtccctgagaggctccttcccgatcctgtactggttttatcacgaggatgacaccttggggaacatctcggcccactctggaggaggggcatccttcaacctctctctgactacagaacattctggaaactactcatgtgaggctgacaatggcctgggggcccagcacagtaaagtggtgacactcaatgttacaggaacttccaggaacagaacaggccttaccgctgcgggaatcacggggctggtgctcagcatcctcgtccttgctgctgctgctgctctgctgcattacgccagggcccgaaggaaaccaggaggactttctgccactggaacatctagtcacagtcctagtgagtgtcaggagccttcctcgtccaggccttccaggatagaccctcaagagcccactcactctaaaccactagccccaatggagctggagccaatgtacagcaatgtaaatcctggagatagcaacccgatttattcccagatctggagcatccagcatacaaaagaaaactcagctaattgtccaatgatgcatcaagagcatgaggaacttacagtcctctattcagaactgaagaagacacacccagacgactctgcaggggaggctagcagcagaggcagggcccatgaagaagatgatgaagaaaactatgagaatgtaccacgtgtattactggcctcagaccactagccccttacccagagtggcccacaggaaacagcctgcaccatttttttttctgttctctccaaccacacatcatccatctctccagactctgcctcctacgaggctgggctgcaggattctgaacccaagaaagaacaaagttcaagattttccatgtctttgtaacacttagccctgtgcaaatcagagtatgtgagtggaagaaggggtgagtcctaactgtacatctcggatataacaaatgtgcaaattctgattgattgccctgtaaaatgaattattctcatgcagtgctctacttgacttttatctttgaattcacaactaaaaacccatagcccagaaatctaaaaaaagtaattttagtggagcctttgaaaataaaagaccattggaaaaagta

SEQ ID NO: 133878 - DNA, 2791 bp, Homo sapiens
  Payload ID: 6154
  Gene Symbol: FCRL3
  Gene Name: Fc receptor-like 3
  Uniprot ID: Q96P31
  ENST ID: ENST00000492769
  CDS Start-End: 166-2388
tggaagatgagccccaacttctaaaaatgtatcactaccgggattgagatacaaacagcatttaggaaggtctcatctgagtagcagcttcctgccctccttcttggagataagtcgggcttttggtgagacagactttcccaaccctctgcccggccggtgcccatgcttctgtggctgctgctgctgatcctgactcctggaagagaacaatcaggggtggccccaaaagctgtacttctcctcaatcctccatggtccacagccttcaaaggagaaaaagtggctctcatatgcagcagcatatcacattccctagcccagggagacacatattggtatcacgatgagaagttgttgaaaataaaacatgacaagatccaaattacagagcctggaaattaccaatgtaagacccgaggatcctccctcagtgatgccgtgcatgtggaattttcacctgactggctgatcctgcaggctttacatcctgtctttgaaggagacaatgtcattctgagatgtcaggggaaagacaacaaaaacactcatcaaaaggtttactacaaggatggaaaacagcttcctaatagttataatttagagaagatcacagtgaattcagtctccagggataatagcaaatatcattgtactgcttataggaagttttacatacttgacattgaagtaacttcaaaacccctaaatatccaagttcaagagctgtttctacatcctgtgctgagagccagctcttccacgcccatagaggggagtcccatgaccctgacctgtgagacccagctctctccacagaggccagatgtccagctgcaattctccctcttcagagatagccagaccctcggattgggctggagcaggtcccccagactccagatccctgccatgtggactgaagactcagggtcttactggtgtgaggtggagacagtgactcacagcatcaaaaaaaggagcctgagatctcagatacgtgtacagagagtccctgtgtctaatgtgaatctagagatccggcccaccggagggcagctgattgaaggagaaaatatggtccttatttgctcagtagcccagggttcagggactgtcacattctcctggcacaaagaaggaagagtaagaagcctgggtagaaagacccagcgttccctgttggcagagctgcatgttctcaccgtgaaggagagtgatgcagggagatactactgtgcagctgataacgttcacagccccatcctcagcacgtggattcgagtcaccgtgagaacccttttgtctccttcagttccggtatctcaccctgtcctcaccttcagggctcccagggcccacactgtggtgggggacctgctggagcttcactgtgagtccctgagaggctctcccccgatcctgtaccgattttatcatgaggatgtcaccctggggaacagctcagccccctctggaggaggagcctccttcaacctctctctgactgcagaacattctggaaactactcctgtgatgcagacaatggcctgggggcccagcacagtcatggagtgagtctcagggtcacagttccggtgtctcgccccgtcctcaccctcagggctcccggggcccaggctgtggtgggggacctgctggagcttcactgtgagtccctgagaggctccttcccgatcctgtactggttttatcacgaggatgacaccttggggaacatctcggcccactctggaggaggggcatccttcaacctctctctgactacagaacattctggaaactactcatgtgaggctgacaatggcctgggggcccagcacagtaaagtggtgacactcaatgttacaggaacttccaggaacagaacaggccttaccgctgcgggaatcacggggctggtgctcagcatcctcgtccttgctgctgctgctgctctgctgcattacgccagggcccgaaggaaaccaggaggactttctgccactggaacatctagtcacagtcctagtgagtgtcaggagccttcctcgtccaggccttccaggatagaccctcaagagcccactcactctaaaccactagccccaatggagctggagccaatgtacagcaatgtaaatcctggagatagcaacccgatttattcccagatctggagcatccagcatacaaaagaaaactcagctaattgtccaatgatgcatcaagagcatgaggaacttacagtcctctattcagaactgaagaagacacacccagacgactctgcaggggaggctagcagcagaggcagggcccatgaagaagatgatgaagaaaactatgagaatgtaccacgtgtattactggcctcagaccactagccccttacccagagtggcccacaggaaacagcctgcaccatttttttttctgttctctccaaccacacatcatccatctctccagactctgcctcctacgaggctgggctgcaggattctgaacccaagaaagaacaaagttcaagattttccatgtctttgtaacacttagccctgtgcaaatcagagtatgtgagtggaagaaggggtgagtcctaactgtacatctcggatataacaaatgtgcaaattctgattgattgccctgtaaaatgaattattctcatgcagtgctctacttgacttttatctttgaattcacaactaaaaacccatagcccagaaatctaaaaaaagtaattttagtggagcctttgaaaataaaagaccattggaaaaagta

SEQ ID NO: 133879 - DNA, 907 bp, Homo sapiens
  Payload ID: 6154
  Gene Symbol: FCRL3
  Gene Name: Fc receptor-like 3
  ENST ID: ENST00000496769
  CDS Start-End: 140-907
agagactgcagctgatggaagatgagccccaacttctaaaaatgtctcatctgagtagcagcttcctgccctccttcttggagataagtcgggcttttggtgagacagactttcccaaccctctgcccggccggtgcccatgcttctgtggctgctgctgctgatcctgactcctggaagagaacaatcaggggtggccccaaaagctgtacttctcctcaatcctccatggtccacagccttcaaaggagaaaaagtggctctcatatgcagcagcatatcacattccctagcccagggagacacatattggtatcacgatgagaagttgttgaaaataaaacatgacaagatccaaattacagagcctggaaattaccaatgtaagacccgaggatcctccctcagtgatgccgtgcatgtggaattttcacctgactggctgatcctgcaggctttacatcctgtctttgaaggagacaatgtcattctgagatgtcaggggaaagacaacaaaaacactcatcaaaaggtttactacaaggatggaaaacagcttcctaatagttataatttagagaagatcacagtgaattcagtctccagggataatagcaaatatcattgtactgcttataggaagttttacatacttgacattgaagtaacttcaaaacccctaaatatccaagttcaagagctgtttctacatcctgtgctgagagccagctcttccacgcccatagaggggagtcccatgaccctgacctgtgagacccagctctctccacagaggccagatgtccagctgcaattctccctcttcagagatagccagaccctcggattgggctggagcaggtcccccagactccagatccctgccatgtggactgaagactcaggg

SEQ ID NO: 133880 - DNA, 3459 bp, Homo sapiens
  Payload ID: 6155
  Gene Symbol: FCRL4
  Gene Name: Fc receptor-like 4
  Uniprot ID: Q96PJ5
  ENST ID: ENST00000271532
  CDS Start-End: 137-1684
ctcaatcagctttatgcagagaagaagcttactgagctcactgctggtgctggtgtaggcaagtgctgctttggcaatctgggctgacctggcttgtctcctcagaactccttctccaatcctggagcaggcttccatgctgctgtgggcgtccttgctggcctttgctccagtctgtggacaatctgcagctgcacacaaacctgtgatttccgtccatcctccatggaccacattcttcaaaggagagagagtgactctgacttgcaatggatttcagttctatgcaacagagaaaacaacatggtatcatcggcactactggggagaaaagttgaccctgaccccaggaaacaccctcgaggttcgggaatctggactgtacagatgccaggcccggggctccccacgaagtaaccctgtgcgcttgctcttttcttcagactccttaatcctgcaggcaccatattctgtgtttgaaggtgacacattggttctgagatgccacagaagaaggaaagagaaattgactgctgtgaaatatacttggaatggaaacattctttccatttctaataaaagctgggatcttcttatcccacaagcaagttcaaataacaatggcaattatcgatgcattggatatggagacgagaatgatgtatttagatcaaatttcaaaataattaaaattcaagaactatttccacatccagagctgaaagctacagactctcagcctacagaggggaattctgtaaacctgagctgtgaaacacagcttcctccagagcggtcagacaccccacttcacttcaacttcttcagagatggcgaggtcatcctgtcagactggagcacgtacccggaactccagctcccaaccgtctggagagaaaactcaggatcctattggtgtggtgctgaaacagtgaggggtaacatccacaagcacagtccctcgctacagatccatgtgcagcggatccctgtgtctggggtgctcctggagacccagccctcagggggccaggctgttgaaggggagatgctggtccttgtctgctccgtggctgaaggcacaggggataccacattctcctggcaccgagaggacatgcaggagagtctggggaggaaaactcagcgttccctgagagcagagctggagctccctgccatcagacagagccatgcagggggatactactgtacagcagacaacagctacggccctgtccagagcatggtgctgaatgtcactgtgagagagaccccaggcaacagagatggccttgtcgccgcgggagccactggagggctgctcagtgctcttctcctggctgtggccctgctgtttcactgctggcgtcggaggaagtcaggagttggtttcttgggagacgaaaccaggctccctcccgctccaggcccaggagagtcctcccattccatctgccctgcccaggtggagcttcagtcgttgtatgttgatgtacaccccaaaaagggagatttggtatactctgagatccagactactcagctgggagaagaagaggaagctaatacctccaggacacttctagaggataaggatgtctcagttgtctactctgaggtaaagacacaacacccagataactcagctggaaagatcagctctaaggatgaagaaagttaagagaatgaaaagttacgagaacgtcctactcatgtgatttctcccttgtccaaagtcccaggcccagtgcagtccttgcggcccctggaatgatcaactcattccagctttctaattcttctcatgcatatgcattcactcccaggaatactcattcgtctactctgatgttgggatggaatggcctctgaaagacttcactaaaatgaccaggatccacagttaagagaagaccctgtagtatttgctgtgggcctgacctaatgtattccctagggtctgctttagagaagggggataaagagagagaaggactgttatgaaaaacagaagcacaaattttggtgaattgggatttgcagagatgaaaaagactgggtgacctggatctctgcttaatacatctacaaccattgtctcactggagactcacttgcatcagtttgtttaactgtgagtggctgcacaggcactgtgcaaacaatgaaaagccccttcacttctgcctgcacagcttacactgtcaggattcagttgcagattaaagaacccatctggaatggtttacagagagaggaatttaaaagaggacatcagaagagctggagatgcaagctctaggctgcgcttccaaaagcaaatgataattatgttaatgtcattagtgacaaagatttgcaacattagagaaaagagacacaaatataaaattaaaaacttaagtaccaactctccaaaactaaatttgaacttaaaatattagtataaactcataataaactctgcctttaaaaaaagataaatatttcctacgtctgttcactgaaataattaccaaccccttagcaataagcactccttgcagagaggttttattctctaaataccattcccttctcaaaggaaataaggttgcttttcttgtaggaactgtgtctttgagttactaattagtttatatgagaataattcttgcaataaatgaagaaggaataaaagaaataggaagccacaaatttgtatggatatttcatgatacacctactggttaaataattgacaaaaaccagcagccaaatattagaggtctcctgatggaagtgtacaataccacctacaaattatccatgccccaagtgttaaaactgaatccattcaagtctttctaactgaatacttgttttatagaaaatgcatggagaaaaggaatttgtttaaataacattatgggattgcaaccagcaaaacataaactgagaaaaagttctatagggcaaatcacctggcttctataacaaataaatgggaaaaaaatgaaataaaaagaagagagggaggaagaaagggagagagaagaaaagaaaaatgaagaaaagtaattagaatattttcaacataaagaaaagacgaatatttaaggtgacagatatcccaactacgctgatttgatctttacaaattatatgagtgtatgaatttgtcacatgtatcacccccaaaaaaagagaaaaagaaaaatagaagacatataaattaaatgagacgagacatgtcgaccaaaaggaatgtgtgggtcttgtttggatcctgactcaaattaagaaaaaataaaactacctacgaaatactaagaaaaatttgtatactaatattaagaaattgttgtgtgttttggatataagtgatagtttattgtagtgatgtttttataaaagcaaaaggatattcactttcagcgcttatactgaagtattagattaaagcttattaacgta

SEQ ID NO: 133881 - DNA, 5390 bp, Homo sapiens
  Payload ID: 6156
  Gene Symbol: FCRL5
  Gene Name: Fc receptor-like 5
  Uniprot ID: Q96RD9
  ENST ID: ENST00000361835
  CDS Start-End: 159-3092
aattcactaatgcattctgctctttttgagagcacagcttctcagatgtgctccttggagctggtgtgcagtgtcctgactgtaagatcaagtccaaacctgttttggaattgaggaaacttctcttttgatctcagcccttggtggtccaggtcttcatgctgctgtgggtgatattactggtcctggctcctgtcagtggacagtttgcaaggacacccaggcccattattttcctccagcctccatggaccacagtcttccaaggagagagagtgaccctcacttgcaagggatttcgcttctactcaccacagaaaacaaaatggtaccatcggtaccttgggaaagaaatactaagagaaaccccagacaatatccttgaggttcaggaatctggagagtacagatgccaggcccagggctcccctctcagtagccctgtgcacttggatttttcttcagcttcgctgatcctgcaagctccactttctgtgtttgaaggagactctgtggttctgaggtgccgggcaaaggcggaagtaacactgaataatactatttacaagaatgataatgtcctggcattccttaataaaagaactgacttccatattcctcatgcatgtctcaaggacaatggtgcatatcgctgtactggatataaggaaagttgttgccctgtttcttccaatacagtcaaaatccaagtccaagagccatttacacgtccagtgctgagagccagctccttccagcccatcagcgggaacccagtgaccctgacctgtgagacccagctctctctagagaggtcagatgtcccgctccggttccgcttcttcagagatgaccagaccctgggattaggctggagtctctccccgaatttccagattactgccatgtggagtaaagattcagggttctactggtgtaaggcagcaacaatgccttacagcgtcatatctgacagcccgagatcctggatacaggtgcagatccctgcatctcatcctgtcctcactctcagccctgaaaaggctctgaattttgagggaaccaaggtgacacttcactgtgaaacccaggaagattctctgcgcactttgtacaggttttatcatgagggtgtccccctgaggcacaagtcagtccgctgtgaaaggggagcatccatcagcttctcactgactacagagaattcagggaactactactgcacagctgacaatggccttggcgccaagcccagtaaggctgtgagcctctcagtcactgttcccgtgtctcatcctgtcctcaacctcagctctcctgaggacctgatttttgagggagccaaggtgacacttcactgtgaagcccagagaggttcactccccatcctgtaccagtttcatcatgagggtgctgccctggagcgtaggtcggccaactctgcaggaggagtggccatcagcttctctctgactgcagagcattcagggaactactactgcacagctgacaatggctttggcccccagcgcagtaaggcggtgagcctctccgtcactgtccctgtgtctcatcctgtcctcaccctcagctctgctgaggccctgacttttgaaggagccactgtgacacttcactgtgaagtccagagaggttccccacaaatcctataccagttttatcatgaggacatgcccctgtggagcagctcaacaccctctgtgggaagagtgtccttcagcttctctctgactgaaggacattcagggaattactactgcacagctgacaatggctttggtccccagcgcagtgaagtggtgagcctttttgtcactgttccagtgtctcgccccatcctcaccctcagggttcccagggcccaggctgtggtgggggacctgctggagcttcactgtgaggccccgagaggctctcccccaatcctgtactggttttatcatgaggatgtcaccctggggagcagctcagccccctctggaggagaagcttctttcaacctctctctgactgcagaacattctggaaactactcatgtgaggccaacaatggcctagtggcccagcacagtgacacaatatcactcagtgttatagttccagtatctcgtcccatcctcaccttcagggctcccagggcccaggctgtggtgggggacctgctggagcttcactgtgaggccctgagaggctcctccccaatcctgtactggttttatcatgaagatgtcaccctgggtaagatctcagccccctctggaggaggggcctccttcaacctctctctgactacagaacattctggaatctactcctgtgaggcagacaatggtctggaggcccagcgcagtgagatggtgacactgaaagttgcagttccggtgtctcgcccggtcctcaccctcagggctcccgggacccatgctgcggtgggggacctgctggagcttcactgtgaggccctgagaggctctcccctgatcctgtaccggttttttcatgaggatgtcaccctaggaaataggtcgtccccctctggaggagcgtccttaaacctctctctgactgcagagcactctggaaactactcctgtgaggccgacaatggcctcggggcccagcgcagtgagacagtgacactttatatcacagggctgaccgcgaacagaagtggcccttttgccacaggagtcgccgggggcctgctcagcatagcaggccttgctgcgggggcactgctgctctactgctggctctcgagaaaagcagggagaaagcctgcctctgaccccgccaggagcccttcagactcggactcccaagagcccacctatcacaatgtaccagcctgggaagagctgcaaccagtgtacactaatgcaaatcctagaggagaaaatgtggtttactcagaagtacggatcatccaagagaaaaagaaacatgcagtggcctctgaccccaggcatctcaggaacaagggttcccctatcatctactctgaagttaaggtggcgtcaaccccggtttccggatccctgttcttggcttcctcagctcctcacagatgagtccacacgtctctccaactgctgtttcagcctctgcaccccaaagttccccttgggggagaagcagcattgaagtgggaagatttaggctgccccagaccatatctactggcctttgtttcacatgtcctcattctcagtctgaccagaatgcagggccctgctggactgtcacctgtttcccagttaaagccctgactggcaggttttttaatccagtggcaaggtgctcccactccagggcccagcacatctcctggattccttagtgggcttcagctgtggttgctgttctgagtactgctctcatcacacccccacagagggggtcttaccacacaaagggagagtgggccttcaggagatgccgggctggcctaacagctcaggtgctcctaaactccgacacagagttcctgctttgggtggatgcatttctcaattgtcatcagcctggtggggctactgcagtgtgctgccaaatgggacagcacacagcctgtgcacatgggacatgtgatgggtctccccacgggggctgcatttcacactcctccacctgtctcaaactctaaggtcggcacttgacaccaaggtaacttctctcctgctcatgtgtcagtgtctacctgcccaagtaagtggctttcatacaccaagtcccaagttcttcccatcctaacagaagtaacccagcaagtcaaggccaggaggaccaggggtgcagacagaacacatactggaacacaggaggtgctcaattactatttgactgactgactgaatgaatgaatgaatgaggaagaaaactgtgggtaatcaaactggcataaaatccagtgcactccctaggaaatccgggaggtattctggcttccctaagaaacaatggaagagaaggagcttggatgaggaaactgttcagcaagaggaagggcttctcacactttcatgtgcttgtggatcacctgaggatcctgtgaaaatacagatactgattcagtgggtctgcgtagagcctgagactgccattctaacatgttcccaggggatgctgatgctgctggccctgggactgcactgcatgcatgtgaagccctataggtctcagcagaggcccatggagagggaatgtgtggctctggctgcccagggcccaactcggttcacacggatcgtgctgctccctggccagcctttggccacagcaccaccagctgctgttgctgagagagcttcttctctgtgacatgttggctttcatcagccaccctgggaagcggaaagtagctgccactatctttgtttccccacctcaggcctcacactttcccatgaaaagggtgaatgtatataacctgagccctctccattcagagttgttctcccatctctgagcaatgggatgttctgttccgcttttatgatatccatcacatcttatcttgatctttgctcccagtggattgtacagtgatgacttttaagccccacggccctgaaataaaatccttccaagggcattggaagctcactccacctgaaccatggcttttcatgcttccaagtgtcagggccttgcccagatagacagggctggctctgctgccccaacctttcaaggaggaaaccagacacctgagacaggagcctgtatgcagcccagtgcagccttgcagaggacaaggctggaggcatttgtcatcactacagatatgcaactaaaatagacgtggagcaagagaaatgcattcccaccgaggccgcttttttaggcctagttgaaagtcaagaaggacagcagcaagcataggctcaggattaaagaaaaaaatctgctcacagtctgttctggaggtcacatcaccaacaaagctcacgccctatgcagttctgagaaggtggaggcaccaggctcaaaagaggaaatttagaatttctcattgggagagtaaggtacccccatcccagaatgataactgcacagtggcagaacaaactccaccctaatgtgggtggaccccgtccagtctgttgaaggcctgaatgtaacaaaagggcttattcttcctcaagtaagggggaactcctgctttgggctgggacataagtttttctgctttcagacgcaaactgaaaaatggctcttcttgggtcttgagcttgctggcatatggactgaaagaaactatgctattggatctcctggatctccagcttgctgactgcagatcttgagatatgtcagcctctacagtcacaagagctaattcattctaataaaccaatctttctgta

SEQ ID NO: 133882 - DNA, 4424 bp, Homo sapiens
  Payload ID: 6156
  Gene Symbol: FCRL5
  Gene Name: Fc receptor-like 5
  Uniprot ID: Q96RD9
  ENST ID: ENST00000368189
  CDS Start-End: 94-1872
gtgcagtgtcctgactgtaagatcaagtccaaacctgttttggaattgaggaaacttctcttttgatctcagcccttggtggtccaggtcttcatgctgctgtgggtgatattactggtcctggctcctgtcagtggacagtttgcaaggacacccaggcccattattttcctccagcctccatggaccacagtcttccaaggagagagagtgaccctcacttgcaagggatttcgcttctactcaccacagaaaacaaaatggtaccatcggtaccttgggaaagaaatactaagagaaaccccagacaatatccttgaggttcaggaatctggagagtacagatgccaggcccagggctcccctctcagtagccctgtgcacttggatttttcttcagcttcgctgatcctgcaagctccactttctgtgtttgaaggagactctgtggttctgaggtgccgggcaaaggcggaagtaacactgaataatactatttacaagaatgataatgtcctggcattccttaataaaagaactgacttccatattcctcatgcatgtctcaaggacaatggtgcatatcgctgtactggatataaggaaagttgttgccctgtttcttccaatacagtcaaaatccaagtccaagagccatttacacgtccagtgctgagagccagctccttccagcccatcagcgggaacccagtgaccctgacctgtgagacccagctctctctagagaggtcagatgtcccgctccggttccgcttcttcagagatgaccagaccctgggattaggctggagtctctccccgaatttccagattactgccatgtggagtaaagattcagggttctactggtgtaaggcagcaacaatgccttacagcgtcatatctgacagcccgagatcctggatacaggtgcagatccctgcatctcatcctgtcctcactctcagccctgaaaaggctctgaattttgagggaaccaaggtgacacttcactgtgaaacccaggaagattctctgcgcactttgtacaggttttatcatgagggtgtccccctgaggcacaagtcagtccgctgtgaaaggggagcatccatcagcttctcactgactacagagaattcagggaactactactgcacagctgacaatggccttggcgccaagcccagtaaggctgtgagcctctcagtcactgttcccgtgtctcatcctgtcctcaacctcagctctcctgaggacctgatttttgagggagccaaggtgacacttcactgtgaagcccagagaggttcactccccatcctgtaccagtttcatcatgagggtgctgccctggagcgtaggtcggccaactctgcaggaggagtggccatcagcttctctctgactgcagagcattcagggaactactactgcacagctgacaatggctttggcccccagcgcagtaaggcggtgagcctctccgtcactgtccctgtgtctcatcctgtcctcaccctcagctctgctgaggccctgacttttgaaggagccactgtgacacttcactgtgaagtccagagaggttccccacaaatcctataccagttttatcatgaggacatgcccctgtggagcagctcaacaccctctgtgggaagagtgtccttcagcttctctctgactgaaggacattcagggaattactactgcacagctgacaatggctttggtccccagcgcagtgaagtggtgagcctttttgtcactggtaagtgctgggttcttgccagtcacccacccctggctgagttctctctcacccattcctttaaaaatctgtttgcactgtccagtttcctcccctaatcaacttaatccccttcttggcttcctcctcaactaactagctggggttttccgtactcataagtcctggctcagccagacccctaaaacagctcagtagattccccagcttttaccaaatgaatttatttattgtattttctcctcattccttgtatgttccaacagtacgccaatttttcttgatgcacggagcgtgtcctacttctctactgacatttacatattaacttagctacaagcacagtcttatagataaatattggtcaagaccttaaattctccaaaggatttccaatcttatggtagatttggagaaagctgctggtgaacaaagggggaaatggctccctaggaaccaactcctcaaacttctggagtttttatgatcccttgttttctaacctgctaaaatcagtatcattttattgtattattttaaaaaaactattgttgaagtatgacatacattcaagaaacgtgtgcaaattgtatgtgtacgatttggtgtctttttaggagctaagttgcttctgtttttacttgaatctttgtttatagaaactgggggaaagtttactttcttttcagagaagccaaatggtatgatagaaaaatcttgagcctgatgtgtcagacatgcccctagcataacttgttgagtaaagaggttatttttaaaatgtgaatgttctgagactactccaaagtcagagccaaatctactaggaagcttctagacttcactcattctgcatcccattactatctttttatccatgttttactttcttctcatattcagcagcatcttaagcctctttattttctgtttcttgactgtcacccttaatgccagtagaatgtaagcttcatgagaacagaactgcatccatcttggtcttcacaacatccctgtgcctactcagtgtttggcacacagtaggtcctcagtcaacatttgtaatttagtggacagatgatatgacaagatgataagaggggatttaaaaaaatcatctagcaaagcccaagaggaaaaaaaacaaagctattttagaaatgaaataccaatttgaagcagtaagaatagattggatatctttgaaaaccattaattgaatgaagaaccaatttgagaaaacaatacagaatgcaaagtagaaagatacagaaataaaggcaaaaattataatatggaaatcagacaatggatttgtctgtatccagttatgtggataattaaaatggagaccctcagaaaattgaaccgaagagtaaaatgaaactcaaaaatgtagtagaaattgttgggaagtaaagaaaacttgaatatgtagatcagaacatatatgttgatgacgttattgactttgaggttaaaaatatatatatgtgcctatgattatggggaaaaaagcagtcgtctcagaaagaaaaacatcaagttagtcttagactttgcagtgcactcaataccaaagagagaggaggtccagacttggacctgcgagggaagaataataaccgaaaattttatatcaattcaaaaagacattgtcaaaaatacagggattcaggaaactgagaatgcactaagccttctggaaaaaacacctaatgacaaaatctagcccaacaagatgtaaatgaatataaaggactcataatgaggaaaccgcattatgactggctctcaaccctggctgcatattagactcgtcaaagacctttgtaaaaggtcacacattgactcgtcaaagcccctctccagactaattcaattcagaatctcacagatggggccacagaatcagtattttttgacacaacctcaagtgagaatattgtgtagacaagattggaaaccactgatttagatatagaaacaaaggctaatcaactgtgagaattatggtcacagaatagaaagtaactattatgaacactgaaaatgtaaaaaaaatgtaacaaagaaaaatagttagaggaaggagaggaagtaaaggaacaatcattttctcatgattattattatttcagagtaaattgtgagttatttcacaattcaaaaagaatggactgttttaaaaaattagtaatagatttcaaaatgtccattttgtaaatcgtttctgaatactttgtcaacagttactcatcattaatggcttatacttcactaaaattccatggaaaaccaactagtagcctgtagagtcacataggagagaacaagtgaattctttgggtggcgcaagcatagatgttaggactgacaaaaaaaaaataataaaaataaacctgtgcattgatatgatcacaaatgatcagggaaagaggaaacagaaactctcatacgccattattacaagcgtaaattggttcaaccttttcgtcttaattgacacattgtaattgtatatatttatggaagcacagtttgatattttgatatacatacatggtatataacgatcaaattaggatatttaatgtacccatcatctcatgcatttatcatttctttggaataaaaacattcaaaagcc

SEQ ID NO: 133883 - DNA, 2800 bp, Homo sapiens
  Payload ID: 6156
  Gene Symbol: FCRL5
  Gene Name: Fc receptor-like 5
  Uniprot ID: Q96RD9
  ENST ID: ENST00000368190
  CDS Start-End: 94-2373
gtgcagtgtcctgactgtaagatcaagtccaaacctgttttggaattgaggaaacttctcttttgatctcagcccttggtggtccaggtcttcatgctgctgtgggtgatattactggtcctggctcctgtcagtggacagtttgcaaggacacccaggcccattattttcctccagcctccatggaccacagtcttccaaggagagagagtgaccctcacttgcaagggatttcgcttctactcaccacagaaaacaaaatggtaccatcggtaccttgggaaagaaatactaagagaaaccccagacaatatccttgaggttcaggaatctggagagtacagatgccaggcccagggctcccctctcagtagccctgtgcacttggatttttcttcagcttcgctgatcctgcaagctccactttctgtgtttgaaggagactctgtggttctgaggtgccgggcaaaggcggaagtaacactgaataatactatttacaagaatgataatgtcctggcattccttaataaaagaactgacttccatattcctcatgcatgtctcaaggacaatggtgcatatcgctgtactggatataaggaaagttgttgccctgtttcttccaatacagtcaaaatccaagtccaagagccatttacacgtccagtgctgagagccagctccttccagcccatcagcgggaacccagtgaccctgacctgtgagacccagctctctctagagaggtcagatgtcccgctccggttccgcttcttcagagatgaccagaccctgggattaggctggagtctctccccgaatttccagattactgccatgtggagtaaagattcagggttctactggtgtaaggcagcaacaatgccttacagcgtcatatctgacagcccgagatcctggatacaggtgcagatccctgcatctcatcctgtcctcactctcagccctgaaaaggctctgaattttgagggaaccaaggtgacacttcactgtgaaacccaggaagattctctgcgcactttgtacaggttttatcatgagggtgtccccctgaggcacaagtcagtccgctgtgaaaggggagcatccatcagcttctcactgactacagagaattcagggaactactactgcacagctgacaatggccttggcgccaagcccagtaaggctgtgagcctctcagtcactgttcccgtgtctcatcctgtcctcaacctcagctctcctgaggacctgatttttgagggagccaaggtgacacttcactgtgaagcccagagaggttcactccccatcctgtaccagtttcatcatgagggtgctgccctggagcgtaggtcggccaactctgcaggaggagtggccatcagcttctctctgactgcagagcattcagggaactactactgcacagctgacaatggctttggcccccagcgcagtaaggcggtgagcctctccgtcactgtccctgtgtctcatcctgtcctcaccctcagctctgctgaggccctgacttttgaaggagccactgtgacacttcactgtgaagtccagagaggttccccacaaatcctataccagttttatcatgaggacatgcccctgtggagcagctcaacaccctctgtgggaagagtgtccttcagcttctctctgactgaaggacattcagggaattactactgcacagctgacaatggctttggtccccagcgcagtgaagtggtgagcctttttgtcactgttccagtgtctcgccccatcctcaccctcagggttcccagggcccaggctgtggtgggggacctgctggagcttcactgtgaggccccgagaggctctcccccaatcctgtactggttttatcatgaggatgtcaccctggggagcagctcagccccctctggaggagaagcttctttcaacctctctctgactgcagaacattctggaaactactcatgtgaggccaacaatggcctagtggcccagcacagtgacacaatatcactcagtgttatagttccagtatctcgtcccatcctcaccttcagggctcccagggcccaggctgtggtgggggacctgctggagcttcactgtgaggccctgagaggctcctccccaatcctgtactggttttatcatgaagatgtcaccctgggtaagatctcagccccctctggaggaggggcctccttcaacctctctctgactacagaacattctggaatctactcctgtgaggcagacaatggtctggaggcccagcgcagtgagatggtgacactgaaagttgcaggtgagtgggccctgcccaccagcagcacatctgagaactgactgtgcctgttctccctgcagctgaaaatggagccacagagctcctcagggctgtttgcttgtgtggcatcccagcacacttcctgcctgcagaacctccctgtgaaagtctcggatcctttgtggtatggttccaggaatctgatgtttcccagcagtcttcttgaagatgatcaaagcacctcactaaaaatgcaaataagacttttttagaacataaactatattctgaactgaaattattacatgaaaatgaaaccaaagaattctgagcatatgtttctctgccgtagaaaggattaagctgtttcttgtccggattcttctctcattgacttctaacaagcctctactcttgagtctctttcattactggggatgtaaatgttccttacatttccacattaaaaatcctatgttaacataa

SEQ ID NO: 133884 - DNA, 1997 bp, Homo sapiens
  Payload ID: 6157
  Gene Symbol: FCRL6
  Gene Name: Fc receptor-like 6
  Uniprot ID: Q6DN72
  ENST ID: ENST00000321935
  CDS Start-End: 87-1328
acacacccacaggacctgcagctgaacgaagttgaagacaactcaggagatctgttggaaagagaacgatagaggaaaatatatgaatgttgccatctttaggccccatgctgctctggacggctgtgctgctctttgttccctgtgttgggaaaactgtctggctgtacctccaagcctggccaaaccctgtgtttgaaggagatgccctgactctgcgatgtcagggatggaagaatacaccactgtctcaggtgaagttctacagagatggaaaattccttcatttctctaaggaaaaccagactctgtccatgggagcagcaacagtgcagagccgtggccagtacagctgctctgggcaggtgatgtatattccacagacattcacacaaacttcagagactgccatggttcaagtccaagagctgtttccacctcctgtgctgagtgccatcccctctcctgagccccgagagggtagcctggtgaccctgagatgtcagacaaagctgcaccccctgaggtcagccttgaggctccttttctccttccacaaggacggccacaccttgcaggacaggggccctcacccagaactctgcatcccgggagccaaggagggagactctgggctttactggtgtgaggtggcccctgagggtggccaggtccagaagcagagcccccagctggaggtcagagtgcaggctcctgtatcccgtcctgtgctcactctgcaccacgggcctgctgaccctgctgtgggggacatggtgcagctcctctgtgaggcacagaggggctcccctccgatcctgtattccttctaccttgatgagaagattgtggggaaccactcagctccctgtggtggaaccacctccctcctcttcccagtgaagtcagaacaggatgctgggaactactcctgcgaggctgagaacagtgtctccagagagaggagtgagcccaagaagctgtctctgaagggttctcaagtcttgttcactcccgccagcaactggctggttccttggcttcctgcgagcctgcttggcctgatggttattgctgctgcacttctggtttatgtgagatcctggagaaaagctgggccccttccatcccagataccacccacagctccaggtggagagcagtgcccactatatgccaacgtgcatcaccagaaagggaaagatgaaggtgttgtctactctgtggtgcatagaacctcaaagaggagtgaagccaggtctgctgagttcaccgtggggagaaagttctatcatctgtgcggaggtgagatgcctgcagcccagtgaggtttcatccacggaggtgaatatgagaagcaggactctccaagaaccccttagcgactgtgaggaggttctctgctagtgatggtgttctcctatcaacacacgcccacccccagtctccagtgctcctcaggaagacagtggggtcctcaactctttctgtgggtccttcagttcccaagcccagcatcacagagccccctgagcccttgtcctggtcaggagcacctgaaccctgggttcttttcttagcagaagaccaaccaatggaatgggaagggagatgctcccaccaacacacacacttaggttcaatcagtgacactggacacataagccacagatgtcttctttccatacaagcatgttagttcgccccaatatacatatatatatgaaatagtcatgtgccgcataacaacatttcagtcagtgatagactgcatacacaacagtggtcccataagactgtaatggagtttaaaaattcctactgcctagtgatatcatagttgccttaacatcataacacaacacatttctcacgcgtttgtggtgatgctggtacaaacaagctacagcgccgctagtcatatacaaatatagcacatacaattatgtacagtacactatacttgataatgataataaacaactatgttactggtt

SEQ ID NO: 133885 - DNA, 1422 bp, Homo sapiens
  Payload ID: 6157
  Gene Symbol: FCRL6
  Gene Name: Fc receptor-like 6
  Uniprot ID: Q6DN72
  ENST ID: ENST00000339348
  CDS Start-End: 9-1202
caggccccatgctgctctggacggctgtgctgctctttgttccctgtgttgggaaaactgtctggctgtacctccaagcctggccaaaccctgtgtttgaaggagatgccctgactctgcgatgtcagggatggaagaatacaccactgtctcaggtgaagttctacagagatggaaaattccttcatttctctaaggaaaaccagactctgtccatgggagcagcaacagtgcagagccgtggccagtacagctgctctgggcaggtgatgtatattccacagacattcacacaaacttcagagactgccatggttcaagtccaagagctgtttccacctcctgtgctgagtgccatcccctctcctgagccccgagagggtagcctggtgaccctgagatgtcagacaaagctgcaccccctgaggtcagccttgaggctccttttctccttccacaaggacggccacaccttgcaggacaggggccctcacccagaactctgcatcccgggagccaaggagggagactctgggctttactggtgtgaggtggcccctgagggtggccaggtccagaagcagagcccccagctggaggtcagagtgcaggctcctgtatcccgtcctgtgctcactctgcaccacgggcctgctgaccctgctgtgggggacatggtgcagctcctctgtgaggcacagaggggctcccctccgatcctgtattccttctaccttgatgagaagattgtggggaaccactcagctccctgtggtggaaccacctccctcctcttcccagtgaagtcagaacaggatgctgggaactactcctgcgaggctgagaacagtgtctccagagagaggagtgagcccaagaagctgtctctgaagggttctcaagtcttgttcactcccgccagcaactggctggttccttggcttcctgcgagcctgcttggcctgatggttattgctgctgcacttctggtttatgtgagatcctggagaaaagctgggccccttccatcccagataccacccacagctccaggtggagagcagtgcccactatatgccaacgtgcatcaccagaaagggaaagatgaaggtgttgtctactctgtggtgcatagaacctcaaagaggagtgaaggacagttctatcatctgtgcggaggtgagatgcctgcagcccagtgaggtttcatccacggaggtgaatatgagaagcaggactctccaagaaccccttagcgactgtgaggaggttctctgctagtgatggtgttctcctatcaacacacgcccacccccagtctccagtgctcctcaggaagacagtggggtcctcaactctttctgtgggtccttcagttcccaagcccagcatcacagagccccctgagcccttgtcctggtc

SEQ ID NO: 133886 - DNA, 1306 bp, Homo sapiens
  Payload ID: 6157
  Gene Symbol: FCRL6
  Gene Name: Fc receptor-like 6
  Uniprot ID: Q6DN72
  ENST ID: ENST00000368106
  CDS Start-End: 2-1306
catgctgctctggacggctgtgctgctctttgttccctgtgttgggaaaactgtctggctgtacctccaagcctggccaaaccctgtgtttgaaggagatgccctgactctgcgatgtcagggatggaagaatacaccactgtctcaggtgaagttctacagagatggaaaattccttcatttctctaaggaaaaccagactctgtccatgggagcagcaacagtgcagagccgtggccagtacagctgctctgggcaggtgatgtatattccacagacattcacacaaacttcagagactgccatggttcaagtccaagagctgtttccacctcctgtgctgagtgccatcccctctcctgagccccgagagggtagcctggtgaccctgagatgtcagacaaagctgcaccccctgaggtcagccttgaggctccttttctccttccacaaggacggccacaccttgcaggacaggggccctcacccagaactctgcatcccgggagccaaggagggagactctgggctttactggtgtgaggtggcccctgagggtggccaggtccagaagcagagcccccagctggaggtcagagtgcaggctcctgtatcccgtcctgtgctcactctgcaccacgggcctgctgaccctgctgtgggggacatggtgcagctcctctgtgaggcacagaggggctcccctccgatcctgtattccttctaccttgatgagaagattgtggggaaccactcagctccctgtggtggaaccacctccctcctcttcccagtgaagtcagaacaggatgctgggaactactcctgcgaggctgagaacagtgtctccagagagaggagtgagcccaagaagctgtctctgaagggttctcaagtcttgttcactcccgccagcaactggctggttccttggcttcctgcgagcctgcttggcctgatggttattgctgctgcacttctggtttatgtgagatcctggagaaaagctgggccccttccatcccagataccacccacagctccaggtggagagcagtgcccactatatgccaacgtgcatcaccagaaagggaaagatgaaggtgttgtctactctgtggtgcatagaacctcaaagaggagtgaagccaggtctgctgagttcaccgtggggagaaaggacagttctatcatctgtgcggaggtgagatgcctgcagcccagtgaggtttcatccacggaggtgaatatgagaagcaggactctccaagaaccccttagcgactgtgaggaggttctctgctag

SEQ ID NO: 133887 - DNA, 947 bp, Homo sapiens
  Payload ID: 6157
  Gene Symbol: FCRL6
  Gene Name: Fc receptor-like 6
  Uniprot ID: Q6DN72
  ENST ID: ENST00000392235
  CDS Start-End: 2-937
catgctgctctggacggctgtgctgctctttgttccctgtgttgggaaaactgtctggctgtacctccaagcctggccaaaccctgtgtttgaaggagatgccctgactctgcgatgtcagggatggaagaatacaccactgtctcaggtgaagttctacagagatggaaaattccttcatttctctaaggaaaaccagactctgtccatgggagcagcaacagtgcagagccgtggccagtacagctgctctgggcaggtgatgtatattccacagacattcacacaaacttcagagactgccatggttcaagtccaagctcctgtatcccgtcctgtgctcactctgcaccacgggcctgctgaccctgctgtgggggacatggtgcagctcctctgtgaggcacagaggggctcccctccgatcctgtattccttctaccttgatgagaagattgtggggaaccactcagctccctgtggtggaaccacctccctcctcttcccagtgaagtcagaacaggatgctgggaactactcctgcgaggctgagaacagtgtctccagagagaggagtgagcccaagaagctgtctctgaagggttctcaagtcttgttcactcccgccagcaactggctggttccttggcttcctgcgagcctgcttggcctgatggttattgctgctgcacttctggtttatgtgagatcctggagaaaagctgggccccttccatcccagataccacccacagctccaggtggagagcagtgcccactatatgccaacgtgcatcaccagaaagggaaagatgaaggtgttgtctactctgtggtgcatagaacctcaaagaggagtgaagccaggtctgctgagttcaccgtggggagaaagttctatcatctgtgcggaggtgagatgcctgcagcccagtgaggtttcatcc

SEQ ID NO: 133888 - DNA, 560 bp, Homo sapiens
  Payload ID: 6157
  Gene Symbol: FCRL6
  Gene Name: Fc receptor-like 6
  ENST ID: ENST00000536257
  CDS Start-End: 87-560
acacacccacaggacctgcagctgaacgaagttgaagacaactcaggagatctgttggaaagagaacgatagaggaaaatatatgaatgttgccatctttagttccctgtgttgggaaaactgtctggctgtacctccaagcctggccaaaccctgtgtttgaaggagatgccctgactctgcgatgtcagggatggaagaatacaccactgtctcaggtgaagttctacagagatggaaaattccttcatttctctaaggaaaaccagactctgtccatgggagcagcaacagtgcagagccgtggccagtacagctgctctgggcaggtgatgtatattccacagacattcacacaaacttcagagactgccatggttcaagtccaagagctgtttccacctcctgtgctgagtgccatcccctctcctgagccccgagagggtagcctggtgaccctgagatgtcagacaaagctgcaccccctgagggtggccaggtccagaagcagagcccccagctggaggtcagagtgcaggctcctgtatcccgtcctgtgc

SEQ ID NO: 133889 - DNA, 2341 bp, Homo sapiens
  Payload ID: 6158
  Gene Symbol: FCRLA
  Gene Name: Fc receptor-like A
  Uniprot ID: Q7L513
  ENST ID: ENST00000236938
  CDS Start-End: 243-1373
ggccagctggctatcagacaatgacatgctttgacaggcccctgagctctgtgagtaaattcttgaacagctgagagtgctaccattttgtcatagccctaagggtgcagatgatgctgaaagcgtgttggccaaatctgaatgatgaaagccaattacaaactagaaaatgaaaacagaccccagatgcaaggagatgagacagttaaatttacttcctcttttctaatctgagaggtttcatgttgaagaaaatcagtgttggggttgcaggagacctaaacacagtcaccatgaagctgggctgtgtcctcatggcctgggccctctacctttcccttggtgtgctctgggtggcccagatgctactggctgccagttttgagacgctgcagtgtgagggacctgtctgcactgaggagagcagctgccacacggaggatgacttgactgatgcaagggaagctggcttccaggtcaaggcctacactttcagtgaacccttccacctgattgtgtcctatgactggctgatcctccaaggtccagccaagccagtttttgaaggggacctgctggttctgcgctgccaggcctggcaagactggccactgactcaggtgaccttctaccgagatggctcagctctgggtccccccgggcctaacagggaattctccatcaccgtggtacaaaaggcagacagcgggcactaccactgcagtggcatcttccagagccctggtcctgggatcccagaaacagcatctgttgtggctatcacagtccaagaactgtttccagcgccaattctcagagctgtaccctcagctgaaccccaagcaggaagccccatgaccctgagttgtcagacaaagttgcccctgcagaggtcagctgcccgcctcctcttctccttctacaaggatggaaggatagtgcaaagcagggggctctcctcagaattccagatccccacagcttcagaagatcactccgggtcatactggtgtgaggcagccactgaggacaaccaagtttggaaacagagcccccagctagagatcagagtgcagggtgcttccagctctgctgcacctcccacattgaatccagctcctcagaaatcagctgctccaggaactgctcctgaggaggcccctgggcctctgcctccgccgccaaccccatcttctgaggatccaggcttttcttctcctctggggatgccagatcctcatctgtatcaccagatgggccttcttctcaaacacatgcaggatgtgagagtcctcctcggtcacctgctcatggagttgagggaattatctggccaccggaagcctgggaccacaaaggctactgctgaatagaagtaaacagttcatccatgatctcacttaaccaccccaataaatctgattctttattttctcttcctgtcctgcacatatgcataagtacttttacaagttgtcccagtgttttgttagaataatgtagttaggtgagtgtaaataaatttatataaagtgagaattagagtttagctataattgtgtattctctcttaacacaacagaattctgctgtctagatcaggaatttctatctgttatatcgaccagaatgttgtgatttaaagagaactaatggaagtggattgaatacagcagtctcaactgggggcaattttgccccccagaggacattgggcaatgtttggagacattttggtcattatacttggggggttgggggatggtgggatgtgtgtgctactggcatccagtaaatagaagccaggggtgccgctaaacatcctataatgcacagggcagtaccccacaacgaaaaataatctggcccaaaatgtcagttgtactgagtttgagaaaccccagcctaatgaaaccctaggtgttgggctctggaatgggactttgtcccttctaattattatctctttccagcctcattcagctattcttactgacataccagtctttagctggtgctatggtctgttctttagttctagtttgtatcccctcaaaagccattatgttgaaatcctaatccccaaggtgatggcattaagaagtgggcctttgggaagtgattagatcaggagtgcagagccctcatgattaggattagtgcccttatttaaaaaggccccagagagctaactcacccttccaccatatgaggacgtggcaagaagatgacatgtatgagaaccaaaaaacagctgtcgccaaacaccgactctgtcgttgccttgatcttgaacttccagcctccagaactatgagaaataaaattctgttgtttgtaa

SEQ ID NO: 133890 - DNA, 766 bp, Homo sapiens
  Payload ID: 6158
  Gene Symbol: FCRLA
  Gene Name: Fc receptor-like A
  Uniprot ID: Q7L513
  ENST ID: ENST00000294796
  CDS Start-End: 1-678
atgaagctgggctgtgtcctcatggcctgggccctctacctttcccttggtgtgctctgggtggcccagatgctactggcagctggatgtcatgccgaactgtttccagcgccaattctcagagctgtaccctcagctgaaccccaagcaggaagccccatgaccctgagttgtcagacaaagttgcccctgcagaggtcagctgcccgcctcctcttctccttctacaaggatggaaggatagtgcaaagcagggggctctcctcagaattccagatccccacagcttcagaagatcactccgggtcatactggtgtgaggcagccactgaggacaaccaagtttggaaacagagcccccagctagagatcagagtgcagggtgcttccagctctgctgcacctcccacattgaatccagctcctcagaaatcagctgctccaggaactgctcctgaggaggcccctgggcctctgcctccgccgccaaccccatcttctgaggatccaggcttttcttctcctctggggatgccagatcctcatctgtatcaccagatgggccttcttctcaaacacatgcaggatgtgagagtcctcctcggtcacctgctcatggagttgagggaattatctggccaccggaagcctgggaccacaaaggctactgctgaatagaagtaaacagttcatccatgatctcacttaaccaccccaataaatctgattctttattttctcttcctgtcctgcacatatgcataag

SEQ ID NO: 133891 - DNA, 888 bp, Homo sapiens
  Payload ID: 6158
  Gene Symbol: FCRLA
  Gene Name: Fc receptor-like A
  Uniprot ID: Q7L513
  ENST ID: ENST00000349527
  CDS Start-End: 22-816
ggagacctaaacacagtcaccatgaagctgggctgtgtcctcatggcctgggccctctacctttcccttggtgtgctctgggtggcccagatgctactggctgccagttttgagacgctgcagtgtgagggacctgtctgcactgaggagagcagctgccacacggaggatgacttgactgatgcaagggaagctggcttccaggtcaaggcctacactttcagtgaacccttccacctgattgtgtcctatgactggctgatcctccaaggtccagccaagccagtttttgaaggggacctgctggttctgcgctgccaggcctggcaagactggccactgactcaggtgaccttctaccgagatggctcagctctgggtccccccgggcctaacagggaattctccatcaccgtggtacaaaaggcagacagcgggcactaccactgcagtggcatcttccagagccctggtcctgggatcccagaaacagcatctgttgtggctatcacagtccaaggtgcttccagctctgctgcacctcccacattgaatccagctcctcagaaatcagctgctccaggaactgctcctgaggaggcccctgggcctctgcctccgccgccaaccccatcttctgaggatccaggcttttcttctcctctggggatgccagatcctcatctgtatcaccagatgggccttcttctcaaacacatgcaggatgtgagagtcctcctcggtcacctgctcatggagttgagggaattatctggccaccggaagcctgggaccacaaaggctactgctgaatagaagtaaacagttcatccatgatctcacttaaccaccccaataaatctgattctttattttctcttcctgtcc

SEQ ID NO: 133892 - DNA, 901 bp, Homo sapiens
  Payload ID: 6158
  Gene Symbol: FCRLA
  Gene Name: Fc receptor-like A
  Uniprot ID: Q7L513
  ENST ID: ENST00000309691
  CDS Start-End: 1-813
atgaagctgggctgtgtcctcatggcctgggccctctacctttcccttggtgtgctctgggtggcccagatgctactggctgccagttttgagacgctgcagtgtgagggacctgtctgcactgaggagagcagctgccacacggaggatgacttgactgatgcaagggaagctggcttccaggtcaaggcctacactttcagtgaacccttccacctgattgtgtcctatgaactgtttccagcgccaattctcagagctgtaccctcagctgaaccccaagcaggaagccccatgaccctgagttgtcagacaaagttgcccctgcagaggtcagctgcccgcctcctcttctccttctacaaggatggaaggatagtgcaaagcagggggctctcctcagaattccagatccccacagcttcagaagatcactccgggtcatactggtgtgaggcagccactgaggacaaccaagtttggaaacagagcccccagctagagatcagagtgcagggtgcttccagctctgctgcacctcccacattgaatccagctcctcagaaatcagctgctccaggaactgctcctgaggaggcccctgggcctctgcctccgccgccaaccccatcttctgaggatccaggcttttcttctcctctggggatgccagatcctcatctgtatcaccagatgggccttcttctcaaacacatgcaggatgtgagagtcctcctcggtcacctgctcatggagttgagggaattatctggccaccggaagcctgggaccacaaaggctactgctgaatagaagtaaacagttcatccatgatctcacttaaccaccccaataaatctgattctttattttctcttcctgtcctgcacatatgcataag

SEQ ID NO: 133893 - DNA, 1639 bp, Homo sapiens
  Payload ID: 6158
  Gene Symbol: FCRLA
  Gene Name: Fc receptor-like A
  Uniprot ID: Q7L513
  ENST ID: ENST00000350710
  CDS Start-End: 243-668
ggccagctggctatcagacaatgacatgctttgacaggcccctgagctctgtgagtaaattcttgaacagctgagagtgctaccattttgtcatagccctaagggtgcagatgatgctgaaagcgtgttggccaaatctgaatgatgaaagccaattacaaactagaaaatgaaaacagaccccagatgcaaggagatgagacagttaaatttacttcctcttttctaatctgagaggtttcatgttgaagaaaatcagtgttggggttgcaggagacctaaacacagtcaccatgaagctgggctgtgtcctcatggcctgggccctctacctttcccttggtgtgctctgggtggcccagatgctactgggtgcttccagctctgctgcacctcccacattgaatccagctcctcagaaatcagctgctccaggaactgctcctgaggaggcccctgggcctctgcctccgccgccaaccccatcttctgaggatccaggcttttcttctcctctggggatgccagatcctcatctgtatcaccagatgggccttcttctcaaacacatgcaggatgtgagagtcctcctcggtcacctgctcatggagttgagggaattatctggccaccggaagcctgggaccacaaaggctactgctgaatagaagtaaacagttcatccatgatctcacttaaccaccccaataaatctgattctttattttctcttcctgtcctgcacatatgcataagtacttttacaagttgtcccagtgttttgttagaataatgtagttaggtgagtgtaaataaatttatataaagtgagaattagagtttagctataattgtgtattctctcttaacacaacagaattctgctgtctagatcaggaatttctatctgttatatcgaccagaatgttgtgatttaaagagaactaatggaagtggattgaatacagcagtctcaactgggggcaattttgccccccagaggacattgggcaatgtttggagacattttggtcattatacttggggggttgggggatggtgggatgtgtgtgctactggcatccagtaaatagaagccaggggtgccgctaaacatcctataatgcacagggcagtaccccacaacgaaaaataatctggcccaaaatgtcagttgtactgagtttgagaaaccccagcctaatgaaaccctaggtgttgggctctggaatgggactttgtcccttctaattattatctctttccagcctcattcagctattcttactgacataccagtctttagctggtgctatggtctgttctttagttctagtttgtatcccctcaaaagccattatgttgaaatcctaatccccaaggtgatggcattaagaagtgggcctttgggaagtgattagatcaggagtgcagagccctcatgattaggattagtgcccttatttaaaaaggccccagagagctaactcacccttccaccatatgaggacgtggcaagaagatgacatgtatgagaaccaaaaaacagctgtcgccaaacaccgactctgtcgttgccttgatcttgaacttccagcctccagaactatgagaaataaaattctgttgtttgtaagct

SEQ ID NO: 133894 - DNA, 1792 bp, Homo sapiens
  Payload ID: 6158
  Gene Symbol: FCRLA
  Gene Name: Fc receptor-like A
  Uniprot ID: Q7L513
  ENST ID: ENST00000367949
  CDS Start-End: 243-821
ggccagctggctatcagacaatgacatgctttgacaggcccctgagctctgtgagtaaattcttgaacagctgagagtgctaccattttgtcatagccctaagggtgcagatgatgctgaaagcgtgttggccaaatctgaatgatgaaagccaattacaaactagaaaatgaaaacagaccccagatgcaaggagatgagacagttaaatttacttcctcttttctaatctgagaggtttcatgttgaagaaaatcagtgttggggttgcaggagacctaaacacagtcaccatgaagctgggctgtgtcctcatggcctgggccctctacctttcccttggtgtgctctgggtggcccagatgctactggctgccagttttgagacgctgcagtgtgagggacctgtctgcactgaggagagcagctgccacacggaggatgacttgactgatgcaagggaagctggcttccaggtcaaggcctacactttcagtgaacccttccacctgattgtgtcctatggtgcttccagctctgctgcacctcccacattgaatccagctcctcagaaatcagctgctccaggaactgctcctgaggaggcccctgggcctctgcctccgccgccaaccccatcttctgaggatccaggcttttcttctcctctggggatgccagatcctcatctgtatcaccagatgggccttcttctcaaacacatgcaggatgtgagagtcctcctcggtcacctgctcatggagttgagggaattatctggccaccggaagcctgggaccacaaaggctactgctgaatagaagtaaacagttcatccatgatctcacttaaccaccccaataaatctgattctttattttctcttcctgtcctgcacatatgcataagtacttttacaagttgtcccagtgttttgttagaataatgtagttaggtgagtgtaaataaatttatataaagtgagaattagagtttagctataattgtgtattctctcttaacacaacagaattctgctgtctagatcaggaatttctatctgttatatcgaccagaatgttgtgatttaaagagaactaatggaagtggattgaatacagcagtctcaactgggggcaattttgccccccagaggacattgggcaatgtttggagacattttggtcattatacttggggggttgggggatggtgggatgtgtgtgctactggcatccagtaaatagaagccaggggtgccgctaaacatcctataatgcacagggcagtaccccacaacgaaaaataatctggcccaaaatgtcagttgtactgagtttgagaaaccccagcctaatgaaaccctaggtgttgggctctggaatgggactttgtcccttctaattattatctctttccagcctcattcagctattcttactgacataccagtctttagctggtgctatggtctgttctttagttctagtttgtatcccctcaaaagccattatgttgaaatcctaatccccaaggtgatggcattaagaagtgggcctttgggaagtgattagatcaggagtgcagagccctcatgattaggattagtgcccttatttaaaaaggccccagagagctaactcacccttccaccatatgaggacgtggcaagaagatgacatgtatgagaaccaaaaaacagctgtcgccaaacaccgactctgtcgttgccttgatcttgaacttccagcctccagaactatgagaaataaaattctgttgtttgtaagct

SEQ ID NO: 133895 - DNA, 823 bp, Homo sapiens
  Payload ID: 6158
  Gene Symbol: FCRLA
  Gene Name: Fc receptor-like A
  ENST ID: ENST00000367950
  CDS Start-End: 40-498
gccctctacctttcccttggtgtgctctgggtggcccagatgctactggctgccagttttgagacgctgcagtgtgagggacctgtctgcactgaggagagcagctgccacacggaggatgacttgactgatgcaagggaagctggcttccaggtcaaggcctacactttcagtgaacccttccacctgattgtgtcctatggtgcttccagctctgctgcacctcccacattgaatccagctcctcagaaatcagctgctccaggaactgctcctgaggaggcccctgggcctctgcctccgccgccaaccccatcttctgaggatccaggcttttcttctcctctggggatgccagatcctcatctgtatcaccagatgggccttcttctcaaacacatgcaggatgtgagagtcctcctcggtcacctgctcatggagttgagggaattatctggccaccggaagcctgggaccacaaaggctactgctgaatagaagtaaacagttcatccatgatctcacttaaccaccccaataaatctgattctttattttctcttcctgtcctgcacatatgcataagtacttttacaagttgtcccagtgttttgttagaataatgtagttaggtgagtgtaaataaatttatataaagtgagaattagagtttagctataattgtgtattctctcttaacacaacagaattctgctgtctagatcaggaatttctatctgttatatcgaccagaatgttgtgatttaaagagaactaatggaagtggattgaatacagcagtctcaactgggggcaattttgc

SEQ ID NO: 133896 - DNA, 2066 bp, Homo sapiens
  Payload ID: 6158
  Gene Symbol: FCRLA
  Gene Name: Fc receptor-like A
  Uniprot ID: Q7L513
  ENST ID: ENST00000367953
  CDS Start-End: 1-1098
atgaagctgggctgtgtcctcatggcctgggccctctacctttcccttggtgtgctctgggtggcccagatgctactggcagctggatgtcatgccgctgccagttttgagacgctgcagtgtgagggacctgtctgcactgaggagagcagctgccacacggaggatgacttgactgatgcaagggaagctggcttccaggtcaaggcctacactttcagtgaacccttccacctgattgtgtcctatgactggctgatcctccaaggtccagccaagccagtttttgaaggggacctgctggttctgcgctgccaggcctggcaagactggccactgactcaggtgaccttctaccgagatggctcagctctgggtccccccgggcctaacagggaattctccatcaccgtggtacaaaaggcagacagcgggcactaccactgcagtggcatcttccagagccctggtcctgggatcccagaaacagcatctgttgtggctatcacagtccaagaactgtttccagcgccaattctcagagctgtaccctcagctgaaccccaagcaggaagccccatgaccctgagttgtcagacaaagttgcccctgcagaggtcagctgcccgcctcctcttctccttctacaaggatggaaggatagtgcaaagcagggggctctcctcagaattccagatccccacagcttcagaagatcactccgggtcatactggtgtgaggcagccactgaggacaaccaagtttggaaacagagcccccagctagagatcagagtgcagggtgcttccagctctgctgcacctcccacattgaatccagctcctcagaaatcagctgctccaggaactgctcctgaggaggcccctgggcctctgcctccgccgccaaccccatcttctgaggatccaggcttttcttctcctctggggatgccagatcctcatctgtatcaccagatgggccttcttctcaaacacatgcaggatgtgagagtcctcctcggtcacctgctcatggagttgagggaattatctggccaccggaagcctgggaccacaaaggctactgctgaatagaagtaaacagttcatccatgatctcacttaaccaccccaataaatctgattctttattttctcttcctgtcctgcacatatgcataagtacttttacaagttgtcccagtgttttgttagaataatgtagttaggtgagtgtaaataaatttatataaagtgagaattagagtttagctataattgtgtattctctcttaacacaacagaattctgctgtctagatcaggaatttctatctgttatatcgaccagaatgttgtgatttaaagagaactaatggaagtggattgaatacagcagtctcaactgggggcaattttgccccccagaggacattgggcaatgtttggagacattttggtcattatacttggggggttgggggatggtgggatgtgtgtgctactggcatccagtaaatagaagccaggggtgccgctaaacatcctataatgcacagggcagtaccccacaacgaaaaataatctggcccaaaatgtcagttgtactgagtttgagaaaccccagcctaatgaaaccctaggtgttgggctctggaatgggactttgtcccttctaattattatctctttccagcctcattcagctattcttactgacataccagtctttagctggtgctatggtctgttctttagttctagtttgtatcccctcaaaagccattatgttgaaatcctaatccccaaggtgatggcattaagaagtgggcctttgggaagtgattagatcaggagtgcagagccctcatgattaggattagtgcccttatttaaaaaggccccagagagctaactcacccttccaccatatgaggacgtggcaagaagatgacatgtatgagaaccaaaaaacagctgtcgccaaacaccgactctgtcgttgccttgatcttgaacttccagcctccagaactatgagaaataaaattctgttgtttgtaa

SEQ ID NO: 133897 - DNA, 1684 bp, Homo sapiens
  Payload ID: 6158
  Gene Symbol: FCRLA
  Gene Name: Fc receptor-like A
  Uniprot ID: Q7L513
  ENST ID: ENST00000367957
  CDS Start-End: 6-716
gtttcatgttgaagaaaatcagtgttggggttgcaggagacctaaacacagtcaccatgaagctgggctgtgtcctcatggcctgggccctctacctttcccttggtgtgctctgggtggcccagatgctactggaactgtttccagcgccaattctcagagctgtaccctcagctgaaccccaagcaggaagccccatgaccctgagttgtcagacaaagttgcccctgcagaggtcagctgcccgcctcctcttctccttctacaaggatggaaggatagtgcaaagcagggggctctcctcagaattccagatccccacagcttcagaagatcactccgggtcatactggtgtgaggcagccactgaggacaaccaagtttggaaacagagcccccagctagagatcagagtgcagggtgcttccagctctgctgcacctcccacattgaatccagctcctcagaaatcagctgctccaggaactgctcctgaggaggcccctgggcctctgcctccgccgccaaccccatcttctgaggatccaggcttttcttctcctctggggatgccagatcctcatctgtatcaccagatgggccttcttctcaaacacatgcaggatgtgagagtcctcctcggtcacctgctcatggagttgagggaattatctggccaccggaagcctgggaccacaaaggctactgctgaatagaagtaaacagttcatccatgatctcacttaaccaccccaataaatctgattctttattttctcttcctgtcctgcacatatgcataagtacttttacaagttgtcccagtgttttgttagaataatgtagttaggtgagtgtaaataaatttatataaagtgagaattagagtttagctataattgtgtattctctcttaacacaacagaattctgctgtctagatcaggaatttctatctgttatatcgaccagaatgttgtgatttaaagagaactaatggaagtggattgaatacagcagtctcaactgggggcaattttgccccccagaggacattgggcaatgtttggagacattttggtcattatacttggggggttgggggatggtgggatgtgtgtgctactggcatccagtaaatagaagccaggggtgccgctaaacatcctataatgcacagggcagtaccccacaacgaaaaataatctggcccaaaatgtcagttgtactgagtttgagaaaccccagcctaatgaaaccctaggtgttgggctctggaatgggactttgtcccttctaattattatctctttccagcctcattcagctattcttactgacataccagtctttagctggtgctatggtctgttctttagttctagtttgtatcccctcaaaagccattatgttgaaatcctaatccccaaggtgatggcattaagaagtgggcctttgggaagtgattagatcaggagtgcagagccctcatgattaggattagtgcccttatttaaaaaggccccagagagctaactcacccttccaccatatgaggacgtggcaagaagatgacatgtatgagaaccaaaaaacagctgtcgccaaacaccgactctgtcgttgccttgatcttgaacttccagcctccagaactatgagaaataaaattctgttgtttgtaa

SEQ ID NO: 133898 - DNA, 2362 bp, Homo sapiens
  Payload ID: 6158
  Gene Symbol: FCRLA
  Gene Name: Fc receptor-like A
  Uniprot ID: Q7L513
  ENST ID: ENST00000367959
  CDS Start-End: 243-1391
ggccagctggctatcagacaatgacatgctttgacaggcccctgagctctgtgagtaaattcttgaacagctgagagtgctaccattttgtcatagccctaagggtgcagatgatgctgaaagcgtgttggccaaatctgaatgatgaaagccaattacaaactagaaaatgaaaacagaccccagatgcaaggagatgagacagttaaatttacttcctcttttctaatctgagaggtttcatgttgaagaaaatcagtgttggggttgcaggagacctaaacacagtcaccatgaagctgggctgtgtcctcatggcctgggccctctacctttcccttggtgtgctctgggtggcccagatgctactggcagctggatgtcatgccgctgccagttttgagacgctgcagtgtgagggacctgtctgcactgaggagagcagctgccacacggaggatgacttgactgatgcaagggaagctggcttccaggtcaaggcctacactttcagtgaacccttccacctgattgtgtcctatgactggctgatcctccaaggtccagccaagccagtttttgaaggggacctgctggttctgcgctgccaggcctggcaagactggccactgactcaggtgaccttctaccgagatggctcagctctgggtccccccgggcctaacagggaattctccatcaccgtggtacaaaaggcagacagcgggcactaccactgcagtggcatcttccagagccctggtcctgggatcccagaaacagcatctgttgtggctatcacagtccaagaactgtttccagcgccaattctcagagctgtaccctcagctgaaccccaagcaggaagccccatgaccctgagttgtcagacaaagttgcccctgcagaggtcagctgcccgcctcctcttctccttctacaaggatggaaggatagtgcaaagcagggggctctcctcagaattccagatccccacagcttcagaagatcactccgggtcatactggtgtgaggcagccactgaggacaaccaagtttggaaacagagcccccagctagagatcagagtgcagggtgcttccagctctgctgcacctcccacattgaatccagctcctcagaaatcagctgctccaggaactgctcctgaggaggcccctgggcctctgcctccgccgccaaccccatcttctgaggatccaggcttttcttctcctctggggatgccagatcctcatctgtatcaccagatgggccttcttctcaaacacatgcaggatgtgagagtcctcctcggtcacctgctcatggagttgagggaattatctggccaccggaagcctgggaccacaaaggctactgctgaatagaagtaaacagttcatccatgatctcacttaaccaccccaataaatctgattctttattttctcttcctgtcctgcacatatgcataagtacttttacaagttgtcccagtgttttgttagaataatgtagttaggtgagtgtaaataaatttatataaagtgagaattagagtttagctataattgtgtattctctcttaacacaacagaattctgctgtctagatcaggaatttctatctgttatatcgaccagaatgttgtgatttaaagagaactaatggaagtggattgaatacagcagtctcaactgggggcaattttgccccccagaggacattgggcaatgtttggagacattttggtcattatacttggggggttgggggatggtgggatgtgtgtgctactggcatccagtaaatagaagccaggggtgccgctaaacatcctataatgcacagggcagtaccccacaacgaaaaataatctggcccaaaatgtcagttgtactgagtttgagaaaccccagcctaatgaaaccctaggtgttgggctctggaatgggactttgtcccttctaattattatctctttccagcctcattcagctattcttactgacataccagtctttagctggtgctatggtctgttctttagttctagtttgtatcccctcaaaagccattatgttgaaatcctaatccccaaggtgatggcattaagaagtgggcctttgggaagtgattagatcaggagtgcagagccctcatgattaggattagtgcccttatttaaaaaggccccagagagctaactcacccttccaccatatgaggacgtggcaagaagatgacatgtatgagaaccaaaaaacagctgtcgccaaacaccgactctgtcgttgccttgatcttgaacttccagcctccagaactatgagaaataaaattctgttgtttgtaagct

SEQ ID NO: 133899 - DNA, 2077 bp, Homo sapiens
  Payload ID: 6158
  Gene Symbol: FCRLA
  Gene Name: Fc receptor-like A
  Uniprot ID: Q7L513
  ENST ID: ENST00000546024
  CDS Start-End: 243-1106
ggccagctggctatcagacaatgacatgctttgacaggcccctgagctctgtgagtaaattcttgaacagctgagagtgctaccattttgtcatagccctaagggtgcagatgatgctgaaagcgtgttggccaaatctgaatgatgaaagccaattacaaactagaaaatgaaaacagaccccagatgcaaggagatgagacagttaaatttacttcctcttttctaatctgagaggtttcatgttgaagaaaatcagtgttggggttgcaggagacctaaacacagtcaccatgaagctgggctgtgtcctcatggcctgggccctctacctttcccttggtgtgctctgggtggcccagatgctactggctgccagttttgagacgctgcagtgtgagggacctgtctgcactgaggagagcagctgccacacggaggatgacttgactgatgcaagggaagctggcttccaggtcaaggcctacactttcagtgaacccttccacctgattgtgtcctatgaactgtttccagcgccaattctcagagctgtaccctcagctgaaccccaagcaggaagccccatgaccctgagttgtcagacaaagttgcccctgcagaggtcagctgcccgcctcctcttctccttctacaaggatggaaggatagtgcaaagcagggggctctcctcagaattccagatccccacagcttcagaagatcactccgggtcatactggtgtgaggcagccactgaggacaaccaagtttggaaacagagcccccagctagagatcagagtgcagggtgcttccagctctgctgcacctcccacattgaatccagctcctcagaaatcagctgctccaggaactgctcctgaggaggcccctgggcctctgcctccgccgccaaccccatcttctgaggatccaggcttttcttctcctctggggatgccagatcctcatctgtatcaccagatgggccttcttctcaaacacatgcaggatgtgagagtcctcctcggtcacctgctcatggagttgagggaattatctggccaccggaagcctgggaccacaaaggctactgctgaatagaagtaaacagttcatccatgatctcacttaaccaccccaataaatctgattctttattttctcttcctgtcctgcacatatgcataagtacttttacaagttgtcccagtgttttgttagaataatgtagttaggtgagtgtaaataaatttatataaagtgagaattagagtttagctataattgtgtattctctcttaacacaacagaattctgctgtctagatcaggaatttctatctgttatatcgaccagaatgttgtgatttaaagagaactaatggaagtggattgaatacagcagtctcaactgggggcaattttgccccccagaggacattgggcaatgtttggagacattttggtcattatacttggggggttgggggatggtgggatgtgtgtgctactggcatccagtaaatagaagccaggggtgccgctaaacatcctataatgcacagggcagtaccccacaacgaaaaataatctggcccaaaatgtcagttgtactgagtttgagaaaccccagcctaatgaaaccctaggtgttgggctctggaatgggactttgtcccttctaattattatctctttccagcctcattcagctattcttactgacataccagtctttagctggtgctatggtctgttctttagttctagtttgtatcccctcaaaagccattatgttgaaatcctaatccccaaggtgatggcattaagaagtgggcctttgggaagtgattagatcaggagtgcagagccctcatgattaggattagtgcccttatttaaaaaggccccagagagctaactcacccttccaccatatgaggacgtggcaagaagatgacatgtatgagaaccaaaaaacagctgtcgccaaacaccgactctgtcgttgccttgatcttgaacttccagcctccagaactatgagaaataaaattctgttgtttgtaagct

SEQ ID NO: 133900 - DNA, 1942 bp, Homo sapiens
  Payload ID: 6158
  Gene Symbol: FCRLA
  Gene Name: Fc receptor-like A
  Uniprot ID: Q7L513
  ENST ID: ENST00000540521
  CDS Start-End: 243-971
ggccagctggctatcagacaatgacatgctttgacaggcccctgagctctgtgagtaaattcttgaacagctgagagtgctaccattttgtcatagccctaagggtgcagatgatgctgaaagcgtgttggccaaatctgaatgatgaaagccaattacaaactagaaaatgaaaacagaccccagatgcaaggagatgagacagttaaatttacttcctcttttctaatctgagaggtttcatgttgaagaaaatcagtgttggggttgcaggagacctaaacacagtcaccatgaagctgggctgtgtcctcatggcctgggccctctacctttcccttggtgtgctctgggtggcccagatgctactggcagctggatgtcatgccgaactgtttccagcgccaattctcagagctgtaccctcagctgaaccccaagcaggaagccccatgaccctgagttgtcagacaaagttgcccctgcagaggtcagctgcccgcctcctcttctccttctacaaggatggaaggatagtgcaaagcagggggctctcctcagaattccagatccccacagcttcagaagatcactccgggtcatactggtgtgaggcagccactgaggacaaccaagtttggaaacagagcccccagctagagatcagagtgcagggtgcttccagctctgctgcacctcccacattgaatccagctcctcagaaatcagctgctccaggaactgctcctgaggaggcccctgggcctctgcctccgccgccaaccccatcttctgaggatccaggcttttcttctcctctggggatgccagatcctcatctgtatcaccagatgggccttcttctcaaacacatgcaggatgtgagagtcctcctcggtcacctgctcatggagttgagggaattatctggccaccggaagcctgggaccacaaaggctactgctgaatagaagtaaacagttcatccatgatctcacttaaccaccccaataaatctgattctttattttctcttcctgtcctgcacatatgcataagtacttttacaagttgtcccagtgttttgttagaataatgtagttaggtgagtgtaaataaatttatataaagtgagaattagagtttagctataattgtgtattctctcttaacacaacagaattctgctgtctagatcaggaatttctatctgttatatcgaccagaatgttgtgatttaaagagaactaatggaagtggattgaatacagcagtctcaactgggggcaattttgccccccagaggacattgggcaatgtttggagacattttggtcattatacttggggggttgggggatggtgggatgtgtgtgctactggcatccagtaaatagaagccaggggtgccgctaaacatcctataatgcacagggcagtaccccacaacgaaaaataatctggcccaaaatgtcagttgtactgagtttgagaaaccccagcctaatgaaaccctaggtgttgggctctggaatgggactttgtcccttctaattattatctctttccagcctcattcagctattcttactgacataccagtctttagctggtgctatggtctgttctttagttctagtttgtatcccctcaaaagccattatgttgaaatcctaatccccaaggtgatggcattaagaagtgggcctttgggaagtgattagatcaggagtgcagagccctcatgattaggattagtgcccttatttaaaaaggccccagagagctaactcacccttccaccatatgaggacgtggcaagaagatgacatgtatgagaaccaaaaaacagctgtcgccaaacaccgactctgtcgttgccttgatcttgaacttccagcctccagaactatgagaaataaaattctgttgtttgtaagct

SEQ ID NO: 133901 - DNA, 1193 bp, Homo sapiens
  Payload ID: 6159
  Gene Symbol: FCRLB
  Gene Name: Fc receptor-like B
  Uniprot ID: Q6BAA4
  ENST ID: ENST00000336830
  CDS Start-End: 15-842
cagtcagatccatcatgtggccactgacagcccttctgctcctggttccaagcagtgggcaagctgctactctggagaagcccatattgtctctacatccaccttggaccaccatcttcaaaggggagcgggtaactttgaagtgtgatggataccacccactgctcctggagctccagcccatcagcactctctggtatttgggccacctacttctgccctctcacaagaagagcattgaggtgcagacaccaggggtgtatcgatgccagacacggggagcacccgtcagtgaccccatccacctctctgtatccaatgattggctgattctgcaagtgccctatgcgccagtgttcgagggtgagccgctagtcctgcgctgccgcggctggtacgacaaggtggtctacaagcttcactactaccacgacggccaggccgtgcgctacttccactccagcgccaactacactgtgttacaggcgcgtgccagcgacagcgggcgctaccagtgctcgggcaccatgcgcatcccggtggagagcgcgcccatgttctccgctaaggtggctgtgacagtgcaagaagcgcgacacgccgctgcagttcgcgttttacaagtacagccgcgcggtgcgccgcttcgactggggcgccgagtacacagtcccggagcccgaggtcgaggagctcgaatcgtactggtgcgaggcggctaccgccacccgcagtgtccggaaacgcagtccgtggctgcagctcccggggccgggttctcccctggacccggcctccaccaccgccccagctccatgggccgcagccttggctcctggtaataggccgctttccttcagaaagcccccggtgtccagatcggtcccgttggtcacctccgtccggaacaccacctccaccgggctgcagttcccggcgagcggcgccccgactgcggggccacccgcctgcgctccgccgacgcccttggaacaatcggctggagccctgaaacccgacgtggaccttctgctccgagaaatgcagctgctcaaaggccttctgagccgggtggtcctggaattaaaggagccacaggccctccgggagctcaggggaacgcccgagacccccacctctcactttgctgtgagcccgggaaccccagagaccactcctgtggagagctgagg

SEQ ID NO: 133902 - DNA, 1172 bp, Homo sapiens
  Payload ID: 6159
  Gene Symbol: FCRLB
  Gene Name: Fc receptor-like B
  Uniprot ID: Q6BAA4
  ENST ID: ENST00000367944
  CDS Start-End: 15-821
cagtcagatccatcatgtggccactgacagcccttctgctcctggctactctggagaagcccatattgtctctacatccaccttggaccaccatcttcaaaggggagcgggtaactttgaagtgtgatggataccacccactgctcctggagctccagcccatcagcactctctggtatttgggccacctacttctgccctctcacaagaagagcattgaggtgcagacaccaggggtgtatcgatgccagacacggggagcacccgtcagtgaccccatccacctctctgtatccaatgattggctgattctgcaagtgccctatgcgccagtgttcgagggtgagccgctagtcctgcgctgccgcggctggtacgacaaggtggtctacaagcttcactactaccacgacggccaggccgtgcgctacttccactccagcgccaactacactgtgttacaggcgcgtgccagcgacagcgggcgctaccagtgctcgggcaccatgcgcatcccggtggagagcgcgcccatgttctccgctaaggtggctgtgacagtgcaagaagcgcgacacgccgctgcagttcgcgttttacaagtacagccgcgcggtgcgccgcttcgactggggcgccgagtacacagtcccggagcccgaggtcgaggagctcgaatcgtactggtgcgaggcggctaccgccacccgcagtgtccggaaacgcagtccgtggctgcagctcccggggccgggttctcccctggacccggcctccaccaccgccccagctccatgggccgcagccttggctcctggtaataggccgctttccttcagaaagcccccggtgtccagatcggtcccgttggtcacctccgtccggaacaccacctccaccgggctgcagttcccggcgagcggcgccccgactgcggggccacccgcctgcgctccgccgacgcccttggaacaatcggctggagccctgaaacccgacgtggaccttctgctccgagaaatgcagctgctcaaaggccttctgagccgggtggtcctggaattaaaggagccacaggccctccgggagctcaggggaacgcccgagacccccacctctcactttgctgtgagcccgggaaccccagagaccactcctgtggagagctgagg

SEQ ID NO: 133903 - DNA, 1131 bp, Homo sapiens
  Payload ID: 6159
  Gene Symbol: FCRLB
  Gene Name: Fc receptor-like B
  Uniprot ID: Q6BAA4
  ENST ID: ENST00000367945
  CDS Start-End: 15-950
cagtcagatccatcatgtggccactgacagcccttctgctcctggctactctggagaagcccatattgtctctacatccaccttggaccaccatcttcaaaggggagcgggtaactttgaagtgtgatggataccacccactgctcctggagctccagcccatcagcactctctggtatttgggccacctacttctgccctctcacaagaagagcattgaggtgcagacaccaggggtgtatcgatgccagacacggggagcacccgtcagtgaccccatccacctctctgtatccaatgattggctgattctgcaagtgccctatgcgccagtgttcgagggtgagccgctagtcctgcgctgccgcggctggtacgacaaggtggtctacaagcttcactactaccacgacggccaggccgtgcgctacttccactccagcgccaactacactgtgttacaggcgcgtgccagcgacagcgggcgctaccagtgctcgggcaccatgcgcatcccggtggagagcgcgcccatgttctccgctaaggtggctgtgacagtgcaagccgcgcggtgcgccgcttcgactggggcgccgagtacacagtcccggagcccgaggtcgaggagctcgaatcgtactggtgcgaggcggctaccgccacccgcagtgtccggaaacgcagtccgtggctgcagctcccggggccgggttctcccctggacccggcctccaccaccgccccagctccatgggccgcagccttggctcctggtaataggccgctttccttcagaaagcccccggtgtccagatcggtcccgttggtcacctccgtccggaacaccacctccaccgggctgcagttcccggcgagcggcgccccgactgcggggccacccgcctgcgctccgccgacgcccttggaacaatcggctggagccctgaaacccgacgtggaccttctgctccgagaaatgcagctgctcaaaggccttctgagccgggtggtcctggaattaaaggagccacaggccctccgggagctcaggggaacgcccgagacccccacctctcactttgctgtgagcccgggaaccccagagaccactcctgtggagagctgagg

SEQ ID NO: 133904 - DNA, 1152 bp, Homo sapiens
  Payload ID: 6159
  Gene Symbol: FCRLB
  Gene Name: Fc receptor-like B
  Uniprot ID: Q6BAA4
  ENST ID: ENST00000367946
  CDS Start-End: 15-971
cagtcagatccatcatgtggccactgacagcccttctgctcctggttccaagcagtgggcaagctgctactctggagaagcccatattgtctctacatccaccttggaccaccatcttcaaaggggagcgggtaactttgaagtgtgatggataccacccactgctcctggagctccagcccatcagcactctctggtatttgggccacctacttctgccctctcacaagaagagcattgaggtgcagacaccaggggtgtatcgatgccagacacggggagcacccgtcagtgaccccatccacctctctgtatccaatgattggctgattctgcaagtgccctatgcgccagtgttcgagggtgagccgctagtcctgcgctgccgcggctggtacgacaaggtggtctacaagcttcactactaccacgacggccaggccgtgcgctacttccactccagcgccaactacactgtgttacaggcgcgtgccagcgacagcgggcgctaccagtgctcgggcaccatgcgcatcccggtggagagcgcgcccatgttctccgctaaggtggctgtgacagtgcaagccgcgcggtgcgccgcttcgactggggcgccgagtacacagtcccggagcccgaggtcgaggagctcgaatcgtactggtgcgaggcggctaccgccacccgcagtgtccggaaacgcagtccgtggctgcagctcccggggccgggttctcccctggacccggcctccaccaccgccccagctccatgggccgcagccttggctcctggtaataggccgctttccttcagaaagcccccggtgtccagatcggtcccgttggtcacctccgtccggaacaccacctccaccgggctgcagttcccggcgagcggcgccccgactgcggggccacccgcctgcgctccgccgacgcccttggaacaatcggctggagccctgaaacccgacgtggaccttctgctccgagaaatgcagctgctcaaaggccttctgagccgggtggtcctggaattaaaggagccacaggccctccgggagctcaggggaacgcccgagacccccacctctcactttgctgtgagcccgggaaccccagagaccactcctgtggagagctgagg

SEQ ID NO: 133905 - DNA, 1977 bp, Homo sapiens
  Payload ID: 6159
  Gene Symbol: FCRLB
  Gene Name: Fc receptor-like B
  Uniprot ID: Q6BAA4
  ENST ID: ENST00000367948
  CDS Start-End: 216-1496
aagatactatcttcctgggagttgacagtacctgataattgatctccttcccatcagatttccaagggatcaaggtgccccggttctaaacaaccacaggtacggtcacatggctcagaaagcacaagaagtagagccccgaggtcagatctgagaggcttctgaggggccgatgcagtgacttctctgctgcagctgctgcagtcagatccatcatgtggccactgacagcccttctgctcctggttccaagcagtgggcaagctgctactctggagaagcccatattgtctctacatccaccttggaccaccatcttcaaaggggagcgggtaactttgaagtgtgatggataccacccactgctcctggagctccagcccatcagcactctctggtatttgggccacctacttctgccctctcacaagaagagcattgaggtgcagacaccaggggtgtatcgatgccagacacggggagcacccgtcagtgaccccatccacctctctgtatccaatgattggctgattctgcaagtgccctatgcgccagtgttcgagggtgagccgctagtcctgcgctgccgcggctggtacgacaaggtggtctacaagcttcactactaccacgacggccaggccgtgcgctacttccactccagcgccaactacactgtgttacaggcgcgtgccagcgacagcgggcgctaccagtgctcgggcaccatgcgcatcccggtggagagcgcgcccatgttctccgctaaggtggctgtgacagtgcaagagctgttccgggcgccggtgctgagggtgatgggtccgcgggaggcccgcggcgcggcgctgggtggggtggtgctgcgctgcgacacgcgcctgcacccgcagaagcgcgacacgccgctgcagttcgcgttttacaagtacagccgcgcggtgcgccgcttcgactggggcgccgagtacacagtcccggagcccgaggtcgaggagctcgaatcgtactggtgcgaggcggctaccgccacccgcagtgtccggaaacgcagtccgtggctgcagctcccggggccgggttctcccctggacccggcctccaccaccgccccagctccatgggccgcagccttggctcctggtaataggccgctttccttcagaaagcccccggtgtccagatcggtcccgttggtcacctccgtccggaacaccacctccaccgggctgcagttcccggcgagcggcgccccgactgcggggccacccgcctgcgctccgccgacgcccttggaacaatcggctggagccctgaaacccgacgtggaccttctgctccgagaaatgcagctgctcaaaggccttctgagccgggtggtcctggaattaaaggagccacaggccctccgggagctcaggggaacgcccgagacccccacctctcactttgctgtgagcccgggaaccccagagaccactcctgtggagagctgagggggcggctaccgtcccctctgcaggctcattcctccttggtctcctgcttcccctcacgcgaatttctttcaaagccatctgtttgcatccttgtgttttgctgtggtttttaaaggagcgcccacgaagtgtagtggctgacgatttcaacctcacacagcagtttgtaaccgcaagcattctctttgaattctcacagaattcagcaagaagtagaaacctgttatttactacattgtgatttaactttggatgtgaatttagtcacccttagcccttcagataagcctagccagtacatatttcagcacaggcagtttttttggtatttaagtacattgaggtaactgagcacttgagaatattttagggtcaaagtgtaattattcataatgaatttactctgttgatattaaaaagacgttcagtcctattactgatgagtttacatcttcaaataaatcctgggttctattta

SEQ ID NO: 133906 - DNA, 4341 bp, Homo sapiens
  Payload ID: 6160
  Gene Symbol: FCF1
  Gene Name: FCF1 rRNA-processing protein
  Uniprot ID: Q9Y324
  ENST ID: ENST00000341162
  CDS Start-End: 55-651
gtagaagtattgcgccgttggtgattacggaagaaccaggagtttggcgtgaccatggggaagcaaaagaaaacaaggaagtatgcgaccatgaagcgaatgcttagtctcagagatcagaggcttaaagaaaaggatagattaaaacctaaaaagaaagaaaagaaggatcccagcgcattaaaggaaagagaagttccccaacacccttcctgcttatttttccaatataatacacagctgggcccaccttaccacatcctcgttgataccaactttatcaacttttccataaaagccaaactggacttagtgcagtcaatgatggactgtctgtatgccaagtgtatcccatgtataaccgattgtgtaatggctgaaattgagaaattggggcagaagtatcgagtggctctaaggattgccaaggatccaagatttgaacgattaccatgtacacacaaaggaacctatgcagatgactgcttagtacagagagtaactcagcataagtgttacattgtggccacagttgaccgggacctgaaaagaagaatccgtaagattcctggagttcctatcatgtacatttctaaccatagatacaacattgaacggatgccagatgattatggagcccctcgattctaattcttacaagacacagttcctctgcctttcttcgaccaactttctcttgttgccagttcattacacaaaatgtagcgggatttttaaggaatcagagagactgatggagttcagggagatatttattatttaggtgcaccagcccagtcagattaacatccaaaggactgaaccctgaacagagttaagttaccttttaagcattttgtggggccgcgggggttggggggaatctgtgcagggggaagcatattacagaagcaagaaagacagttattcaattaactgagacatgcattacatcatttcttacttttcaaggaaaatcatgttttacgacttgagtttatctgtctagttaccttgcagctgcacagctagagaaacagggtatttacaatgcctgggaaaggaggagagataaggctcactagccacagaaaaacaggcagttaatttttaaaggactccagctctttctctttctcacggggaattggattttcttacatgcaactgaatttctgcttacacatttttaaatttcttttaattgcttttccaatgcaatagcatgaattattattctgttgacctatttgccttactatgagctgagggtagttcaatatgctcactcttttttttttttttcttgagatgaagttttgctctgtcaccaggctggagtgcagtggcgtgatctgggctcactgcaacccctgcctcccatccttcaagtgattctcctgcctcagcctcccgagtagctgggattacaggtacacaccaccatgctcaactaatttttcttttttgggcggggggggtggatatttttagtagagacaaatacttttgtatttttaatacagaaaagtatgcctcggcctcccaaagtgctggaattacagacatgagccactgtgcctggcctgctcactttctgatgctgcttttttgttgtttgtttgtttatttgtttgttttgagacggagtctcgctctgtcaccaggctggagtgcagtggcgcaatctcggctcattgcaacctccgcctcccaggttcaagcgattctcctgcctcagcctgcggagtagctgggactataggtgcgtgccaccacgtccagccactgatgctgttttgccactgatgctgttttgaaattgatattttgtctcataaaaactaggccaggcatggtggctcattcctgtaatcccagcactttgggaggccaaggtgggtggatcacctgaggtcaggagttggagatgagcctggacaacatggcaaaaccccacctctactaaaaatacaaaaaaaattagctgggtatggtgtcacgtgcctgtaatcccagccactggggaggctgaggcaggagaacctcttgaacccaggaggtggaggttgcagtgagctgagattgcgccactgcattccagcctgggtgacagagtgagactgtctcaaaaaaaaaaaaaaattaatgatggtcaaagggtataaaatctcagacaggaagaatatgttttatgctttttttgagttctgttgtacagtgtggtgcctatacttaataatggggtattatacatttcaaaattgatgttctcatcacagaaatgtatttgaagtattgcatatgttaactagcttgatttaactattccatattgtatccacaatttatgatatcactttgtaacccatacatttatacaattataaattgtcaatttacaataaaaaatttttgttgcgtctttttagaaatcagatattctgatgattgctcacataatttggcggtcattgttttatactgacttactcaataaacatttattaaatgtatactaggtgcttaataagagatggtcctgccctcaagacactcattatggtgggaaagaaaaacatgtaaatgaataaatgccgtaaaatagcagtgctagggtaaaagtttcagaggcatgtcatgggcacataaaggtggaatgatttttttctactggttgggatggagagggaggaaaggccagtggtcatgtggtttgagctaatcttaaaaatgaataggtgcctccccagtaaattaggaatggaagatgaagcataggaaacagtacaccatagaaaatccattaacctatgtataatcccagcactttgggagactgaggtgggcagatcacttgaggtcaggagtttgaaaccagcctggccaacatggtgaaaccccacctctactaaaaattccaaaattaactgggcgtggtggtgcaagcctgtagtcccagctacttgggaggctgaggcaggagaatcgcttgaacccgggaggcagaggttgcaacgagccgagatcacgccactgcactccagcctgggcgacagagtgaaactctgtctcaaaaacaaacaaacaaaaaacctatgtatttgtggggatttggtatattattaaggtggtatttcgtttctgtgggaaaaggaaatttcattaacaggccaaatagtctggagtcattctgttagtgttagaatactaattccaccagttaatatctgtatgagttggacaaaccatataaccatctgttgccttccttgtttcctctttaaagtgtttaatccgcaaaacaaacctgataaagtgagattaaattgaatagtacctggcccaagtaagtgttcttcagtaaatgttagtgattattacacaatggcaaggtggctatccatttgaaaaaaaattaggccgggcgtggtggctcacacctgtaatcccaacactttgggaggccaaggtgggcggatcacctgaggtcaggagcccaagaccagcctgaccaacatggagaaaccccatctctactaaaaatacaaaaaaacaattaggcaggcatggtggcaaatgcctgtattcccagctactctggaggctgaggcaggagaacgcttgaacctgggagatggaggttgtgatgagccgagatcatgccattgcactcattccagcctgggcaacaagagtgaaactctgtctcaaaaaaaaaaaaaaaaaaagagagagagaaaaaaattagtttcctacttcacatgattcataaaaatatttcaagtggatcaaagacctaaattttttttttttttgagacagtttctcactctgtcacccaggctgcagtgcgttggcacaatcatgactcactgcagccttgaccttcccaggccctgatgatccaccccagcctctcaagtagctgggatttttgtatttcttacagagatgggattttgccttattgcccaccttggccttctaaagtattgggattatgggcatgagccactgcacccaccctaaacttatttctaagctatggaagcattaggaaaataaatgtaaagaaaaacgtgtttatcacctttggatagaattcttaagcagaatctaaaaagattgaagagtttgaatatattaaaattatagatttctgtgcaagacactcccctcccctaaaaaacaagtgactgatgagattttccaatacatgtaacaagggtttagagaaatgagtactgatgtcatgctgacagaagtgcaaatatttatggccattttttacagctgttgacaagatccactaaaataaaaattgcagatatcctgtga

SEQ ID NO: 133907 - DNA, 794 bp, Homo sapiens
  Payload ID: 6160
  Gene Symbol: FCF1
  Gene Name: FCF1 rRNA-processing protein
  ENST ID: ENST00000534938
  CDS Start-End: 124-684
acggaagaaccaggagtttggcgtgaccatggtgagagaagacggtccaagaagggacgttatcaggccactttttgggtggagaaggaggggaagcaaaagaaaacaaggaagtatgcgaccatgaagcgaatgcttagtctcagagatcagaggcttaaagaaaaggatagattaaaacctaaaaagaaagaaaagaaggatcccagcgcattaaaggaaagagaagttccccaacacccttcctgcttatttttccaatataatacacagctgggcccaccttaccacatcctcgttgataccaactttatcaacttttccataaaagccaaactggacttagtgcagtcaatgatggactgtctgtatgccaagtgtatcccatgtataaccgattgtgtaatggctgaaattgagaaattggggcagaagtatcgagtggctctaaggattgccaaggatccaagatttgaacgattaccatgtacacacaaaggaacctatgcagatgactgcttagtacagagagtaactcagcataagtgttacattgtggccacagttgaccgggacctgaaaagaagaatccgtaagattcctggagttcctatcatgtacatttctaaccatagatacaacattgaacggatgccagatgattatggagcccctcgattctaattcttacaagacacagttcctctgcctttcttcgaccaactttctcttgttgccagttcattacacaaaatgtagcgggatttttaaggaatcagagagactgatggagt

SEQ ID NO: 133908 - DNA, 574 bp, Homo sapiens
  Payload ID: 6160
  Gene Symbol: FCF1
  Gene Name: FCF1 rRNA-processing protein
  ENST ID: ENST00000554590
  CDS Start-End: 390-574
gtagaagtattgcgccgttggtgattacggaagaaccaggagtttggcgtgaccatggggaagcaaaagaaaacaaggaagtatgcgaccatgaagcgaatgcttagtctcagagatcagaggctgtgagtgtctggaatcaactgcccagggatattctaataagagtctagagaggataagtagtaaaaattaaagaaaaggatagattaaaacctaaaaagaaagaaaagaaggatcccagcgcattaaaggaaagagaagttccccaacacccttcctgcttatttttccaatataatacacagctgggcccaccttaccacatcctcgttgataccaactttatcaacttttccataaaagccaaactggacttagtgcagtcaatgatggactgtctgtatgccaagtgtatcccatgtataaccgattgtgtaatggctgaaattgagaaattggggcagaagtatcgagtggctctaaggattgccaaggatccaagatttgaacgattaccatgtacacacaaaggaacctatgcagatgactgcttagtacagagagtaactca

SEQ ID NO: 133909 - DNA, 571 bp, Homo sapiens
  Payload ID: 6160
  Gene Symbol: FCF1
  Gene Name: FCF1 rRNA-processing protein
  ENST ID: ENST00000556814
  CDS Start-End: 31-228
ttacggaagaaccaggagtttggcgtgaccatggggaagcaaaagaaaacaaggaagtatgcgaccatgaagcgaatgcttagtctcagagatcagaggcttaaagaaaaggatagattaaaacctaaaaagaaagaaaagaaggatcccagcgcattaaaggaaagagaagtctgggcccaccttaccacatcctcgttgataccaactttatcaacttttccataaaagccaaactggacttagtgcagtcaatgatggactgtctgtatgccaagtgtatcccatgtataaccgattgtgtaatggctgaaattgagaaattggggcagaagtatcgagtggctctaaggattgccaaggatccaagatttgaacgattaccatgtacacacaaaggaacctatgcagatgactgcttagtacagagagtaactcagcataagtgttacattgtggccacagttgaccgggacctgaaaagaagaatccgtaagattcctggagttcctatcatgtacatttctaaccatagatacaacattgaacggatgccagatgattatggagc

SEQ ID NO: 133910 - DNA, 547 bp, Homo sapiens
  Payload ID: 6160
  Gene Symbol: FCF1
  Gene Name: FCF1 rRNA-processing protein
  ENST ID: ENST00000553673
  CDS Start-End: 90-212
agagaagacggtccaagaagggacgttatcaggccactttttgggtggagaaggaggggaagcaaaagaaaacaaggaagtatgcgaccatgaagcgaatgcttagtctcagagatcagaggcttaaagaaaaggatagattaaaacctaaaaagaaagaaaagaaggatcccagcgcattaaaggaaagagaagtgatttatttccaatgaacatggacaaaagagtttacagcaaacagtcccaagcagacttcttttttgtttttgttaatactagggtatcaatgtaaatttttctttgttcttgttttctttttccttcagtccccaacacccttcctgcttatttttccaatataatacacagctgggcccaccttaccacatcctcgttgataccaactttatcaacttttccataaaagccaaactggacttagtgcagtcaatgatggactgtctgtatgccaagtgtatcccatgtataaccgattgtgtaatggctgaaattgagaaattggggcagaagtatcgagtggctctaa

SEQ ID NO: 133911 - DNA, 605 bp, Homo sapiens
  Payload ID: 6160
  Gene Symbol: FCF1
  Gene Name: FCF1 rRNA-processing protein
  ENST ID: ENST00000554064
  CDS Start-End: 29-187
acggaagaaccaggagtttggcgtgaccatggggaagcaaaagaaaacaaggaagtatgcgaccatgaagcgaatgcttagtctcagagatcagaggcttaaagaaaaggatagattaaaacctaaaaagaaagaaaagaaggatcccagcgcattaaaggaaagagaagtgatttatttccaatgaacatggacaaaagagtttacagcaaacagtcccaagcagacttcttttttgtttttgttaatactagggtatcaatgtaaatttttctttgttcttgttttctttttccttcagtccccaacacccttcctgcttatttttccaatataatacacagctgggcccaccttaccacatcctcgttgataccaactttatcaacttttccataaaagccaaactggacttagtgcagtcaatgatggactgtctgtatgccaagtgtatcccatgtataaccgattgtgtaatggctgaaattgagaaattggggcagaagtatcgagtggctctaaggattgccaaggatccaagatttgaacgattaccatgtacacacaaaggaacctatgcagatgactgcttagtacagagagta

SEQ ID NO: 133912 - DNA, 954 bp, Homo sapiens
  Payload ID: 6160
  Gene Symbol: FCF1
  Gene Name: FCF1 rRNA-processing protein
  ENST ID: ENST00000553615
  CDS Start-End: 29-580
acggaagaaccaggagtttggcgtgaccatggggaagcaaaagaaaacaaggaataaagaaaaggatagattaaaacctaaaaagaaagaaaagaaggatcccagcgcattaaaggaaagagaagttccccaacacccttcctgcttatttttccaatataatacacagctgggcccaccttaccacatcctcgttgataccaactttatcaacttttccataaaagccaaactggacttagtgcagtcaatgatggactgtctgtatgccaagtgtatcccatgtataaccgattgtgtaatggctgaaattgagaaattggggcagaagtatcgagtggctctaaggattgccaaggatccaagatttgaacgattaccatgtacacacaaaggaacctatgcagatgactgcttagtacagagagtaactcagcataagtgttacattgtggccacagttgaccgggacctgaaaagaagaatccgtaagattcctggagttcctatcatgtacatttctaaccatagatacaacattgaacggatgccagatgattatggagcccctcgattctaattcttacaagacacagttcctctgcctttcttcgaccaactttctcttgttgccagttcattacacaaaatgtagcgggatttttaaggaatcagagagactgatggagttcagggagatatttattatttaggtgcaccagcccagtcagattaacatccaaaggactgaaccctgaacagagttaagttaccttttaagcattttgtggggccgcgggggttggggggaatctgtgcagggggaagcatattacagaagcaagaaagacagttattcaattaactgagacatgcattacatcatttcttacttttcaaggaaaatcatgttttacgacttgagtttatctgtctagttaccttgcagctgca

SEQ ID NO: 133913 - DNA, 4320 bp, Homo sapiens
  Payload ID: 6161
  Gene Symbol: FCHSD1
  Gene Name: FCH and double SH3 domains 1
  Uniprot ID: Q86WN1
  ENST ID: ENST00000435817
  CDS Start-End: 52-2124
ggcttcctccagttccggagtccagtggctgaccgccttgctggagcggagatgcagccgccgccccgaaaagtgaagccggcccaggaggtgaagcttcgcttcctggaacagctgagcatccttcagacctggcagcagagggaggcggatctgctggaggacatcagatcctacagcaagcagagggcagccattgaacgggagtatgggcaggcactccagaaactggctggcccattcctgaagagggaagggcaccggagcggtgagatggacagcaggggcaggacagtgttcggtgcctggcgctgcctgctggatgccaccgtggctgggggccaaacccgactccaggcgtctgaccgataccgtgacctagcagggggtacagggcggagcgccaaggagcaggtgcttaggaagggaacagagaacctccagagggcgcaggctgaggtgctgcagtctgtccgggagctgagccgaagtcggaagctgtatgggcagcgggaacgtgtgtgggccttggcacaggagaaggcggctgatgtccaggccaggctaaaccgaagtgaccatgggatcttccactctcggaccagtctccagaaactgagcaccaagctgtccgcccagtcagcccagtactcccagcagctgcaagcagcccgcaatgagtacctgcttaacttggtggctaccaatgcccacctcgaccattactaccaggaggaactgccagctctgctcaaggccctggtcagtgagctgtcagagcacttgagggaccccctgacctccctgagccacactgagctggaagccgcagaggtcatcctggagcatgcccaccgcggggagcagacaacctcccaggtaagctgggagcaagacctgaagctgtttcttcaggagcctggtgtattttcccccaccccacctcagcagtttcagccagcagggactgatcaggtgtgtgtcctggagtggggagcagaaggcgtggctggcaagagtggcctggagaaagaggttcagcgcttgaccagccgagctgcccgtgactacaagatccagaaccatgggcatcgggtactgcaacgactggagcagaggcggcagcaggcttcagagcgggaggctccaagcatagaacagaggttacaggaagtgcgagagagcatccgccgggcacaggtgagccaggtgaagggggctgcccggctggccctgctgcagggggctggcttagatgtggagcgctggctgaagccagccatgacccaggcccaggatgaggtggagcaggagcggcggctcagtgaggctcggctgtcccagagggacctctctccaaccgctgaggatgctgagctttctgactttgaggaatgtgaggagacgggagagctctttgaggagcctgccccccaagccctggccacgagggccctcccctgccctgcacacgtggtatttcgctatcaggcagggcgtgaggatgagctgacaatcacggagggtgagtggctggaggtcatagaggagggagatgctgacgaatgggtcaaggctcggaaccagcacggcgaggtaggctttgtccctgagcgatatctcaacttcccggacctctccctcccagagagcagccaagacagtgacaatccctgcggggcagagcccacagcattcctggcacaggccctgtacagctacaccggacagagtgcagaggagctgagcttccctgagggggcactcatccgtctgctgccccgggcccaagatggagtagatgacggcttctggaggggagaatttgggggccgtgttggggtcttcccctccctgctggtggaagagctgcttggccccccagggccacctgaactctctgaccctgaacagatgctgccgtccccttctcctcccagcttctccccacctgcacctacctctgtgttggatgggccccctgcacctgtcctgcctggggacaaagccctggacttccctgggttcctggacatgatggcacctcgactcaggccgatgcgtccaccacctcccccgccggctaaagccccggatcctggccacccagatcccctcacctgaaggccagggaagccttgacccccagtgatgctgctgtccctatcttcaagctgtcagaccacaccatcaatgatccagagcaacacagccaaaagctggaatcgcccttatttccaccctcacctccaagggtggaaacttgccccttcccatttctagagctggaacccactcctttttttcccattgttctatcatctctaggaccggaactaccttctcttctgtcatgaccctatctagggtggtgaaatgcctgaaatctctggggctggaaaccatccatcaaggtctctagtagttctggcccacctctttccccaccctggctccatgacccaccccactctggatgccagggtcactggggttgggctggggagaggaacaggccttgggaatcaggagctggagccaggatgcgaagcagctgtaatggtctgagcggatttattgacaatgaataaagggcacgaaggccaggccagggcctgggcctcttgtgctaagagggcagggggcctacggtgctattgctttaggggcccaccacgggcaggggcctgctcccagctgccacgctctatcatatggagcgaggtgttggggaaggcggggcaggcagcctgttgcaggcaggggaaggagaagagactgaggggctgtgacctctcctgaggcccccagcctgagactgtgcaactccaggtggaagtagagctggtccctcagctggggggcagtgctgtccagtggaggggagggctttcacgcccacccaccccctggccctgccagctggtagtccatcagcacaatgaaggagacttggagaagaggaagaataacactgttgcttcctgttcaagctgtgtccagcttttcccctggggctccaggaccttccctacctccaccaccaaaccaagggatttatagcaaaggctaagcctgcagtttactcggggggttcagggagccgaaaggcttaaatagtttaagtaggtgatgggaagatgagattacctcatttagggctcaggcagactcacctcacatactccctgctccctgtggtagagacacctgagagaaaggggaggggtcaacaatgagagaccaggagtaggtcctatcagtgccccccagagtagagagcaataagagcccagcccagtgcagtcccggctgtgttttcctacctggtgatcagaagtgtctggtttgcttggctgcccatttgcctcttgagtgggcagccctgggcttgggcccctccctccggccctcagtgttggctctgcagaagctctggggttcccttcaagtgcacgaggggttaggctgctgtccctgagtcctccattctgtactggggggctggctaggacctggggctgtggcctctcagggggcagcctctccatggcaggcatccctgccttgggctgccctcccccagacccctgaccaccccctgggtcctgtcccccaccagagccccagctcctgtctgtgggggagccatcacggtgttcgtgcagtccatagcgcttctcaatgtgtgtcacccggaacctgggaggggagggaacactggggtttaggaccacaactcagaggctgcttggccctcccctctgaccagggacatcctgagtttggtggctacttccctctggcctaaggtaggggaggccttctcagattgtggggcacattgtgtagcctgacttctgccggagctcccagtccaggaggaaagagccaaggcccacttttgggatcaggtgcctgatcactgggccccctacctcagcccccctttccctggagcacctgccccacctgcccacagagaacacagtggtctcccctgtccgggggcggctttttccttccttggagcgtccctgacggacaagtggaggcctcttgctgcggctgcaatggaggcaaggggctgcagagcccaggtgcactgtgtgatgatgggagggggctccgtcctgcaggctggaggtggcatccacactggacagcagggaggaggggagtgagggtaacatttccatttcccttcatgttttgtttcttacgttctttcagcatgctccttaaaaccccagaagccccaatttccccaagccccattttttcttgtctttatctaataaactcaatattaagatgtta

SEQ ID NO: 133914 - DNA, 2577 bp, Homo sapiens
  Payload ID: 6161
  Gene Symbol: FCHSD1
  Gene Name: FCH and double SH3 domains 1
  Uniprot ID: Q86WN1
  ENST ID: ENST00000522126
  CDS Start-End: 202-1431
gtgaagccggcccaggaggtgaagcttcgcttcctggaacagctgagcatccttcagacctggcagcagagggaggcggatctgctggaggacatcagatcctacagcaagcagagggcagccattgaacgggagtatgggcaggcactccagaaactggctggcccattcctgaagagggaagggcaccggagcggtgagatggacagcaggacagtgttcggtgcctggcgctgcctgctggatgccaccgtggctgggggccaaacccgactccaggcgtctgaccgataccgtgacctagcagggggtacagggcggagcgccaaggagcaggtgcttaggaagggaacagagaacctccagagggcgcaggctgaggtgctgcagtctgtccgggagctgagccgaagtcggaagctgtatgggcagcgggaacgtgtgtgggccttggcacaggagaaggcggctgatgtccaggccaggctaaaccgaagtgaccatgggatcttccactctcggaccagtctccagaaactgagcaccaagctgtccgcccagtcagcccagtactcccagcagctgcaagcagcccgcaatgagtacctgcttaacttggtggctaccaatgcccacctcgaccattactaccaggaggaactgccagctctgctcaaggccctggtcagtgagctgtcagagcacttgagggaccccctgacctccctgagccacactgagctggaagccgcagaggtcatcctggagcatgcccaccgcggggagcagacaacctcccaggtaagctgggagcaagacctgaagctgtttcttcaggagcctggtgtattttcccccaccccacctcagcagtttcagccagcagggactgatcaggtgtgtgtcctggagtggggagcagaaggcgtggctggcaagagtggcctggagaaagaggttcagcgcttgaccagccgagctgcccgtgactacaagatccagaaccatgggcatcgggtactgcaacgactggagcagaggcggcagcaggcttcagagcgggaggctccaagcatagaacagaggttacaggaagtgcgagagagcatccgccgggcacaggtgagccaggtgaagggggctgcccggctggccctgctgcagggggctggcttagatgtggagcgctggctgaagccagccatgacccaggcccaggatgaggtggagcaggagcggcggctcagtgaggctcggctgtcccagagggacctctctccaaccgctgaggatgctgagctttctgactttgaggaatgtgaggagacgggagagctctttgaggagcctgccccccaagccctggccacgagggccctcccctgccctgcacacgtggtatttcgctatcagggcgtgaggatgagctgacaatcacggagggtgagtggctggaggtcatagaggagggagatgctgacgaatgggtcaaggctcggaaccagcacggcgaggtaggctttgtccctgagcgatatctcaacttcccggacctctccctcccagagagcagccaagacagtgacaatccctgcggggcagagcccacagcattcctggcacaggccctgtacagctacaccggacagagtgcagaggagctgagcttccctgagggggcactcatccgtctgctgccccgggcccaagatggagtagatgacggcttctggaggggagaatttgggggccgtgttggggtcttcccctccctgctggtggaagagctgcttggccccccagggccacctgaactctctgaccctgaacagattcaggaggtacatgtgcttgtttgtcatatggatatattgcatactggtggagattgggcttctagtgtacctgtaactcaaatagtgaacattgtacctgatagacaaagccctggacttccctgggttcctggacatgatggcacctcgactcaggccgatgcgtccaccacctcccccgccggctaaagccccggatcctggccacccagatcccctcacctgaaggccagggaagccttgacccccagtgatgctgctgtccctatcttcaagctgtcagaccacaccatcaatgatccagagcaacacagccaaaagctggaatcgcccttatttccaccctcacctccaagggtggaaacttgccccttcccatttctagagctggaacccactcctttttttcccattgttctatcatctctaggaccggaactaccttctcttctgtcatgaccctatctagggtggtgaaatgcctgaaatctctggggctggaaaccatccatcaaggtctctagtagttctggcccacctctttccccaccctggctccatgacccaccccactctggatgccagggtcactggggttgggctggggagaggaacaggccttgggaatcaggagctggagccaggatgcgaagcagctgtaatggtctgagcggatttattgacaatgaataaagggcacgaaggccaggccagggcctgggcctcttgtgctaagagggca

SEQ ID NO: 133915 - DNA, 2477 bp, Homo sapiens
  Payload ID: 6161
  Gene Symbol: FCHSD1
  Gene Name: FCH and double SH3 domains 1
  ENST ID: ENST00000522783
  CDS Start-End: 9-1805
gagcggagatgcagccgccgccccgaaaagtgaagccggcccaggaggtgaagcttcgcttcctggaacagctgagcatccttcagacctggcagcagagggaggcggatctgctggaggacatcagatcctacagcaagcagagggcagccattgaacgggagtatgggcaggcactccagaaactggctggcccattcctgaagagggaagggcaccggagcggtgagatggacagcaggacagtgttcggtgcctggcgctgcctgctggatgccaccgtggctgggggccaaacccgactccaggcgtctgaccgataccgtgacctagcagggggtacagggcggagcgccaaggagcaggtgcttaggaagggaacagagaacctccagagggcgcaggctgaggtgctgcagtctgtccgggagctgagccgaagtcggaagctgtatgggcagcgggaacgtgtgtgggccttggcacaggagaaggcggctgatgtccaggccaggctaaaccgaagtgaccatgggatcttccactctcggaccagtctccagaaactgagcaccaagctgtccgcccagtcagcccagtactcccagcagctgcaagcagcccgcaatgagtacctgcttaacttggtggctaccaatgcccacctcgaccattactaccaggaggaactgccagctctgctcaaggccctggtcagtgagctgtcagagcacttgagggaccccctgacctccctgagccacactgagctggaagccgcagaggtcatcctggagcatgcccaccgcggggagcagacaacctcccaggtaagctgggagcaagacctgaagctgtttcttcaggagcctggtgtattttcccccaccccacctcagcagtttcagccagcagggactgatcaggtgtgtgtcctggagtggggagcagaaggcgtggctggcaagagtggcctggagaaagaggttcagcgcttgaccagccgagctgcccgtgactacaagatccagaaccatgggcatcgggagcggcggctcagtgaggctcggctgtcccagagggacctctctccaaccgctgaggatgctgagctttctgactttgaggaatgtgaggagacgggagagctctttgaggagcctgccccccaagccctggccacgagggccctcccctgccctgcacacgtggtatttcgctatcaggcagggcgtgaggatgagctgacaatcacggagggtgagtggctggaggtcatagaggagggagatgctgacgaatgggtcaaggctcggaaccagcacggcgaggtaggctttgtccctgagcgatatctcaacttcccggacctctccctcccagagagcagccaagacagtgacaatccctgcggggcagagcccacagcattcctggcacaggccctgtacagctacaccggacagagtgcagaggagctgagcttccctgagggggcactcatccgtctgctgccccgggcccaagatggagtagatgacggcttctggaggggagaatttgggggccgtgttggggtcttcccctccctgctggtggaagagctgcttggccccccagggccacctgaactctctgaccctgaacagatgctgccgtccccttctcctcccagcttctccccacctgcacctacctctgtgttggatgggccccctgcacctgtcctgcctggggattcaggaggtacatgtgcttgtttgtcatatggatatattgcatactggtggagattgggcttctagtgtacctgtaactcaaatagtgaacattgtacctgatagacaaagccctggacttccctgggttcctggacatgatggcacctcgactcaggccgatgcgtccaccacctcccccgccggctaaagccccggatcctggccacccagatcccctcacctgaaggccagggaagccttgacccccagtgatgctgctgtccctatcttcaagctgtcagaccacaccatcaatgatccagagcaacacagccaaaagctggaatcgcccttatttccaccctcacctccaagggtggaaacttgccccttcccatttctagagctggaacccactcctttttttcccattgttctatcatctctaggaccggaactaccttctcttctgtcatgaccctatctagggtggtgaaatgcctgaaatctctggggctggaaaccatccatcaaggtctctagtagttctggcccacctctttccccaccctggctccatgacccaccccactctggatgccagggtcactggggttgggctggggagaggaacaggccttgggaatcaggagctggagccaggatgcgaagcagctgtaatggtctgagcggatttattgacaatgaataaagggcacgaaggccaggccagggcctgggcctcttgtgctaaga

SEQ ID NO: 133916 - DNA, 802 bp, Homo sapiens
  Payload ID: 6161
  Gene Symbol: FCHSD1
  Gene Name: FCH and double SH3 domains 1
  ENST ID: ENST00000519800
  CDS Start-End: 20-787
ccgccttgctggagcggagatgcagccgccgccccgaaaagtgaagccggcccaggaggtgaagcttcgcttcctggaacagctgagcatccttcagacctggcagcagagggaggcggatctgctggaggacatcagatcctacagcaagcagagggcagccattgaacgggagtatgggcaggcactccagaaactggctggcccattcctgaagagggaagggcaccggagcggtgagatggacagcaggacagtgttcggtgcctggcgctgcctgctggatgccaccgtggctgggggccaaacccgactccaggcgtctgaccgataccgtgacctagcagggggtacagggcggagcgccaaggagcaggtgcttaggaagggaacagagaacctccagagggcgcaggctgaggtgctgcagtctgtccgggagctgagccgaagtcggaagctgtatgggcagcgggaacgtgtgtgggccttggcacaggagaaggcggctgatgtccaggccaggctaaaccgaagtgaccatgggatcttccactctcggaccagtctccagaaactgagcaccaagctgtccgcccagtcagcccagtactcccagcagctgcaagcagcccgcaatgagtacctgcttaacttggtggctaccaatgcccacctcgaccattactaccaggaggaactgccagctctgctcaaggccagttttaacccagacacccctatccctcagcagggagggaaaggaggacctccccctgcttcttgatccccatgacagtgg

SEQ ID NO: 133917 - DNA, 714 bp, Homo sapiens
  Payload ID: 6161
  Gene Symbol: FCHSD1
  Gene Name: FCH and double SH3 domains 1
  ENST ID: ENST00000518499
  CDS Start-End: 81-714
cctctctggacttcaatttcctcatcactaaagtagggccaataatagcacccacctcatagggaagattaaatgacataatgtatgtgatgcaactagcaaagtaccagtcccatagtaagtcatgccccacagtatttccacccacccctgttctctgccttcccaaccaggtactgcaacgactggagcagaggcggcagcaggcttcagagcgggaggctccaagcatagaacagaggttacaggaagtgcgagagagcatccgccgggcacaggtgagccaggtgaagggggctgcccggctggccctgctgcagggggctggcttagatgtggagcgctggctgaagccagccatgacccaggcccaggatgaggtggagcaggagcggcggctcagtgaggctcggctgtcccagagggacctctctccaaccgctgaggatgctgagctttctgactttgaggaatgtgaggagacgggagagctctttgaggagcctgccccccaagccctggccacgagggccctcccctgccctgcacacgtggtatttcgctatcaggcagggcgtgaggatgagctgacaatcacggagggtgagtggctggaggtcatagaggagggagatgctgacgaatgggtcaaggctcggaaccagcacggcgaggtaggctttgtccctgagcgatatctcaacttcccggacc

SEQ ID NO: 133918 - DNA, 4340 bp, Homo sapiens
  Payload ID: 6162
  Gene Symbol: FCHSD2
  Gene Name: FCH and double SH3 domains 2
  Uniprot ID: O94868
  ENST ID: ENST00000311172
  CDS Start-End: 240-2294
gtccgcctgccgcccgctggcctgctccctccggggcaagtcttgcttcttaagcgctcctttcacacacgcgcgcgctcgctgggccgtcccctcctctccggccctcctcctcctcctggtccttgctaacgctgccgtcggggaggattgatgtcccttcagcatcatgcagccgccgccgaggaaggacattcagtcagaagaaggctgctattgaaagagagtatgcacagggtatgcagaagttggctagtcaatacctgaagagagattggcctggagtaaaagctgatgatcggaatgattacaggagcatgtatcccgtttggaaatcttttctcgagggaacaatgcaggtagcccagtctcggatgaatatatgtgaaaactataaaaacttcatttctgagcctgcaaggacagtgagaagcttaaaagaacagcaactaaaaaggtgtgtggaccagttgacaaagatccaaactgaattacaagagacagtgaaagatttagctaaaggcaaaaagaaatactttgagactgaacagatggctcatgcagtacgagagaaagctgacatcgaggcaaaatctaaacttagtctttttcaatcaagaatcagtttacagaaggcaagtgtaaagttaaaagcccggcgatctgagtgtaattccaaagctacccacgcaaggaatgattatcttcttaccctagcggcagcaaatgcacatcaggatcgctactatcaaacagatttagttaacattatgaaggctcttgatggaaatgtgtatgatcatctcaaggattatttaatagccttcagccggactgagctagaaacatgccaagctgtgcagaacacattccagtttttattagaaaactccagcaaggtggtccgggactacaatcttcagctgtttttgcaagaaaacgctgtatttcacaaaccccagcccttccagttccagccttgtgacagtgatactagccgacagttagaatcagaaactgggaccacagaggagcacagtctaaataaggaagctcgaaaatgggccacacgtgtggcacgtgagcataaaaacattgttcaccaacaacgggttctaaatgatctggagtgtcatggagctgctgtatcagaacaaagccgagcagagctagaacagaaaatagatgaagctagagaaaatattcgtaaagcagagataattaaattgaaagctgaagcccggttggacctgctaaagcagattggtgtttctgtggacacatggctaaagagtgccatgaaccaagtaatggaagaactggaaaatgagcgatgggcccgccctcctgcagtgaccagtaatggcactttacactcgcttaatgcagataccgaaagagaagaaggcgaagagtttgaagataacatggatgttttcgatgacagcagttccagcccttctggcaccttaagaaattatccactcacctgcaaagttgtttattcctacaaggcttctcaaccagatgagttgaccattgaggaacatgaggtgttagaagtgattgaagatggagatatggaagactgggtaaaggctcgaaataaagttggccaagtgggttatgtgccagaaaagtacctacagtttcccacctcgaacagcctcctgagcatgctgcagtccctggccgctttggacagtcggtcacacacgtccagcaattccacggaagcagaactcgtttcaggcagcctcaacggagatgccagtgtatgttttgtgaaagcactttatgattatgagggccagacagatgatgagttatcttttcctgagggagcaataatccgtatcttgaacaaagaaaaccaagatgatgatggcttctgggaaggggaattcaatgggcgtattggagttttcccatcggtgctagtggaagaactttcagcctcagaaaatggtgacactccatggatgagagagattcagatctctccttcccccaagccacacgcctccctgcctccactgccgttgtacgaccagcctcccagcagcccctaccccagcccagataagaggagctccctgtactttccccggtctccttcagcaaacgaaaaaagccttcatgctgagtcaccaggattctcacaggcatcaaggcatactcctgagacctcatatggcaaactgcgacctgtccgggcagctccccctccacctacacagaatcaccgaaggccagcagagaagattgaagatgtggaaatcacactggtgtgatgatgggcttgcccatccattactgctacaatcaaggccaggcttggagtttggccagtcttgttttttaggcacctttgcatgatgatgactcttgaacagagcaaaaaacaaggaggattatgtgtgactgggtggcctggtagactcctcccacgttttgaatatttcgtgccttttttttttgttgtcattttctatgtcatttctcctaccatagcacaaatcctagcggaccctaggagcaaagaggggggcagccctcatgcctaacagtggtctgtttttatatgagactcaagaacaggcctcattccagggcacagtccctaaattactgatcatgtgcactcgtacagtatattactgtgaccacaaggatgtggcaaagattctcatctttcttcaagtggcttttgctcatctgattgagaattaatcagatcatgttggctacataaggaaacagaaggagggatttcaggagaggctggctcctccccaaggttagtccccagactgagaaagtgaaaccttattgggaaaaattggactgccctgaatttagcaccaattgcattaacgcacatctcttccacaactaacagacttaaaataacagtgtccttcgtattaatatctgtgccattcatttagaattagcagagctaatatggaggggctgaactagtagccacatcttgttcatcacatagactaatagaaaggaggctgtggctaaagcagaaatggaacttccggatctgaaattagccaatataatgttcttttgtatttgggtatttttcatcttaatttttacagcatatactcttcttaccagtatccttagaatccaaatgtctagataagttgaggacacatacctgcattgttgagcttctctactggggacgccccggcattattttattcccaagccagcagaccggcccagacagccaggctgtggctggtccagaccaactgctatggtggaaaatgcagcttccaggtcccactaccctgacatttccgtggaaggaagaacctggtggctcgtggaggaaaccagctttctatgagaaaggactgaaggattgcgcaccctgcacaagtacagattgaccaggaaaagacaagtgtcttctgtgtgtcacagggaaagccaggagtggccttctctgcaggccagcaagcctgcagcagcaggtgcccccacgtcaggtgctgactgtctgctgtccgctcctgtagaaggtagggagcacaatacctagggactaagggatgttcgccggttgtggtttgttttttttttttttccttggttaagaaatcaaatttgcagaatttaatctacaagttgtattatgctttgaaaactccatccctcctaagaatcttaaaaaacttgaaatgctcgccaaatgtccccatgggatttttgaccaaaagtaaggtgataactgaagaaatttttagttctttgatcacttcagtgacaatacccattaatgaatcttctccatgatttggggttttttttcgttgttgttttttacacttcttaacctgttgatctatttgaggtcttttgtgtttatcaaacttattcttaagtttaaaaaagaaattaaaagggtggtttttttaagattttaaagtttgctaacatattaaaaatcttcaaatgcttattaaatagagcagttcttgccacccagtcttgtattctgtctttagctagccaaattgtccttgaatttgggttttccacaacctcaaagggttatttgaaatcttttgttgtattttaaaatattttttggaagagctgctaattttattttaaaaaacaaagttgtgaaaacatgcctcctttttaaaaaataacccctccatccaggatatggaatccagcaccacagtgcacaggtcagggctcggagggagcctctgtgcagatgtgctttctttacagtggctgtaaaaagtttgtatttattatgtataaaatgttgaataataaaaaaaatggaatta

SEQ ID NO: 133919 - DNA, 1867 bp, Homo sapiens
  Payload ID: 6162
  Gene Symbol: FCHSD2
  Gene Name: FCH and double SH3 domains 2
  Uniprot ID: O94868
  ENST ID: ENST00000409853
  CDS Start-End: 134-1681
aagcagaatgtgatttgcttgaagatatgaggacattcagtcagaagaaggctgctattgaaagagagtatgcacagtattccattgtatggatataccacagtttatccattttcctgttgatggacatggtatgcagaagttggctagtcaatacctgaagagagattggcctggagtaaaagctgatgatcggaatgattacaggagcatgtatcccgtttggaaatcttttctcgagggaacaatgcaggtagcccagtctcggatgaatatatgtgaaaactataaaaacttcatttctgagcctgcaaggacagtgagaagcttaaaagaacagcaactaaaaaggtgtgtggaccagttgacaaagatccaaactgaattacaagagacagtgaaagatttagctaaaggcaaaaagaaatactttgagactgaacagatggctcatgcagtacgagagaaagctgacatcgaggcaaaatctaaacttagtctttttcaatcaagaatcagtttacagaaggcaagtgtaaagttaaaagcccggcgatctgagtgtaattccaaagctacccacgcaaggaatgattatcttcttaccctagcggcagcaaatgcacatcaggatcgctactatcaaacagatttagttaacattatgaaggctcttgatggaaatgtgtatgatcatctcaaggattatttaatagccttcagccggactgagctagaaacatgccaagctgtgcagaacacattccagtttttattagaaaactccagcaaggtggtccgggactacaatcttcagctgtttttgcaagaaaacgctgtatttcacaaaccccagcccttccagttccagccttgtgacagtgatactagccgacagttagaatcagaaactgggaccacagaggagcacagtctaaataaggaagctcgaaaatgggccacacgtgtggcacgtgagcataaaaacattgttcaccaacaacgggttctaaatgatctggagtgtcatggagctgctgtatcagaacaaagccgagcagagctagaacagaaaatagatgaagctagagaaaatattcgtaaagcagagataattaaattgaaagctgaagcccggttggacctgctaaagcagattggtgtttctgtggacacatggctaaagagtgccatgaaccaagtaatggaagaactggaaaatgagcgatgggcccgccctcctgcagtgaccagtaatggcactttacactcgcttaatgcagataccgaaagagaagaaggcgaagagtttgaagataacatggatgttttcgatgacagcagttccagcccttctggcaccttaagaaattatccactcacctgcaaagttgtttattcctacaaggcttctcaaccagatgagttgaccattgaggaacatgaggtgttagaagtgattgaagatggagatatggaagactgggtaaaggctcgaaataaagttggccaagtgggttatgtgccagaaaagtacctacagtttcccacctcgaacagcctcctgagcatgctgcagtccctggccgctttggacagtcggtcacacacgtccagcaattccacggaagcagaactcgtttcaggcagcctcaacggagatgccagtggtaaagactgaaacaaggcactctttatttggtcacgtttgacctaaactgtattgccctggagtaagccttcagtaggataaaaagcacaactttcctcctgtcctataatatgcttttctttatatggtcacgtttgtcctgcacagtagaaccctaaagttaatcattcatcagtgagtaaaaaaattacaact

SEQ ID NO: 133920 - DNA, 3154 bp, Homo sapiens
  Payload ID: 6162
  Gene Symbol: FCHSD2
  Gene Name: FCH and double SH3 domains 2
  Uniprot ID: O94868
  ENST ID: ENST00000409418
  CDS Start-End: 385-2607
ggcggcgcaggcggccgaccgggagcgcggacaacgcggctgcggctaacccgccgcccggccggctgagaccctcgcgcccctgctcctggggcccccgccccctcgccgtctccgcctccttcctcacacacccccgggccgcccgggccgcccgggccccaagccttcccggtgctcctccctcgtctcctcacactcgctctctggctggggtccgcctgccgcccgctggcctgctccctccggggcaagtcttgcttcttaagcgctcctttcacacacgcgcgcgctcgctgggccgtcccctcctctccggccctcctcctcctcctggtccttgctaacgctgccgtcggggaggattgatgtcccttcagcatcatgcagccgccgccgaggaaggtgaaagttacacaagaactgaaaaacattcaagttgagcagatgacaaaacttcaagccaaacatcaagcagaatgtgatttgcttgaagatatgaggacattcagtcagaagaaggctgctattgaaagagagtatgcacagggtatgcagaagttggctagtcaatacctgaagagagattggcctggagtaaaagctgatgatcggaatgattacaggagcatgtatcccgtttggaaatcttttctcgagggaacaatgcaggtagcccagtctcggatgaatatatgtgaaaactataaaaacttcatttctgagcctgcaaggacagtgagaagcttaaaagaacagcaactaaaaaggtgtgtggaccagttgacaaagatccaaactgaattacaagagacagtgaaagatttagctaaaggcaaaaagaaatactttgagactgaacagatggctcatgcagtacgagagaaagctgacatcgaggcaaaatctaaacttagtctttttcaatcaagaatcagtttacagaaggcaagtgtaaagttaaaagcccggcgatctgagtgtaattccaaagctacccacgcaaggaatgattatcttcttaccctagcggcagcaaatgcacatcaggatcgctactatcaaacagatttagttaacattatgaaggctcttgatggaaatgtgtatgatcatctcaaggattatttaatagccttcagccggactgagctagaaacatgccaagctgtgcagaacacattccagtttttattagaaaactccagcaaggtggtccgggactacaatcttcagctgtttttgcaagaaaacgctgtatttcacaaaccccagcccttccagttccagccttgtgacagtgatactagccgacagttagaatcagaaactgggaccacagaggagcacagtctaaataaggaagctcgaaaatgggccacacgtgtggcacgtgagcataaaaacattgttcaccaacaacgggttctaaatgatctggagtgtcatggagctgctgtatcagaacaaagccgagcagagctagaacagaaaatagatgaagctagagaaaatattcgtaaagcagagataattaaattgaaagctgaagcccggttggacctgctaaagcagattggtgtttctgtggacacatggctaaagagtgccatgaaccaagtaatggaagaactggaaaatgagcgatgggcccgccctcctgcagtgaccagtaatggcactttacactcgcttaatgcagataccgaaagagaagaaggcgaagagtttgaagataacatggatgttttcgatgacagcagttccagcccttctggcaccttaagaaattatccactcacctgcaaagttgtttattcctacaaggcttctcaaccagatgagttgaccattgaggaacatgaggtgttagaagtgattgaagatggagatatggaagactgggtaaaggctcgaaataaagttggccaagtgggttatgtgccagaaaagtacctacagtttcccacctcgaacagcctcctgagcatgctgcagtccctggccgctttggacagtcggtcacacacgtccagcaattccacggaagcagaactcgtttcaggcagcctcaacggagatgccagtgtatgttttgtgaaagcactttatgattatgagggccagacagatgatgagttatcttttcctgagggagcaataatccgtatcttgaacaaagaaaaccaagatgatgatggcttctgggaaggggaattcaatgggcgtattggagttttcccatcggtgctagtggaagaactttcagcctcagaaaatggtgacactccatggatgagagagattcagatctctccttcccccaagccacacgcctccctgcctccactgccgttgtacgaccagcctcccagcagcccctaccccagcccagataagaggagctccctgtactttccccggtctccttcagcaaacgaaaaaagccttcatgctgagtcaccaggattctcacaggcatcaaggcatactcctgagacctcatatggcaaactgcgacctgtccgggcagctccccctccacctacacagaatcaccgaaggccagcagagaagattgaagatgtggaaatcacactggtgtgatgatgggcttgcccatccattactgctacaatcaaggccaggcttggagtttggccagtcttgttttttaggcacctttgcatgatgatgactcttgaacagagcaaaaaacaaggaggattatgtgtgactgggtggcctggtagactcctcccacgttttgaatatttcgtgccttttttttttgttgtcattttctatgtcatttctcctaccatagcacaaatcctagcggaccctaggagcaaagaggggggcagccctcatgcctaacagtggtctgtttttatatgagactcaagaacaggcctcattccagggcacagtccctaaattactgatcatgtgcactcgtacagtatattactgtgaccacaaggatgtggcaaagattctcatctttcttcaagtggcttttgctcatctgattgagaattaatcagatcatgttggctacataaggaaacagaaggagggatttcaggagaggctggctcctccccaaggttagtccccagactgagaaagtgaaaccttattgggaaaa

SEQ ID NO: 133921 - DNA, 932 bp, Homo sapiens
  Payload ID: 6162
  Gene Symbol: FCHSD2
  Gene Name: FCH and double SH3 domains 2
  ENST ID: ENST00000409263
  CDS Start-End: 235-540
tgaccattgaggaacatgaggtgttagaagtgattgaagatggagatatggaagactgggtaaaggctcgaaataaagttggccaagtgggttatgtgccagaaaagtacctacagtttcccacctcgaacagcctcctgagcatgctgcagtccctggccgctttggacagtcggtcacacacgtccagcaattccacggaagcagaactcgtttcaggcagcctcaacggagatgccagtgatctctccttcccccaagccacacgcctccctgcctccactgccgttgtacgaccagcctcccagcagcccctaccccagcccagataagaggagctccctgtactttccccggtctccttcagcaaacgaaaaaagccttcatgctgagtcaccaggattctcacaggcatcaaggcatactcctgagacctcatatggcaaactgcgacctgtccgggcagctccccctccacctacacagaatcaccgaaggccagcagagaagattgaagatgtggaaatcacactggtgtgatgatgggcttgcccatccattactgctacaatcaaggccaggcttggagtttggccagtcttgttttttaggcacctttgcatgatgatgactcttgaacagagcaaaaaacaaggaggattatgtgtgactgggtggcctggtagactcctcccacgttttgaatatttcgtgccttttttttttgttgtcattttctatgtcatttctcctaccatagcacaaatcctagcggaccctaggagcaaagaggggggcagccctcatgcctaacagtggtctgtttttatatgagactcaagaacaggcctcattccagggcacagtccctaaattactgatcatgtgcactcgtacagtatattactgtgaccacaaggatgtggcaaaga

SEQ ID NO: 133922 - DNA, 4509 bp, Homo sapiens
  Payload ID: 6162
  Gene Symbol: FCHSD2
  Gene Name: FCH and double SH3 domains 2
  ENST ID: ENST00000409314
  CDS Start-End: 170-2464
gtccgcctgccgcccgctggcctgctccctccggggcaagtcttgcttcttaagcgctcctttcacacacgcgcgcgctcgctgggccgtcccctcctctccggccctcctcctcctcctggtccttgctaacgctgccgtcggggaggattgatgtcccttcagcatcatgcagccgccgccgaggaaggtgaaagttacacaagaactgaaaaacattcaagttgagcagatgacaaaacttcaagccaaacatcaagcagaatgtgatttgcttgaagatatgaggacattcagtcagaagaaggctgctattgaaagagagtatgcacagggtatgcagaagttggctagtcaatacctgaagagagattggcctggagtaaaagctgatgatcggaatgattacaggagcatgtatcccgtttggaaatcttttctcgagggaacaatgcaggtagcccagtctcggatgaatatatgtgaaaactataaaaacttcatttctgagcctgcaaggacagtgagaagcttaaaagaacagcaactaaaaaggtgtgtggaccagttgacaaagatccaaactgaattacaagagacagtgaaagatttagctaaaggcaaaaagaaatactttgagactgaacagatggctcatgcagtacgagagaaagctgacatcgaggcaaaatctaaacttagtctttttcaatcaagaatcagtttacagaaggcaagtgtaaagttaaaagcccggcgatctgagtgtaattccaaagctacccacgcaaggaatgattatcttcttaccctagcggcagcaaatgcacatcaggatcgctactatcaaacagatttagttaacattatgaaggctcttgatggaaatgtgtatgatcatctcaaggattatttaatagccttcagccggactgagctagaaacatgccaagctgtgcagaacacattccagtttttattagaaaactccagcaaggtggtccgggactacaatcttcagctgtttttgcaagaaaacgctgtatttcacaaaccccagcccttccagttccagccttgtgacagtgatactagtttaaaagccgcccaactggtggatattgagctctcccctgtcagtgctctgagaatgaccatagctgagagccgacagttagaatcagaaactgggaccacagaggagcacagtctaaataaggaagctcgaaaatgggccacacgtgtggcacgtgagcataaaaacattgttcaccaacaacgggttctaaatgatctggagtgtcatggagctgctgtatcagaacaaagccgagcagagctagaacagaaaatagatgaagctagagaaaatattcgtaaagcagagataattaaattgaaagctgaagcccggttggacctgctaaagcagattggtgtttctgtggacacatggctaaagagtgccatgaaccaagtaatggaagaactggaaaatgagcgatgggcccgccctcctgcagtgaccagtaatggcactttacactcgcttaatgcagataccgaaagagaagaaggcgaagagtttgaagataacatggatgttttcgatgacagcagttccagcccttctggcaccttaagaaattatccactcacctgcaaagttgtttattcctacaaggcttctcaaccagatgagttgaccattgaggaacatgaggtgttagaagtgattgaagatggagatatggaagactgggtaaaggctcgaaataaagttggccaagtgggttatgtgccagaaaagtacctacagtttcccacctcgaacagcctcctgagcatgctgcagtccctggccgctttggacagtcggtcacacacgtccagcaattccacggaagcagaactcgtttcaggcagcctcaacggagatgccagtgtatgttttgtgaaagcactttatgattatgagggccagacagatgatgagttatcttttcctgagggagcaataatccgtatcttgaacaaagaaaaccaagatgatgatggcttctgggaaggggaattcaatgggcgtattggagttttcccatcggtgctagtggaagaactttcagcctcagaaaatggtgacactccatggatgagagagattcagatctctccttcccccaagccacacgcctccctgcctccactgccgttgtacgaccagcctcccagcagcccctaccccagcccagataagaggagctccctgtactttccccggtctccttcagcaaacgaaaaaagccttcatgctgagtcaccaggattctcacaggcatcaaggcatactcctgagacctcatatggcaaactgcgacctgtccgggcagctccccctccacctacacagaatcaccgaaggccagcagagaagattgaagatgtggaaatcacactggtgtgatgatgggcttgcccatccattactgctacaatcaaggccaggcttggagtttggccagtcttgttttttaggcacctttgcatgatgatgactcttgaacagagcaaaaaacaaggaggattatgtgtgactgggtggcctggtagactcctcccacgttttgaatatttcgtgccttttttttttgttgtcattttctatgtcatttctcctaccatagcacaaatcctagcggaccctaggagcaaagaggggggcagccctcatgcctaacagtggtctgtttttatatgagactcaagaacaggcctcattccagggcacagtccctaaattactgatcatgtgcactcgtacagtatattactgtgaccacaaggatgtggcaaagattctcatctttcttcaagtggcttttgctcatctgattgagaattaatcagatcatgttggctacataaggaaacagaaggagggatttcaggagaggctggctcctccccaaggttagtccccagactgagaaagtgaaaccttattgggaaaaattggactgccctgaatttagcaccaattgcattaacgcacatctcttccacaactaacagacttaaaataacagtgtccttcgtattaatatctgtgccattcatttagaattagcagagctaatatggaggggctgaactagtagccacatcttgttcatcacatagactaatagaaaggaggctgtggctaaagcagaaatggaacttccggatctgaaattagccaatataatgttcttttgtatttgggtatttttcatcttaatttttacagcatatactcttcttaccagtatccttagaatccaaatgtctagataagttgaggacacatacctgcattgttgagcttctctactggggacgccccggcattattttattcccaagccagcagaccggcccagacagccaggctgtggctggtccagaccaactgctatggtggaaaatgcagcttccaggtcccactaccctgacatttccgtggaaggaagaacctggtggctcgtggaggaaaccagctttctatgagaaaggactgaaggattgcgcaccctgcacaagtacagattgaccaggaaaagacaagtgtcttctgtgtgtcacagggaaagccaggagtggccttctctgcaggccagcaagcctgcagcagcaggtgcccccacgtcaggtgctgactgtctgctgtccgctcctgtagaaggtagggagcacaatacctagggactaagggatgttcgccggttgtggtttgttttttttttttttccttggttaagaaatcaaatttgcagaatttaatctacaagttgtattatgctttgaaaactccatccctcctaagaatcttaaaaaacttgaaatgctcgccaaatgtccccatgggatttttgaccaaaagtaaggtgataactgaagaaatttttagttctttgatcacttcagtgacaatacccattaatgaatcttctccatgatttggggttttttttcgttgttgttttttacacttcttaacctgttgatctatttgaggtcttttgtgtttatcaaacttattcttaagtttaaaaaagaaattaaaagggtggtttttttaagattttaaagtttgctaacatattaaaaatcttcaaatgcttattaaatagagcagttcttgccacccagtcttgtattctgtctttagctagccaaattgtccttgaatttgggttttccacaacctcaaagggttatttgaaatcttttgttgtattttaaaatattttttggaagagctgctaattttattttaaaaaacaaagttgtgaaaacatgcctcctttttaaaaaataacccctccatccaggatatggaatccagcaccacagtgcacaggtcagggctcggagggagcctctgtgcagatgtgctttctttacagtggctgtaaaaagtttgtatttattatgtataaaatgttgaataataaaaaaaatggaatt

SEQ ID NO: 133923 - DNA, 2215 bp, Homo sapiens
  Payload ID: 6162
  Gene Symbol: FCHSD2
  Gene Name: FCH and double SH3 domains 2
  ENST ID: ENST00000458644
  CDS Start-End: 372-2186
gctgccgtcggggaggattgatgtcccttcagcatcatgcagccgccgccgaggaaggtgaaagttacacaagaactgaaaaacattcaagttgagcagatgacaaaacttcaagccaaacatcaagcagaatgtgatttgcttgaagatatgaggacattcagtcagaagaaggctgctattgaaagagagtatgcacagggtatgcagaagttggctagtcaatacctgaagagagattggcctggagtaaaagctgatgatcggaatgattacagtgtgtggaccagttgacaaagatccaaactgaattacaagagacagtgaaagatttagctaaaggcaaaaagaaatactttgagactgaacagatggctcatgcagtacgagagaaagctgacatcgaggcaaaatctaaacttagtctttttcaatcaagaatcagtttacagaaggcaagtgtaaagttaaaagcccggcgatctgagtgtaattccaaagctacccacgcaaggaatgattatcttcttaccctagcggcagcaaatgcacatcaggatcgctactatcaaacagatttagttaacattatgaaggctcttgatggaaatgtgtatgatcatctcaaggattatttaatagccttcagccggactgagctagaaacatgccaagctgtgcagaacacattccagtttttattagaaaactccagcaaggtggtccgggactacaatcttcagctgtttttgcaagaaaacgctgtatttcacaaaccccagcccttccagttccagccttgtgacagtgatactagtttaaaagccgcccaactggtggatattgagctctcccctgtcagtgctctgagaatgaccatagctgagagccgacagttagaatcagaaactgggaccacagaggagcacagtctaaataaggaagctcgaaaatgggccacacgtgtggcacgtgagcataaaaacattgttcaccaacaacgggttctaaatgatctggagtgtcatggagctgctgtatcagaacaaagccgagcagagctagaacagaaaatagatgaagctagagaaaatattcgtaaagcagagataattaaattgaaagctgaagcccggttggacctgctaaagcagattggtgtttctgtggacacatggctaaagagtgccatgaaccaagtaatggaagaactggaaaatgagcgatgggcccgccctcctgcagtgaccagtaatggcactttacactcgcttaatgcagataccgaaagagaagaaggcgaagagtttgaagataacatggatgttttcgatgacagcagttccagcccttctggcaccttaagaaattatccactcacctgcaaagttgtttattcctacaaggcttctcaaccagatgagttgaccattgaggaacatgaggtgttagaagtgattgaagatggagatatggaagactgggtaaaggctcgaaataaagttggccaagtgggttatgtgccagaaaagtacctacagtttcccacctcgaacagcctcctgagcatgctgcagtccctggccgctttggacagtcggtcacacacgtccagcaattccacggaagcagaactcgtttcaggcagcctcaacggagatgccagtgtatgttttgtgaaagcactttatgattatgagggccagacagatgatgagttatcttttcctgagggagcaataatccgtatcttgaacaaagaaaaccaagatgatgatggcttctgggaaggggaattcaatgggcgtattggagttttcccatcggtgctagtggaagaactttcagcctcagaaaatggtgacactccatggatgagagagattcagatctctccttcccccaagccacacgcctccctgcctccactgccgttgtacgaccagcctcccagcagcccctaccccagcccagataagaggagctccctgtactttccccggtctccttcagcaaacgaaaaaagccttcatgctgagtcaccaggattctcacaggcatcaaggcatactcctgagacctcatatggcaaactgcgacctgtccgggcagctccccctccacctacacagaatcaccgaaggccagcagagaagattgaagatgtggaaatcacactggtgtgatgatgggcttgcccatccattactgctac

SEQ ID NO: 133924 - DNA, 578 bp, Homo sapiens
  Payload ID: 6162
  Gene Symbol: FCHSD2
  Gene Name: FCH and double SH3 domains 2
  ENST ID: ENST00000432043
  CDS Start-End: 1-352
ggttctaaatgatctggagtgtcatggagctgctgtatcagaacaaagccgagcagagctagaacagaaaatagatgaagctagagaaaatattcgtaaagcagagataattaaattgaaagctgaagcccggttggacctgctaaagcagattggtgtttctgtggacacatggctaaagagtgccatgaaccaagtaatggaagaactggaaaatgagcgatgggcccgccctcctgcagtgaccagtaatggcactttacactcgataccgaaagagaagaaggcgaagagtttgaagataacatggatgttttcgatgacagcagttccagcccttctggcaccttaagaaattatccactcacctgcaaagttgtttattcctacaaggcttctcaaccagatgagttgaccattgaggaacatgaggtgttagaagtgattgaagatggagatatggaagactgggtaaaggctcgaaataaagttggccaagtgggttatgtgccagaaaagtacctacagtttcccacctcgaacagcctcctgagcatgctgcagtccctggccgcttt

SEQ ID NO: 133925 - DNA, 587 bp, Homo sapiens
  Payload ID: 6162
  Gene Symbol: FCHSD2
  Gene Name: FCH and double SH3 domains 2
  ENST ID: ENST00000422375
  CDS Start-End: 167-587
tagtcaccgcctccccaccccaagggaaaacaaattaaggattgacgggtcctgcctcgtccccggctgaggggcgaggaggctgtcgtgctgtcttcagaaaagcgaggaccgggcccgggaggtgaaagttacacaagaactgaaaaacattcaagttgagcagatgacaaaacttcaagccaaacatcaagcagaatgtgatttgcttgaagatatgaggacattcagtcagaagaaggctgctattgaaagagagtatgcacagggtatgcagaagttggctagtcaatacctgaagagagattggcctggagtaaaagctgatgatcggaatgattacaggagcatgtatcccgtttggaaatcttttctcgagggaacaatgcaggtagcccagtctcggatgaatatatgtgaaaactataaaaacttcatttctgagcctgcaaggacagtgagaagcttaaaagaacagcaactaaaaaggtgtgtggaccagttgacaaagatccaaactgaattacaagagacagtgaaagatttagctaaaggcaaaaagaaatactttgagactgaacagatgg

SEQ ID NO: 133926 - DNA, 321 bp, Homo sapiens
  Payload ID: 6162
  Gene Symbol: FCHSD2
  Gene Name: FCH and double SH3 domains 2
  ENST ID: ENST00000543644
  CDS Start-End: 1-257
ctgaacagatggctcatgcagtacgagagaaagctgacatcgaggcaaaatctaaacttagtctttttcaatcaagaatcagtttacagaaggcaagtgtaaagttaaaagcccggcgatctgagtgtaattccaaagctacccacgcaaggaatgattatcttcttaccctagcggcagcaaatgcacatcaggatcgctactatcaaacagatttagttaacattatgaaggtgcggcaaacatttgttatctagtggttattgatgtagaagatacaagagtgatgtaagaaataaaataatgactcaaactgggaaa

SEQ ID NO: 133927 - DNA, 3118 bp, Homo sapiens
  Payload ID: 6163
  Gene Symbol: FCHO1
  Gene Name: FCH domain only 1
  Uniprot ID: O14526
  ENST ID: ENST00000252771
  CDS Start-End: 187-2856
cgcgccgcagccgcggagggaggggcggggcgggctccggtgtcagcgaccaagccgcaggtggcggcgagcgcggggctcggcccgagctcaggagactggcaatgactctgtagctcaaacttgcctctctcttcagacaggcactggacggggcctgcaggggtctccacagagaccatcaggatgtcgtattttggggagcatttttggggcgagaaaaatcatggctttgaggtcctgtaccacagcgtgaagcaggggcccatctccaccaaggagctggcggacttcatccgggagagggccaccatcgaggagacctactcgaaggcgatggcgaaactctccaagctggccagcaacgggacccccatggggaccttcgccccgctctgggaggtcttccgcgtctcctcggacaagctggcgctgtgccacctggaactgacacggaagttacaggatctcatcaaggacgttctccgctacggcgaggaacagctcaagacccacaagaagtgcaaggaggaagtggtgagcaccttggatgctgtgcaggtactctcgggcgtcagccagctcctgcccaagtcccgcgagaactacctgaaccgttgcatggaccaggagcggctgcggagggagagtaccagccagaaggagatggacaaggcggagactaaaaccaagaaggcggcagagagcctgcggcgctcagtggaaaaatacaactcagcccgagctgactttgagcagaagatgctggactcagccctgcgcttccaagccatggaggagacacacctgaggcacatgaaggcactgctgggctcatatgctcactcggtggaggacacgcacgtgcagattgggcaggtgcatgaggaatttaagcagaacatcgagaacgtcagcgtggagatgctactcaggaagtttgcagagagtaagggcacaggccgggagaagcctggacctctggacttcgaggcatacagtgcggctgccctgcaggaagcgatgaaacgtttgcggggagccaaggcctttcgccttccaggactaagccggcgggagcgggagccagagccacctgcagctgtagatttcctggagcccgattcagggacatgtccagaggtggatgaagaaggtttcactgtccggcctgatgtgacccagaacagcacggccgagccctcccgtttctcgtccagcgactccgacttcgacgatgaagagccccgcaagttctatgtgcacatcaagcctgccccggcccgggctccagcctgcagccccgaggcagcagcggcacagctcagggccaccgcgggcagcctcatccttcctcctggcccagggggcaccatgaaacgccattcttcacgggacgctgctgggaaaccccagagacctcggtctgcccccagaaccagcagctgtgcagagagattgcagtcagaggagcaggtgtccaagaacctctttgggccgcccctggagtcagcctttgaccacgaagattttacaggctctagcagcctgggcttcacctccagcccctcccctttctcctcctcgtcgcccgaaaacgtggaggattccggcctggactctccgtcccacgcggcacctggcccctccccagattcctgggtcccccgcccaggcaccccgcagagcccgcccagctgtagggcgccacccccagaggccaggggtatccgggcaccgcctctgccagactcgccgcagcccctcgcctcgtctccaggcccctgggggctggaggccttggccggaggagacctgatgcctgcacctgctgaccccacagccagggagggcctggcagccccacccaggagacttcgctctaggaaggtgtcctgccctctcacacgtagcaatggggacctgtctcgttccctgagcccctccccactgggctcttcagccgccagcactgccttggaacggcccagcttcttatcccagacaggacacggagtctcccggggtccgagccctgtggtcctgggctcccaggatgccctgcccatagccacagccttcacagagtatgtccacgcctacttccgtggccacagccccagctgcctggctcgagtaactggggagctgaccatgaccttccctgctggcatcgtgcgtgtgttcagcgggaccccaccaccacctgtcctcagcttccggcttgtacacacaaccgctattgagcacttccagcccaacgccgatctgctgttcagtgacccctcccagagtgaccctgagaccaaagacttctggctcaacatggcagctctgaccgaagccctgcagcgccaggcagagcagaaccccactgcctcctactacaacgtggtgctgctgcgataccagttctcccgcccgggtccccagtctgtgcctctgcagctcagtgcccactggcagtgtggagccaccctcacccaggtctcagtggagtacggctaccggcccggtgccacggctgtgcccacaccactcacgaacgtccagatcctgctgcctgtgggggagcctgtgaccaacgtccgcttgcagccggctgccacctggaacctggaggagaagcggctcacttggaggcttccagatgtgtccgaggcaggcggttctggccgcctctctgccagctgggagccgctctcagggcccagcacacccagccccgtggctgcacagttcaccagcgaggggaccactctgtcgggcgtggacttggaactggtgggcagcggttaccgcatgtcgctggtgaagaggaggtttgccacagggatgtacctggtgagctgctgaacccgcaaatgctgctgccccagctctacactgcgccctggtgctggctgaccaccccctgccctcctgccggaccctggggcctcccaccccagcctccctgaggcccatactccacggagaggagccccatgcccagcctggctgagcccgagattcgctcctccccctcatgccaaccccacacaggtcccggccttttaatgttctttgaataaacactttattttctaataaaataaaaaaggaaaccttttcctgc

SEQ ID NO: 133928 - DNA, 881 bp, Homo sapiens
  Payload ID: 6163
  Gene Symbol: FCHO1
  Gene Name: FCH domain only 1
  ENST ID: ENST00000600209
  CDS Start-End: 357-881
ggcgggctccggtgtcagcgaccaagccgcaggtggcggcgagcgcggggctcggcccgagctcaggagatggggaaactgaggcacggagctggacagtgactcagacaccaggtgaacactggcttttgagggcagggttgggactcgtgggggcagcaatgccagctgggtcatcacagtgaggagtgagctctgactcccaggagggtacataaggagctgcctggagtggagctgagagctcaggtctgggctcagccagtccagagtgcaaatctactgtcccttcctagctgtgtgatcttggcaagcactggacggggcctgcaggggtctccacagagaccatcaggatgtcgtattttggggagcatttttggggcgagaaaaatcatggctttgaggtcctgtaccacagcgtgaagcaggggcccatctccaccaaggagctggcggacttcatccgggagagggccaccatcgaggagacctactcgaaggcgatggcgaaactctccaagctggccagcaacgggacccccatggggaccttcgccccgctctgggaggtcttccgcgtctcctcggacaagctggcgctgtgccacctggaactgacacggaagttacaggatctcatcaaggacgttctccgctacggcgaggaacagctcaagacccacaagaagtgcaaggaggaagtggtgagcaccttggatgctgtgcaggtactctcgggcgtcagccagctcctgcccaagtcccgcgagaactacctgaaccgttgcatggaccaggagcggctgcggagggagagtaccagccagaaggagatggacaaggcggagactaaaaccaagaaggcggcagagagcctg

SEQ ID NO: 133929 - DNA, 554 bp, Homo sapiens
  Payload ID: 6163
  Gene Symbol: FCHO1
  Gene Name: FCH domain only 1
  ENST ID: ENST00000598086
  CDS Start-End: 220-554
aagcctccaacttggtgctgacggaagtggcctcgtggctgtctcctggcgcctgccccgtcagacaggggccccatcccactcgctaccctgtccgatggggaaactgaggcacggagctggacagtgactcagacaccaggagctgcctggagtggagctgagagctcagacaggcactggacggggcctgcaggggtctccacagagaccatcaggatgtcgtattttggggagcatttttggggcgagaaaaatcatggctttgaggtcctgtaccacagcgtgaagcaggggcccatctccaccaaggagctggcggacttcatccgggagagggccaccatcgaggagacctactcgaaggcgatggcgaaactctccaagctggccagcaacgggacccccatggggaccttcgccccgctctgggaggtcttccgcgtctcctcggacaagctggcgctgtgccacctggaactgacacggaagttacaggatctcatcaaggacgttctccgctacggcgaggaacagctcaagacccacaagaa

SEQ ID NO: 133930 - DNA, 543 bp, Homo sapiens
  Payload ID: 6163
  Gene Symbol: FCHO1
  Gene Name: FCH domain only 1
  ENST ID: ENST00000598067
  CDS Start-End: 459-543
agcgaccaagccgcaggtggcggcgagcgcggggctcggcccgagctcaggagggtcttactctgtcgcccaggctggagtgcagtggcgccatctcagctcactgcaacctccgcctcccaggttcaagcgattctcctgtctcagcctcccaagtagctgggattacagatggggaaactgaggcacggagctggacagtgactcagacaccaggtgaacactggcttttgagggcagggttgggactcgtgggggcagcaatgccagctgggtcatcacagtgaggagtgagctctgactcccaggagggtacataaggagctgcctggagtggagctgagagctcaggtctgggctcagccagtccagagtgcaaatctactgtcccttcctagctgtgtgatcttggcaagcactggacggggcctgcaggggtctccacagagaccatcaggatgtcgtattttggggagcatttttggggcgagaaaaatcatggctttgaggtcctgtaccacagcgtgaagcaggggcccatct

SEQ ID NO: 133931 - DNA, 841 bp, Homo sapiens
  Payload ID: 6163
  Gene Symbol: FCHO1
  Gene Name: FCH domain only 1
  ENST ID: ENST00000594068
  CDS Start-End: 376-841
ggaagtggcctcgtggctgtctcctggcgcctgccccgtcagacaggggccccatcccactcgctaccctgtccgaatctcactctttcaaccaggttggagtgcagtggggcaatcttggctcactacaacctccgcctcccaggttcaagtgattctcctgcctcatcctcccaagtagctgggactacagatggggaaactgaggcacggagctggacagtgactcagacaccaggagctgcctggagtggagctgagagctcaggtctgggctcagccagtccagagtgcaaatctactgtcccttcctagctgtgtgatcttggcaagcactggacggggcctgcaggggtctccacagagaccatcaggatgtcgtattttggggagcatttttggggcgagaaaaatcatggctttgaggtcctgtaccacagcgtgaagcaggggcccatctccaccaaggagctggcggacttcatccgggagagggccaccatcgaggagacctactcgaaggcgatggcgaaactctccaagctggccagcaacgggacccccatggggaccttcgccccgctctgggaggtcttccgcgtctcctcggacaagctggcgctgtgccacctggaactgacacggaagttacaggatctcatcaaggacgttctccgctacggcgaggaacagctcaagacccacaagaagtgcaaggaggaagtggtgagcaccttggatgctgtgcaggtactctcgggcgtcagccagctcctgcccaagtcccgcgagaactacctgaaccgttgcatggaccaggagcggctgcggagggagagta

SEQ ID NO: 133932 - DNA, 551 bp, Homo sapiens
  Payload ID: 6163
  Gene Symbol: FCHO1
  Gene Name: FCH domain only 1
  ENST ID: ENST00000598539
  CDS Start-End: 424-551
ggtgtcagcgaccaagccgcaggtggcggcgagcgcggggctcggcccgagctcaggagatggggaaactgaggcacggagctggacagtgactcagacaccaggtgaacactggcttttgagggcagggttgggactcgtgggggcagcaatgccagctgggtcatcacagtgaggagtgagctctgactcccaggagggtacataaggagctgcctggagtggagctgagagctcaggtctgggctcagccagtccagagtgcaaatctactgtcccttcctagctgtgtgatcttggcaagtgacttcccctctgggggaggggagggctcagttttcccatctgtgaagtggatcagagctttcctgtcaagacaggcactggacggggcctgcaggggtctccacagagaccatcaggatgtcgtattttggggagcatttttggggcgagaaaaatcatggctttgaggtcctgtaccacagcgtgaagcaggggcccatctccaccaaggagctggcggacttcatccgggagagggccaccat

SEQ ID NO: 133933 - DNA, 534 bp, Homo sapiens
  Payload ID: 6163
  Gene Symbol: FCHO1
  Gene Name: FCH domain only 1
  ENST ID: ENST00000598960
  CDS Start-End: 464-534
tgtccgtcccctgccgggcggcctgacccagcctcttgtgcagagacacctggggctccccggcaagatcccttctaagcattccttcttattttgcagatggggaaactgaggcacggagctggacagtgactcagacaccaggtgaacactggcttttgagggcagggttgggactcgtgggggcagcaatgccagctgggtcatcacagtgaggagtgagctctgactcccaggagggtacataaggagctgcctggagtggagctgagagctcaggtctgggctcagccagtccagagtgcaaatctactgtcccttcctagctgtgtgatcttggcaagtgacttcccctctgggggaggggagggctcagttttcccatctgtgaagtggatcagagctttcctgtcaagacaggcactggacggggcctgcaggggtctccacagagaccatcaggatgtcgtattttggggagcatttttggggcgagaaaaatcatggctttgaggtcctgtaccacagcgtgaa

SEQ ID NO: 133934 - DNA, 567 bp, Homo sapiens
  Payload ID: 6163
  Gene Symbol: FCHO1
  Gene Name: FCH domain only 1
  ENST ID: ENST00000593870
  CDS Start-End: 462-567
aagcctccaacttggtgctgacggaagtggcctcgtggctgtctcctggcgcctgccccgtcagacaggggccccatcccactcgctaccctgtccgatggggaaactgaggcacggagctggacagtgactcagacaccaggtgaacactggcttttgagggcagggttgggactcgtgggggcagcaatgccagctgggtcatcacagtgaggagtgagctctgactcccaggagggtacataaggagctgcctggagtggagctgagagctcaggtctgggctcagccagtccagagtgcaaatctactgtcccttcctagctgtgtgatcttggcaagtgacttcccctctgggggaggggagggctcagttttcccatctgtgaagtggatcagagctttcctgtcaagacaggcactggacggggcctgcaggggtctccacagagaccatcaggatgtcgtattttggggagcatttttggggcgagaaaaatcatggctttgaggtcctgtaccacagcgtgaagcaggggcccatctccaccaaggagctggcggact

SEQ ID NO: 133935 - DNA, 3094 bp, Homo sapiens
  Payload ID: 6163
  Gene Symbol: FCHO1
  Gene Name: FCH domain only 1
  Uniprot ID: O14526
  ENST ID: ENST00000600676
  CDS Start-End: 163-2832
gggcgggctccggtgtcagcgaccaagccgcaggtggcggcgagcgcggggctcggcccgagctcaggagatggggaaactgaggcacggagctggacagtgactcagacaccagacaggcactggacggggcctgcaggggtctccacagagaccatcaggatgtcgtattttggggagcatttttggggcgagaaaaatcatggctttgaggtcctgtaccacagcgtgaagcaggggcccatctccaccaaggagctggcggacttcatccgggagagggccaccatcgaggagacctactcgaaggcgatggcgaaactctccaagctggccagcaacgggacccccatggggaccttcgccccgctctgggaggtcttccgcgtctcctcggacaagctggcgctgtgccacctggaactgacacggaagttacaggatctcatcaaggacgttctccgctacggcgaggaacagctcaagacccacaagaagtgcaaggaggaagtggtgagcaccttggatgctgtgcaggtactctcgggcgtcagccagctcctgcccaagtcccgcgagaactacctgaaccgttgcatggaccaggagcggctgcggagggagagtaccagccagaaggagatggacaaggcggagactaaaaccaagaaggcggcagagagcctgcggcgctcagtggaaaaatacaactcagcccgagctgactttgagcagaagatgctggactcagccctgcgcttccaagccatggaggagacacacctgaggcacatgaaggcactgctgggctcatatgctcactcggtggaggacacgcacgtgcagattgggcaggtgcatgaggaatttaagcagaacatcgagaacgtcagcgtggagatgctactcaggaagtttgcagagagtaagggcacaggccgggagaagcctggacctctggacttcgaggcatacagtgcggctgccctgcaggaagcgatgaaacgtttgcggggagccaaggcctttcgccttccaggactaagccggcgggagcgggagccagagccacctgcagctgtagatttcctggagcccgattcagggacatgtccagaggtggatgaagaaggtttcactgtccggcctgatgtgacccagaacagcacggccgagccctcccgtttctcgtccagcgactccgacttcgacgatgaagagccccgcaagttctatgtgcacatcaagcctgccccggcccgggctccagcctgcagccccgaggcagcagcggcacagctcagggccaccgcgggcagcctcatccttcctcctggcccagggggcaccatgaaacgccattcttcacgggacgctgctgggaaaccccagagacctcggtctgcccccagaaccagcagctgtgcagagagattgcagtcagaggagcaggtgtccaagaacctctttgggccgcccctggagtcagcctttgaccacgaagattttacaggctctagcagcctgggcttcacctccagcccctcccctttctcctcctcgtcgcccgaaaacgtggaggattccggcctggactctccgtcccacgcggcacctggcccctccccagattcctgggtcccccgcccaggcaccccgcagagcccgcccagctgtagggcgccacccccagaggccaggggtatccgggcaccgcctctgccagactcgccgcagcccctcgcctcgtctccaggcccctgggggctggaggccttggccggaggagacctgatgcctgcacctgctgaccccacagccagggagggcctggcagccccacccaggagacttcgctctaggaaggtgtcctgccctctcacacgtagcaatggggacctgtctcgttccctgagcccctccccactgggctcttcagccgccagcactgccttggaacggcccagcttcttatcccagacaggacacggagtctcccggggtccgagccctgtggtcctgggctcccaggatgccctgcccatagccacagccttcacagagtatgtccacgcctacttccgtggccacagccccagctgcctggctcgagtaactggggagctgaccatgaccttccctgctggcatcgtgcgtgtgttcagcgggaccccaccaccacctgtcctcagcttccggcttgtacacacaaccgctattgagcacttccagcccaacgccgatctgctgttcagtgacccctcccagagtgaccctgagaccaaagacttctggctcaacatggcagctctgaccgaagccctgcagcgccaggcagagcagaaccccactgcctcctactacaacgtggtgctgctgcgataccagttctcccgcccgggtccccagtctgtgcctctgcagctcagtgcccactggcagtgtggagccaccctcacccaggtctcagtggagtacggctaccggcccggtgccacggctgtgcccacaccactcacgaacgtccagatcctgctgcctgtgggggagcctgtgaccaacgtccgcttgcagccggctgccacctggaacctggaggagaagcggctcacttggaggcttccagatgtgtccgaggcaggcggttctggccgcctctctgccagctgggagccgctctcagggcccagcacacccagccccgtggctgcacagttcaccagcgaggggaccactctgtcgggcgtggacttggaactggtgggcagcggttaccgcatgtcgctggtgaagaggaggtttgccacagggatgtacctggtgagctgctgaacccgcaaatgctgctgccccagctctacactgcgccctggtgctggctgaccaccccctgccctcctgccggaccctggggcctcccaccccagcctccctgaggcccatactccacggagaggagccccatgcccagcctggctgagcccgagattcgctcctccccctcatgccaaccccacacaggtcccggccttttaatgttctttgaataaacactttattttctaataaaataaaaaaggaaaccttttcctgc

SEQ ID NO: 133936 - DNA, 580 bp, Homo sapiens
  Payload ID: 6163
  Gene Symbol: FCHO1
  Gene Name: FCH domain only 1
  ENST ID: ENST00000593833
  CDS Start-End: 177-580
agcgaccaagccgcaggtggcggcgagcgcggggctcggcccgagctcaggagggcgagaaaaatcatggctttgaggtcctgtaccacagcgtgaagcaggggcccatctccaccaaggagctggcggacttcatccgggagagggccaccatcgaggagacctactcgaaggcgatggcgaaactctccaagctggccagcaacgggacccccatggggaccttcgccccgctctgggaggtcttccgcgtctcctcggacaagctggcgctgtgccacctggaactgacacggaagttacaggatctcatcaaggacgttctccgctacggcgaggaacagctcaagacccacaagaagtgcaaggaggaagtggtgagcaccttggatgctgtgcaggtactctcgggcgtcagccagctcctgcccaagtcccgcgagaactacctgaaccgttgcatggaccaggagcggctgcggagggagagtaccagccagaaggagatggacaaggcggagactaaaaccaagaaggcggcagagagcctgcggcgctcagtggaaaaatacaactcagc

SEQ ID NO: 133937 - DNA, 598 bp, Homo sapiens
  Payload ID: 6163
  Gene Symbol: FCHO1
  Gene Name: FCH domain only 1
  ENST ID: ENST00000596309
  CDS Start-End: 322-598
tccggtgtcagcgaccaagccgcaggtggcggcgagcgcggggctcggcccgagctcaggagatggggaaactgaggcacggagctggacagtgactcagacaccaggagctgcctggagtggagctgagagctcaggtctgggctcagccagtccagagtgcaaatctactgtcccttcctagctgtgtgatcttggcaagtgacttcccctctgggggaggggagggctcagttttcccatctgtgaagtggatcagagctttcctgtcaagacaggcactggacggggcctgcaggggtctccacagagaccatcaggatgtcgtattttggggagcatttttggggcgagaaaaatcatggctttgaggtcctgtaccacagcgtgaagcaggggcccatctccaccaaggagctggcggacttcatccgggagagggccaccatcgaggagacctactcgaaggcgatggcgaaactctccaagctggccagcaacgggacccccatggggaccttcgccccgctctgggaggtcttccgcgtctcctcggacaagctggcgctgtgccacctggaactgacacggaagttac

SEQ ID NO: 133938 - DNA, 2934 bp, Homo sapiens
  Payload ID: 6163
  Gene Symbol: FCHO1
  Gene Name: FCH domain only 1
  ENST ID: ENST00000597512
  CDS Start-End: 12-2702
gctaagcaactatgatgttctctccatcctttctcaatctctattcccatcccctgcagggcgagaaaaatcatggctttgaggtcctgtaccacagcgtgaagcaggggcccatctccaccaaggagctggcggacttcatccgggagagggccaccatcgaggagacctactcgaaggcgatggcgaaactctccaagctggccagcaacgggacccccatggggaccttcgccccgctctgggaggtcttccgcgtctcctcggacaagctggcgctgtgccacctggaactgacacggaagttacaggatctcatcaaggacgttctccgctacggcgaggaacagctcaagacccacaagaagtgcaaggaggaagtggtgagcaccttggatgctgtgcaggtactctcgggcgtcagccagctcctgcccaagtcccgcgagaactacctgaaccgttgcatggaccaggagcggctgcggagggagagtaccagccagaaggagatggacaaggcggagactaaaaccaagaaggcggcagagagcctgcggcgctcagtggaaaaatacaactcagcccgagctgactttgagcagaagatgctggactcagccctgcgcttccaagccatggaggagacacacctgaggcacatgaaggcactgctgggctcatatgctcactcggtggaggacacgcacgtgcagattgggcaggtgcatgaggaatttaagcagaacatcgagaacgtcagcgtggagatgctactcaggaagtttgcagagagtaagggcacaggccgggagaagcctggacctctggacttcgaggcatacagtgcggctgccctgcaggaagcgatgaaacgtttgcggggagccaaggcctttcgccttccaggactaagccggcgggagcgggagccagagccacctgcagctgtagatttcctggagcccgattcagggacatgtccagaggtggatgaagaaggtttcactgtccggcctgatgtgacccagaacagcacggccgagccctcccgtttctcgtccagcgactccgacttcgacgatgaagagccccgcaagttctatgtgcacatcaagcctgccccggcccgggctccagcctgcagccccgaggcagcagcggcacagctcagggccaccgcgggcagcctcatccttcctcctggcccagggggcaccatgaaacgccattcttcacgggacgctgctgggaaaccccagagacctcggtctgcccccagaaccagcagctgtgcagagagattgcagtcagaggagcaggtgtccaagaacctctttgggccgcccctggagtcagcctttgaccacgaagattttacaggctctagcagcctgggcttcacctccagcccctcccctttctcctcctcgtcgcccgaaaacgtggaggattccggcctggactctccgtcccacgcggcacctggcccctccccagattcctgggtcccccgcccaggcaccccgcagagcccgcccagctgtagggcgccacccccagaggccaggggtatccgggcaccgcctctgccagactcgccgcagcccctcgcctcgtctccaggcccctgggggctggaggccttggccggaggagacctgatgcctgcacctgctgaccccacagccagggagggcctggcagccccacccaggagacttcgctctaggaaggtgtcctgccctctcacacgtagcaatggggacctgtctcgttccctgagcccctccccactgggctcttcagccgccagcactgccttggaacggcccagcttcttatcccagacaggacacggagtctcccggggtccgagccctgtggtcctgggctcccaggatgccctgcccatagccacagccttcacagagtatgtccacgcctacttccgtggccacagccccagctgcctggctcgagtaactggggagctgaccatgaccttccctgctggcatcgtgcgtgtgttcagcgggaccccaccaccacctgtcctcagcttccggcttgtacacacaaccgctattgagcacttccagcccaacgccgatctgctgttcagtgacccctcccagagtgaccctgagaccaaagacttctggctcaacatggcagctctgaccgaagccctgcagcgccaggcagagcagaaccccactgcctcctactacaacgtggtgctgctgcgataccagttctcccgcccgggtccccagtctgtgcctctgcagctcagtgcccactggcagtgtggagccaccctcacccaggtctcagtggagtacggctaccggcccggtgccacggctgtgcccacaccactcacgaacgtccagatcctgctgcctgtgggggagcctgtgaccaacgtccgcttgcagccggctgccacctggaacctggaggagaagcggctcacttggaggcttccagatgtgtccgaggcaggcggttctggccgcctctctgccagctgggagccgctctcagggcccagcacacccagccccgtggctgcacagttcaccagcgaggggaccactctgtcgggcgtggacttggaactggtgggcagcggttaccgcatgtcgctggtgaagaggaggtttgccacagggatgtacctggtgagctgctgaacccgcaaatgctgctgccccagctctacactgcgccctggtgctggctgaccaccccctgccctcctgccggaccctggggcctcccaccccagcctccctgaggcccatactccacggagaggagccccatgcccagcctggctgagcccgagattcgctcctccccctcatgccaaccccacacaggtcccggccttttaatgttctttgaataaacactttattttct

SEQ ID NO: 133939 - DNA, 774 bp, Homo sapiens
  Payload ID: 6163
  Gene Symbol: FCHO1
  Gene Name: FCH domain only 1
  ENST ID: ENST00000595549
  CDS Start-End: 68-774
aaacttgcctctctcttcagacaggcactggacggggcctgcaggggtctccacagagaccatcaggatgtcgtattttggggagcatttttggggcgagaaaaatcatggctttgaggtcctgtaccacagcgtgaagcaggggcccatctccaccaaggagctggcggacttcatccgggagagggccaccatcgaggagacctactcgaaggcgatggcgaaactctccaagctggccagcaacgggacccccatggggaccttcgccccgctctgggaggtcttccgcgtctcctcggacaagctggcgctgtgccacctggaactgacacggaagttacaggatctcatcaaggacgttctccgctacggcgaggaacagctcaagacccacaagaaggtactctcgggcgtcagccagctcctgcccaagtcccgcgagaactacctgaaccgttgcatggaccaggagcggctgcggagggagagtaccagccagaaggagatggacaaggcggagactaaaaccaagaaggcggcagagagcctgcggcgctcagtggaaaaatacaactcagcccgagctgactttgagcagaagatgctggactcagccctgcgcttccaagccatggaggagacacacctgaggcacatgaaggcactgctgggctcatatgctcactcggtggaggacacgcacgtgcagattgggcaggtgcatgaggaatttaagcagaacatcgagaacgtcagcgtggagatgctact

SEQ ID NO: 133940 - DNA, 556 bp, Homo sapiens
  Payload ID: 6163
  Gene Symbol: FCHO1
  Gene Name: FCH domain only 1
  ENST ID: ENST00000597474
  CDS Start-End: 182-556
ggtgtcagcgaccaagccgcaggtggcggcgagcgcggggctcggcccgagctcaggagatggggaaactgaggcacggagctggacagtgactcagacaccaggagctgcctggagtggagctgagagctcagacaggcactggacggggcctgcaggggtctccacagagaccatcaggatgtcgtattttggggagcatttttggggcgagaaaaatcatggctttgaggtcctgtaccacagcgtgaagcaggggcccatctccaccaaggagctggcggacttcatccgggagagggccaccatcgaggagacctactcgaaggcgatggcgaaactctccaagctggccagcaacgggacccccatggggaccttcgccccgctctgggaggtcttccgcgtctcctcggacaagctggcgctgtgccacctggaactgacacggaagttacaggatctcatcaaggacgttctccgctacggcgaggaacagctcaagacccacaagaagtgcaaggaggaagtggtgagcaccttggatgctgtgcag

SEQ ID NO: 133941 - DNA, 3204 bp, Homo sapiens
  Payload ID: 6163
  Gene Symbol: FCHO1
  Gene Name: FCH domain only 1
  Uniprot ID: O14526
  ENST ID: ENST00000596536
  CDS Start-End: 284-2953
acacaagcctccaacttggtgctgacggaagtggcctcgtggctgtctcctggcgcctgccccgtcagacaggggccccatcccactcgctaccctgtccgatggggaaactgaggcacggagctggacagtgactcagacaccaggagctgcctggagtggagctgagagctcaggtctgggctcagccagtccagagtgcaaatctactgtcccttcctagctgtgtgatcttggcaagcactggacggggcctgcaggggtctccacagagaccatcaggatgtcgtattttggggagcatttttggggcgagaaaaatcatggctttgaggtcctgtaccacagcgtgaagcaggggcccatctccaccaaggagctggcggacttcatccgggagagggccaccatcgaggagacctactcgaaggcgatggcgaaactctccaagctggccagcaacgggacccccatggggaccttcgccccgctctgggaggtcttccgcgtctcctcggacaagctggcgctgtgccacctggaactgacacggaagttacaggatctcatcaaggacgttctccgctacggcgaggaacagctcaagacccacaagaagtgcaaggaggaagtggtgagcaccttggatgctgtgcaggtactctcgggcgtcagccagctcctgcccaagtcccgcgagaactacctgaaccgttgcatggaccaggagcggctgcggagggagagtaccagccagaaggagatggacaaggcggagactaaaaccaagaaggcggcagagagcctgcggcgctcagtggaaaaatacaactcagcccgagctgactttgagcagaagatgctggactcagccctgcgcttccaagccatggaggagacacacctgaggcacatgaaggcactgctgggctcatatgctcactcggtggaggacacgcacgtgcagattgggcaggtgcatgaggaatttaagcagaacatcgagaacgtcagcgtggagatgctactcaggaagtttgcagagagtaagggcacaggccgggagaagcctggacctctggacttcgaggcatacagtgcggctgccctgcaggaagcgatgaaacgtttgcggggagccaaggcctttcgccttccaggactaagccggcgggagcgggagccagagccacctgcagctgtagatttcctggagcccgattcagggacatgtccagaggtggatgaagaaggtttcactgtccggcctgatgtgacccagaacagcacggccgagccctcccgtttctcgtccagcgactccgacttcgacgatgaagagccccgcaagttctatgtgcacatcaagcctgccccggcccgggctccagcctgcagccccgaggcagcagcggcacagctcagggccaccgcgggcagcctcatccttcctcctggcccagggggcaccatgaaacgccattcttcacgggacgctgctgggaaaccccagagacctcggtctgcccccagaaccagcagctgtgcagagagattgcagtcagaggagcaggtgtccaagaacctctttgggccgcccctggagtcagcctttgaccacgaagattttacaggctctagcagcctgggcttcacctccagcccctcccctttctcctcctcgtcgcccgaaaacgtggaggattccggcctggactctccgtcccacgcggcacctggcccctccccagattcctgggtcccccgcccaggcaccccgcagagcccgcccagctgtagggcgccacccccagaggccaggggtatccgggcaccgcctctgccagactcgccgcagcccctcgcctcgtctccaggcccctgggggctggaggccttggccggaggagacctgatgcctgcacctgctgaccccacagccagggagggcctggcagccccacccaggagacttcgctctaggaaggtgtcctgccctctcacacgtagcaatggggacctgtctcgttccctgagcccctccccactgggctcttcagccgccagcactgccttggaacggcccagcttcttatcccagacaggacacggagtctcccggggtccgagccctgtggtcctgggctcccaggatgccctgcccatagccacagccttcacagagtatgtccacgcctacttccgtggccacagccccagctgcctggctcgagtaactggggagctgaccatgaccttccctgctggcatcgtgcgtgtgttcagcgggaccccaccaccacctgtcctcagcttccggcttgtacacacaaccgctattgagcacttccagcccaacgccgatctgctgttcagtgacccctcccagagtgaccctgagaccaaagacttctggctcaacatggcagctctgaccgaagccctgcagcgccaggcagagcagaaccccactgcctcctactacaacgtggtgctgctgcgataccagttctcccgcccgggtccccagtctgtgcctctgcagctcagtgcccactggcagtgtggagccaccctcacccaggtctcagtggagtacggctaccggcccggtgccacggctgtgcccacaccactcacgaacgtccagatcctgctgcctgtgggggagcctgtgaccaacgtccgcttgcagccggctgccacctggaacctggaggagaagcggctcacttggaggcttccagatgtgtccgaggcaggcggttctggccgcctctctgccagctgggagccgctctcagggcccagcacacccagccccgtggctgcacagttcaccagcgaggggaccactctgtcgggcgtggacttggaactggtgggcagcggttaccgcatgtcgctggtgaagaggaggtttgccacagggatgtacctggtgagctgctgaacccgcaaatgctgctgccccagctctacactgcgccctggtgctggctgaccaccccctgccctcctgccggaccctggggcctcccaccccagcctccctgaggcccatactccacggagaggagccccatgcccagcctggctgagcccgagattcgctcctccccctcatgccaaccccacacaggtcccggccttttaatgttctttgaataaacactttattttctaataaaataaaaaaggaaa

SEQ ID NO: 133942 - DNA, 573 bp, Homo sapiens
  Payload ID: 6163
  Gene Symbol: FCHO1
  Gene Name: FCH domain only 1
  ENST ID: ENST00000593385
  CDS Start-End: 568-573
gtcagcgaccaagccgcaggtggcggcgagcgcggggctcggcccgagctcaggagatggggaaactgaggcacggagctggacagtgactcagacaccaggtgaacactggcttttgagggcagggttgggactcgtgggggcagcaatgccagctgggtcatcacagtgaggagtgagctctgactcccaggagggtacataaggagctgcctggagtggagctgagagctcaggtctgggctcagccagtccagagtgcaaatctactgtcccttcctagctgtgtgatcttggcaagtgacttcccctctgggggaggggagggctcagttttcccatctgtgaagtggatcagagctttcctgtcaagacaggcactggacggggcctgcaggggtctccacagagaccatcaggatgtcgtattttggggagcatttttgggcttctggccaagtgtggtgactcacgcctgtaatctcagcactttgggaggctgagatgggaggattgcttgagtccaggagttcgagaccaaccttggtaacataggcgagaaaaatcatggct

SEQ ID NO: 133943 - DNA, 565 bp, Homo sapiens
  Payload ID: 6163
  Gene Symbol: FCHO1
  Gene Name: FCH domain only 1
  ENST ID: ENST00000596462
  CDS Start-End: 520-565
acactgcctgtccgtcccctgccgggcggcctgacccagcctcttgtgcagagacacctggggctccccggcaagatcccttctaagcattccttcttattttgcagatggggaaactgaggcacggagctggacagtgactcagacaccaggtgaacactggcttttgagggcagggttgggactcgtgggggcagcaatgccagctgggtcatcacagtgaggagtgagctctgactcccaggagggtacataaggtgaggactgtcctagaggaatcagaagatcccaggggaccctcagggatacttcagggaccccaacccccatgtggctgatcacagcccctgcatctatttctcttcaaacccttttcctgcaggagctgcctggagtggagctgagagctcaggtctgggctcagccagtccagagtgcaaatctactgtcccttcctagctgtgtgatcttggcaagcactggacggggcctgcaggggtctccacagagaccatcaggatgtcgtattttggggagcatttttggggcgagaaaaatcatggct

SEQ ID NO: 133944 - DNA, 575 bp, Homo sapiens
  Payload ID: 6163
  Gene Symbol: FCHO1
  Gene Name: FCH domain only 1
  ENST ID: ENST00000598932
  CDS Start-End: 272-575
aacttggtgctgacggaagtggcctcgtggctgtctcctggcgcctgccccgtcagacaggggccccatcccactcgctaccctgtccgatggggaaactgaggcacggagctggacagtgactcagacaccaggagctgcctggagtggagctgagagctcaggtctgggctcagccagtccagagtgcaaatctactgtcccttcctagctgtgtgatcttggcaagcactggacggggcctgcaggggtctccacagagaccatcaggatgtcgtattttggggagcatttttggggcgagaaaaatcatggctttgaggtcctgtaccacagcgtgaagcaggggcccatctccaccaaggagctggcggacttcatccgggagagggccaccatcgaggagacctactcgaaggcgatggcgaaactctccaagctggccagcaacgggacccccatggggaccttcgccccgctctgggaggtcttccgcgtctcctcggacaagctggcgctgtgccacctggaactgacacggaagttacaggatctcatcaaggacgttctccgct

SEQ ID NO: 133945 - DNA, 1131 bp, Homo sapiens
  Payload ID: 6163
  Gene Symbol: FCHO1
  Gene Name: FCH domain only 1
  ENST ID: ENST00000595023
  CDS Start-End: 339-1131
tgacggaagtggcctcgtggctgtctcctggcgcctgccccgtcagacaggggccccatcccactcgctaccctgtccgatggggaaactgaggcacggagctggacagtgactcagacaccaggagctgcctggagtggagctgagagctcaggtctgggctcagccagtccagagtgcaaatctactgtcccttcctagctgtgtgatcttggcaagtgacttcccctctgggggaggggagggctcagttttcccatctgtgaagtggatcagagctttcctgtcaagacaggcactggacggggcctgcaggggtctccacagagaccatcaggatgtcgtattttggggagcatttttggggcgagaaaaatcatggctttgaggtcctgtaccacagcgtgaagcaggggcccatctccaccaaggagctggcggacttcatccgggagagggccaccatcgaggagacctactcgaaggcgatggcgaaactctccaagctggccagcaacgggacccccatggggaccttcgccccgctctgggaggtcttccgcgtctcctcggacaagctggcgctgtgccacctggaactgacacggaagttacaggatctcatcaaggacgttctccgctacggcgaggaacagctcaagacccacaagaagtgcaaggaggaagtggtgagcaccttggatgctgtgcaggtactctcgggcgtcagccagctcctgcccaagtcccgcgagaactacctgaaccgttgcatggaccaggagcggctgcggagggagagtaccagccagaaggagatggacaaggcggagactaaaaccaagaaggcggcagagagcctgcggcgctcagtggaaaaatacaactcagcccgagctgactttgagcagaagatgctggactcagccctgcgcttccaagccatggaggagacacacctgaggcacatgaaggcactgctgggctcatatgctcactcggtggaggacacgcacgtgcagattgggcaggtgcatgaggaatttaagcagaacatcgagaacgtcagcgtggagatgctactcaggaagtttgcagagagtaagggcacaggccgggagaagcctggac

SEQ ID NO: 133946 - DNA, 2979 bp, Homo sapiens
  Payload ID: 6163
  Gene Symbol: FCHO1
  Gene Name: FCH domain only 1
  Uniprot ID: O14526
  ENST ID: ENST00000596951
  CDS Start-End: 54-2723
atcttgacaggcactggacggggcctgcaggggtctccacagagaccatcaggatgtcgtattttggggagcatttttggggcgagaaaaatcatggctttgaggtcctgtaccacagcgtgaagcaggggcccatctccaccaaggagctggcggacttcatccgggagagggccaccatcgaggagacctactcgaaggcgatggcgaaactctccaagctggccagcaacgggacccccatggggaccttcgccccgctctgggaggtcttccgcgtctcctcggacaagctggcgctgtgccacctggaactgacacggaagttacaggatctcatcaaggacgttctccgctacggcgaggaacagctcaagacccacaagaagtgcaaggaggaagtggtgagcaccttggatgctgtgcaggtactctcgggcgtcagccagctcctgcccaagtcccgcgagaactacctgaaccgttgcatggaccaggagcggctgcggagggagagtaccagccagaaggagatggacaaggcggagactaaaaccaagaaggcggcagagagcctgcggcgctcagtggaaaaatacaactcagcccgagctgactttgagcagaagatgctggactcagccctgcgcttccaagccatggaggagacacacctgaggcacatgaaggcactgctgggctcatatgctcactcggtggaggacacgcacgtgcagattgggcaggtgcatgaggaatttaagcagaacatcgagaacgtcagcgtggagatgctactcaggaagtttgcagagagtaagggcacaggccgggagaagcctggacctctggacttcgaggcatacagtgcggctgccctgcaggaagcgatgaaacgtttgcggggagccaaggcctttcgccttccaggactaagccggcgggagcgggagccagagccacctgcagctgtagatttcctggagcccgattcagggacatgtccagaggtggatgaagaaggtttcactgtccggcctgatgtgacccagaacagcacggccgagccctcccgtttctcgtccagcgactccgacttcgacgatgaagagccccgcaagttctatgtgcacatcaagcctgccccggcccgggctccagcctgcagccccgaggcagcagcggcacagctcagggccaccgcgggcagcctcatccttcctcctggcccagggggcaccatgaaacgccattcttcacgggacgctgctgggaaaccccagagacctcggtctgcccccagaaccagcagctgtgcagagagattgcagtcagaggagcaggtgtccaagaacctctttgggccgcccctggagtcagcctttgaccacgaagattttacaggctctagcagcctgggcttcacctccagcccctcccctttctcctcctcgtcgcccgaaaacgtggaggattccggcctggactctccgtcccacgcggcacctggcccctccccagattcctgggtcccccgcccaggcaccccgcagagcccgcccagctgtagggcgccacccccagaggccaggggtatccgggcaccgcctctgccagactcgccgcagcccctcgcctcgtctccaggcccctgggggctggaggccttggccggaggagacctgatgcctgcacctgctgaccccacagccagggagggcctggcagccccacccaggagacttcgctctaggaaggtgtcctgccctctcacacgtagcaatggggacctgtctcgttccctgagcccctccccactgggctcttcagccgccagcactgccttggaacggcccagcttcttatcccagacaggacacggagtctcccggggtccgagccctgtggtcctgggctcccaggatgccctgcccatagccacagccttcacagagtatgtccacgcctacttccgtggccacagccccagctgcctggctcgagtaactggggagctgaccatgaccttccctgctggcatcgtgcgtgtgttcagcgggaccccaccaccacctgtcctcagcttccggcttgtacacacaaccgctattgagcacttccagcccaacgccgatctgctgttcagtgacccctcccagagtgaccctgagaccaaagacttctggctcaacatggcagctctgaccgaagccctgcagcgccaggcagagcagaaccccactgcctcctactacaacgtggtgctgctgcgataccagttctcccgcccgggtccccagtctgtgcctctgcagctcagtgcccactggcagtgtggagccaccctcacccaggtctcagtggagtacggctaccggcccggtgccacggctgtgcccacaccactcacgaacgtccagatcctgctgcctgtgggggagcctgtgaccaacgtccgcttgcagccggctgccacctggaacctggaggagaagcggctcacttggaggcttccagatgtgtccgaggcaggcggttctggccgcctctctgccagctgggagccgctctcagggcccagcacacccagccccgtggctgcacagttcaccagcgaggggaccactctgtcgggcgtggacttggaactggtgggcagcggttaccgcatgtcgctggtgaagaggaggtttgccacagggatgtacctggtgagctgctgaacccgcaaatgctgctgccccagctctacactgcgccctggtgctggctgaccaccccctgccctcctgccggaccctggggcctcccaccccagcctccctgaggcccatactccacggagaggagccccatgcccagcctggctgagcccgagattcgctcctccccctcatgccaaccccacacaggtcccggccttttaatgttctttgaataaacactttattttctaataaaataaaaaaggaaaccttt

SEQ ID NO: 133947 - DNA, 579 bp, Homo sapiens
  Payload ID: 6163
  Gene Symbol: FCHO1
  Gene Name: FCH domain only 1
  ENST ID: ENST00000596865
  CDS Start-End: 288-579
actgcctgtccgtcccctgccgggcggcctgacccagcctcttgtgcagagacacctggggctccccggcaagatcccttctaagcattccttcttattttgcagatggggaaactgaggcacggagctggacagtgactcagacaccaggagctgcctggagtggagctgagagctcaggtctgggctcagccagtccagagtgcaaatctactgtcccttcctagctgtgtgatcttggcaagcactggacggggcctgcaggggtctccacagagaccatcaggatgtcgtattttggggagcatttttggggcgagaaaaatcatggctttgaggtcctgtaccacagcgtgaagcaggggcccatctccaccaaggagctggcggacttcatccgggagagggccaccatcgaggagacctactcgaaggcgatggcgaaactctccaagctggccagcaacgggacccccatggggaccttcgccccgctctgggaggtcttccgcgtctcctcggacaagctggcgctgtgccacctggaactgacacggaagttacaggatctcatcaagg

SEQ ID NO: 133948 - DNA, 2907 bp, Homo sapiens
  Payload ID: 6163
  Gene Symbol: FCHO1
  Gene Name: FCH domain only 1
  Uniprot ID: O14526
  ENST ID: ENST00000595033
  CDS Start-End: 241-2760
agtggcctcgtggctgtctcctggcgcctgccccgtcagacaggggccccatcccactcgctaccctgtccgatggggaaactgaggcacggagctggacagtgactcagacaccagggcgagaaaaatcatggctttgaggtcctgtaccacagcgtgaagcaggggcccatctccaccaaggagctggcggacttcatccgggagagggccaccatcgaggagacctactcgaaggcgatggcgaaactctccaagctggccagcaacgggacccccatggggaccttcgccccgctctgggaggtcttccgcgtctcctcggacaagctggcgctgtgccacctggaactgacacggaagttacaggatctcatcaaggacgttctccgctacggcgaggaacagctcaagacccacaagaagtgcaaggaggaagtggtgagcaccttggatgctgtgcaggtactctcgggcgtcagccagctcctgcccaagtcccgcgagaactacctgaaccgttgcatggaccaggagcggctgcggagggagagtaccagccagaaggagatggacaaggcggagactaaaaccaagaaggcggcagagagcctgcggcgctcagtggaaaaatacaactcagcccgagctgactttgagcagaagatgctggactcagccctgcgcttccaagccatggaggagacacacctgaggcacatgaaggcactgctgggctcatatgctcactcggtggaggacacgcacgtgcagattgggcaggtgcatgaggaatttaagcagaacatcgagaacgtcagcgtggagatgctactcaggaagtttgcagagagtaagggcacaggccgggagaagcctggacctctggacttcgaggcatacagtgcggctgccctgcaggaagcgatgaaacgtttgcggggagccaaggcctttcgccttccaggactaagccggcgggagcgggagccagagccacctgcagctgtagatttcctggagcccgattcagggacatgtccagaggtggatgaagaaggtttcactgtccggcctgatgtgacccagaacagcacggccgagccctcccgtttctcgtccagcgactccgacttcgacgatgaagagccccgcaagttctatgtgcacatcaagcctgccccggcccgggctccagcctgcagccccgaggcagcagcggcacagctcagggccaccgcgggcagcctcatccttcctcctggcccagggggcaccatgaaacgccattcttcacgggacgctgctgggaaaccccagagacctcggtctgcccccagaaccagcagctgtgcagagagattgcagtcagaggagcaggtgtccaagaacctctttgggccgcccctggagtcagcctttgaccacgaagattttacaggctctagcagcctgggcttcacctccagcccctcccctttctcctcctcgtcgcccgaaaacgtggaggattccggcctggactctccgtcccacgcggcacctggcccctccccagattcctgggtcccccgcccaggcaccccgcagagcccgcccagctgtagggcgccacccccagaggccaggggtatccgggcaccgcctctgccagactcgccgcagcccctcgcctcgtctccaggcccctgggggctggaggccttggccggaggagacctgatgcctgcacctgctgaccccacagccagggagggcctggcagccccacccaggagacttcgctctaggaaggtgtcctgccctctcacacgtagcaatggggacctgtctcgttccctgagcccctccccactgggctcttcagccgccagcactgccttggaacggcccagcttcttatcccagacaggacacggagtctcccggggtccgagccctgtggtcctgggctcccaggatgccctgcccatagccacagccttcacagagtatgtccacgcctacttccgtggccacagccccagctgcctggctcgagtaactggggagctgaccatgaccttccctgctggcatcgtgcgtgtgttcagcgggaccccaccaccacctgtcctcagcttccggcttgtacacacaaccgctattgagcacttccagcccaacgccgatctgctgttcagtgacccctcccagagtgaccctgagaccaaagacttctggctcaacatggcagctctgaccgaagccctgcagcgccaggcagagcagaaccccactgcctcctactacaacgtggtgctgctgcgataccagttctcccgcccgggtccccagtctgtgcctctgcagctcagtgcccactggcagtgtggagccaccctcacccaggtctcagtggagtacggctaccggcccggtgccacggctgtgcccacaccactcacgaacgtccagatcctgctgcctgtgggggagcctgtgaccaacgtccgcttgcagccggctgccacctggaacctggaggagaagcggctcacttggaggcttccagatgtgtccgaggcaggcggttctggccgcctctctgccagctgggagccgctctcagggcccagcacacccagccccgtggctgcacagttcaccagcgaggggaccactctgtcgggcgtggacttggaactggtgggcagcggttaccgcatgtcgctggtgaagaggaggtttgccacagggatgtacctggtgagctgctgaacccgcaaatgctgctgccccagctctacactgcgccctggtgctggctgaccaccccctgccctcctgccggaccctggggcctcccaccccagcctccctgaggcccatactccacggagaggagccccatgcccagcctggctg

SEQ ID NO: 133949 - DNA, 3214 bp, Homo sapiens
  Payload ID: 6163
  Gene Symbol: FCHO1
  Gene Name: FCH domain only 1
  ENST ID: ENST00000594202
  CDS Start-End: 280-2955
cgcgccgcagccgcggagggaggggcggggcgggctccggtgtcagcgaccaagccgcaggtggcggcgagcgcggggctcggcccgagctcaggagatggggaaactgaggcacggagctggacagtgactcagacaccaggagctgcctggagtggagctgagagctcaggtctgggctcagccagtccagagtgcaaatctactgtcccttcctagctgtgtgatcttggcaagcactggacggggcctgcaggggtctccacagagaccatcaggatgtcgtattttggggagcatttttggggcgagaaaaatcatggctttgaggtcctgtaccacagcgtgaagcaggggcccatctccaccaaggagctggcggacttcatccgggagagggccaccatcgaggagacctactcgaaggcgatggcgaaactctccaagctggccagcaacgggacccccatggggaccttcgccccgctctgggaggtcttccgcgtctcctcggacaagctggcgctgtgccacctggaactgacacggaagttacaggatctcatcaaggacgttctccgctacggcgaggaacagctcaagacccacaagaagtgcaaggaggaagtggtgagcaccttggatgctgtgcaggtactctcgggcgtcagccagctcctgcccaagtcccgcgagaactacctgaaccgttgcatggaccaggagcggctgcggagggagagtaccagccagaaggagatggacaaggcggagactaaaaccaagaaggcggcagagagcctgcggcgctcagtggaaaaatacaactcagcccgagctgactttgagcagaagatgctggactcagccctgcgcttccaagccatggaggagacacacctgaggcacatgaaggcactgctgggctcatatgctcactcggtggaggacacgcacgtgcagattgggcaggtgcatgaggaatttaagcagaacatcgagaacgtcagcgtggagatgctactcaggaagtttgcagagagtaagggcacaggccgggagaagcctggacctctggacttcgaggcatacagtgcggctgccctgcaggaagcgatgaaacgtttgcggggagccaaggcctttcgccttccaggactaagccggcgggagcgggagccagagccacctgcagctgtagatttcctggagcccgattcagggacatgtccagaggtggatgaagaaggtttcactgtccggcctgatgtgacccagaacagcacggccgagccctcccgtttctcgtccagcgactccgacttcgacgatgaagagccccgcaagttctatgtgcacatcaagcctgccccggcccgggctccagcctgcagccccgaggcagcagcggcacagctcagggccaccgcgggcagcctcatccttcctcctggcccagggggcaccatgaaacgccattcttcacgggacgctgctgggaaaccccagagacctcggtctgcccccagaaccagcagctgtgcagagagattgcagtcagaggagcaggtgtccaagaacctctttgggccgcccctggagtcagcctttgaccacgaagattttacaggctctagcagcctgggcttcacctccagcccctcccctttctcctcctcgtcgcccgaaaacgtggaggattccggcctggactctccgtcccacgcggcacctggcccctccccagattcctgggtcccccgcccaggcaccccgcagagcccgcccagctgtagggcgccacccccagaggccaggggtatccgggcaccgcctctgccagactcgccgcagcccctcgcctcgtctccaggcccctgggggctggaggccttggccggaggagacctgatgcctgcacctgctgaccccacagccagggagggcctggcagccccacccaggagacttcgctctaggaaggtgtcctgccctctcacacgtagcaatggggacctgtctcgttccctgagcccctccccactgggctcttcagccgccagcactgccttggaacggcccagcttcttatcccagacaggacacggagtctcccggggtccgagccctgtggtcctgggctcccaggatgccctgcccatagccacagccttcacagagtatgtccacgcctacttccgtggccacagccccagctgcctggctcgagtaactggggagctgaccatgaccttccctgctggcatcgtgcgtgtgttcagcgggaccccaccaccacctgtcctcagcttccggcttgtacacacaaccgctattgagcacttccagcccaacgccgatctgctgttcagtgacccctcccagagtgaccctgagaccaaagacttctggctcaacatggcagctctgaccgaagccctgcagcgccaggcagagcagaaccccactgcctcctactacaacgtggtgctgctgcgataccagttctcccgcccgggtccccagtctgtgcctctgcagctcagtgcccactggcagtgtggagccaccctcacccaggtctcagtggagtacggctaccggcccggtgccacggctgtgcccacaccactcacgaacgtccagatcctgctgcctgtgggggagcctgtgaccaacgtccgcttgcagccggctgccacctggaacctggaggagaagcggctcacttggaggcttccagatgtgtccgaggcaggcggttctggccgcctctctgccagctgggagccgctctcagggcccagcacacccagccccgtggctgcacagttcaccagcgaggggaccactctgtcgggcgtggacttggaactggtgggcagcggttaccgcatgtcgctggtgaagaggaggtttgccacagctgcacccccacagggatgtacctggtgagctgctgaacccgcaaatgctgctgccccagctctacactgcgccctggtgctggctgaccaccccctgccctcctgccggaccctggggcctcccaccccagcctccctgaggcccatactccacggagaggagccccatgcccagcctggctgagcccgagattcgctcctccccctcatgccaaccccacacaggtcccggccttttaatgttctttgaataaacactttattttctaataaaataaaaaaggaaa

SEQ ID NO: 133950 - DNA, 1014 bp, Homo sapiens
  Payload ID: 6163
  Gene Symbol: FCHO1
  Gene Name: FCH domain only 1
  ENST ID: ENST00000596507
  CDS Start-End: 360-1014
agtggcctcgtggctgtctcctggcgcctgccccgtcagacaggggccccatcccactcgctaccctgtccgatggggaaactgaggcacggagctggacagtgactcagacaccaggtgaacactggcttttgagggcagggttgggactcgtgggggcagcaatgccagctgggtcatcacagtgaggagtgagctctgactcccaggagggtacataaggagctgcctggagtggagctgagagctcaggtctgggctcagccagtccagagtgcaaatctactgtcccttcctagctgtgtgatcttggcaagcactggacggggcctgcaggggtctccacagagaccatcaggatgtcgtattttggggagcatttttggggcgagaaaaatcatggctttgaggtcctgtaccacagcgtgaagcaggggcccatctccaccaaggagctggcggacttcatccgggagagggccaccatcgaggagacctactcgaaggcgatggcgaaactctccaagctggccagcaacgggacccccatggggaccttcgccccgctctgggaggtcttccgcgtctcctcggacaagctggcgctgtgccacctggaactgacacggaagttacaggatctcatcaaggacgttctccgctacggcgaggaacagctcaagacccacaagaagtgcaaggaggaagtggtgagcaccttggatgctgtgcaggtactctcgggcgtcagccagctcctgcccaagtcccgcgagaactacctgaaccgttgcatggaccaggagcggctgcggagggagagtaccagccagaaggagatggacaaggcggagactaaaaccaagaaggcggcagagagcctgcggcgctcagtggaaaaatacaactcagcccgagctgactttgagcagaagatgctggactcagccctgcgcttccaagccatggaggagacacacctgaggcacatgaaggcactgctgggctcatatg

SEQ ID NO: 133951 - DNA, 884 bp, Homo sapiens
  Payload ID: 6163
  Gene Symbol: FCHO1
  Gene Name: FCH domain only 1
  ENST ID: ENST00000597718
  CDS Start-End: 330-884
ccccgtcagacaggggccccatcccactcgctaccctgtccgatggggaaactgaggcacggagctggacagtgactcagacaccaggtgaacactggcttttgagggcagggttgggactcgtgggggcagcaatgccagctgggtcatcacagtgaggagtgagctctgactcccaggagggtacataaggagctgcctggagtggagctgagagctcaggtctgggctcagccagtccagagtgcaaatctactgtcccttcctagctgtgtgatcttggcaagcactggacggggcctgcaggggtctccacagagaccatcaggatgtcgtattttggggagcatttttggggcgagaaaaatcatggctttgaggtcctgtaccacagcgtgaagcaggggcccatctccaccaaggagctggcggacttcatccgggagagggccaccatcgaggagacctactcgaaggcgatggcgaaactctccaagctggccagcaacgggacccccatggggaccttcgccccgctctgggaggtcttccgcgtctcctcggacaagctggcgctgtgccacctggaactgacacggaagttacaggatctcatcaaggacgttctccgctacggcgaggaacagctcaagacccacaagaaggtactctcgggcgtcagccagctcctgcccaagtcccgcgagaactacctgaaccgttgcatggaccaggagcggctgcggagggagagtaccagccagaaggagatggacaaggcggagactaaaaccaagaaggcggcagagagcctgcggcgctcagtggaaaaatacaactcagcccgagctgactttgagcagaagatgctggactcagccctg

SEQ ID NO: 133952 - DNA, 1287 bp, Homo sapiens
  Payload ID: 6164
  Gene Symbol: FCHO2
  Gene Name: FCH domain only 2
  ENST ID: ENST00000287761
  CDS Start-End: 27-1163
gcggaacccggcgcggcggcggcacgatggtcatggcgtatttcgtcgagaatttttggggggaaaaaaatagtggctttgatgtcctctaccataatatgaaacatggacagatatcaacaaaagaactagcagattttgtaagggaacgagctaccatagaggaggcatactccaggtcaatgacaaaactagcaaaatctgcaagcaattattcacaacttggaacatttgcaccagtatgggatgtattcaaaacatctacagagaaattagcaaattgtcacttggatcttgttagaaaattacaagaattaataaaggaagttcagaagtatggagaagaacaagtaaagtctcataaaaagactaaagaagaagttgcaggaactctggaagctgtccaaaccattcagagcataactcaggccctccagaaatccaaggaaaattacaatgccaagtgtgtagaacaggagcgtttgaaaaaggaaggagctacacaaagagaaatagaaaaggcagctgttaaatctaagaaagctacagatacctataaactctatgtggaaaaatatgcattagcaaaagctgatttcgaacagaaaatgacagaaacagctcagaaatttcaagatattgaagaaactcatctcattcacataaaggaaattataggatccttgtcaaatgctataaaggaaattcatttgcagataggccaggtccatgaagaatttataaataacatggctaatactacagttgaaagtttgatacaaaaatttgctgagtcaaaaggcactgggaaggaaagacctggcctcattgaatttgaagaatgtgacactgctagtgcagttgaaggtataaaaccaaggaaaagaaagacctttgctttgccaggaatcattaaaaaggaaaaagatgcagaatctgtatggagtttcactgttgttgcccaggttggaatgcaatggcgcgatcttggcttactgcattctccacctcccaggttcaagcgattctcctcctacctcagcctcccaagtagctggaattacggcgcccaccaccacatctggctaattttttgtatttttagtagagacagggtttcaccatattggccaggctggtcgcgaactcctgacctcaggtgaaccacccgcctcagcttcccaaagtgctgggattacaggcctgagccacgcgcccggcctgatttaccttcttttaaaaataaaaaattaatatacaaagaatatgtaataaacatgtaagaaa

SEQ ID NO: 133953 - DNA, 4981 bp, Homo sapiens
  Payload ID: 6164
  Gene Symbol: FCHO2
  Gene Name: FCH domain only 2
  Uniprot ID: Q0JRZ9
  ENST ID: ENST00000430046
  CDS Start-End: 117-2549
gccggtctctgggaagaaggcggcggcggcgaaaggcgggggtgctgtgggggccgggccgtgtttacacagcggcgggcgggcgcggacgcggaacccggcgcggcggcggcacgatggtcatggcgtatttcgtcgagaatttttggggggaaaaaaatagtggctttgatgtcctctaccataatatgaaacatggacagatatcaacaaaagaactagcagattttgtaagggaacgagctaccatagaggaggcatactccaggtcaatgacaaaactagcaaaatctgcaagcaattattcacaacttggaacatttgcaccagtatgggatgtattcaaaacatctacagagaaattagcaaattgtcacttggatcttgttagaaaattacaagaattaataaaggaagttcagaagtatggagaagaacaagtaaagtctcataaaaagactaaagaagaagttgcaggaactctggaagctgtccaaaccattcagagcataactcaggccctccagaaatccaaggaaaattacaatgccaagtgtgtagaacaggagcgtttgaaaaaggaaggagctacacaaagagaaatagaaaaggcagctgttaaatctaagaaagctacagatacctataaactctatgtggaaaaatatgcattagcaaaagctgatttcgaacagaaaatgacagaaacagctcagaaatttcaagatattgaagaaactcatctcattcacataaaggaaattataggatccttgtcaaatgctataaaggaaattcatttgcagataggccaggtccatgaagaatttataaataacatggctaatactacagttgaaagtttgatacaaaaatttgctgagtcaaaaggcactgggaaggaaagacctggcctcattgaatttgaagaatgtgacactgctagtgcagttgaaggtataaaaccaaggaaaagaaagacctttgctttgccaggaatcattaaaaaggaaaaagatgcagaatctgtggaatgtcctgatgcagattcattgaacattcctgatgtagatgaagaaggctacagtattaaaccagaaacaaatcagaatgataccaaagagaaccatttctactcatctagtgattctgactccgaagatgaagaaccaaagaagtatcggatagaaattaagcctatgcatccaaataactcacatcacacaatggcttctttggatgaattaaaagtatctatagggaatataacactctccccagcaatatctagacacagtccagtacagatgaatcggaatttgtctaatgaggagttaacaaaatcaaagccatctgctccacccaatgaaaaaggaaccagtgatttacttgcttgggaccccctatttggaccatctcttgattcatcttcttcatcttcactaacttcatcatcatcagccaggcccacaactcctctttctgtaggcaccattgtcccacctccgaggcctgcttccagaccaaagcttacttcaggcaaactcagtgggattaatgaaatacccaggccattcagcccacctgtaacttccaacaccagcccacctcctgctgcaccattagcccgggcagaaagttcttcttctatctcatcatctgcttcattgagtgctgccaatactccaacagtaggtgtgtcacggggtcccagccctgtcagccttggaaatcaggataccttacctgtggcagttgcccttacagaatctgttaatgcctactttaaaggagcagatcccaccaagtgtattgtgaagatcactggtgatatgacaatgtcatttccaagtggaattattaaagtcttcaccagcaatccaactccagctgtgttgtgcttcagggtgaaaaatatcagcagactagagcagattcttccaaatgcacagcttgtgttcagtgatccatcacaatgtgattccaacacaaaagatttttggatgaacatgcaagctgttacagtctacctcaagaagctgtcagagcaaaatccagctgcttcttattataatgtagatgtattaaagtatcaggtatcatcaaatggtattcagtccactcctctgaatcttgcaacatactggaaatgtagtgctagcaccacagatcttagagtggattataaatacaatccagaagctatggtggcacctagtgtgctttccaacatacaggtggtggtaccagtggatggaggagtaacgaacatgcagtcccttccccctgcaatatggaatgcagaacaaatgaaagccttttggaaattgtctagtatttcagaaaaatcagaaaatggaggttctgggtccctccgagcaaaatttgatctttcagaaggacctagtaaacccacgacacttgcagtacaattcctcagcgagggaagtaccctttcaggagtagatttcgaacttgtgggcactggctataggctttccttaataaagaagcggtttgctactggacgatacctggcggattgttgatggacctgggaaagtgatgtggcttcagggattacaaacctgccattctgcattatctgttctttccaaacactattttaacttgtatgatgtctttcaaacttagacatatttgagagctgactacaaacattaaatcgcacttttaaagtgagtcattgaaataaatagtactgaaatgattctctatgttgtaaatgatcaactacaatattcaggaagcacatttattcagattctcagtaaaaatgaagtttttgtaggattaatttttaaattatttccagtgtctatgttgaaaaaaagggttatagtgtaatatcaggcctaaagtttcagaagagcaagcacaaagtaatttagctttccatacatttttagagtcagagataactttgaaatttcataagtttgatattcagtggatacaaatagaacatgaattctaagttttgggtaatgttaactcagaacacttaatcaaattgagctatgtgccataaggtaatcagaccagagtccaagttgtatgcaaaaaatctataatttgattctcataaacatattaataaagtataagtgatgttttatatgatttttaaaaaaaattctcaagtgcaatgtgttttaaaataagcttgcaaatgacagcagagacatttacttctgcagttagttaactttataggagttgtgatttttttgatgaattaatgctgtagatttaatttatttttatatggaattgcataatgtgtgccttttaaaacaataacaaaaaccagagatgtgcctatacaatttgtgttcattaatgtgcctcactttttttctcagtctgaatcttctgttcagaatcttacagtgatcaagcatttttataagatatttgcaatttttgtaaatatttttggcctgcaactgggaaggggattcagagtcataaagcctaacttaagaatcctggctcacttctttggtgatacactgtagccactagaaagagaaataaacccaatggcatgtgtttacaggaagaaagattaccttcagatacttgacattaacctcatcaaaagtgtgtgaattttaaaacaaattctaaaaaaactatagtgctaaattggtaactggtattttaactctcaatttagcattttccttgatactttatcattgaaaatttatgcatttatttactgattgtgttgtgaacatgagttttatggtattttgtgagggatgcattttttaaaagattaattttggaaacagaaggagaagcactgccatttgtttttatttcaacaattggaaaaattaccaatttgtacattttaattattcaatttctactttgtaaaaatagggaaattatttgaagtgatatatttggttaaacatttctaaaaataaactaccaatactaaatagtaagaaacctaactttagtagcaaatcttgattaattgaagaaataaaatatttcggataaggtttcataatttacaaatgggaatttcatttataataataaatatgagtgtcctttatttgcctagtagaagtgataaattgtgttatatatgataatttatataaaaccactaattgttccgttaagcttcacagaaaataaaacctctattactagacatttatgtaacatcttgctgtactaaatacagcagaaaatctactctttagcaatatataacacagtatatgcttttttatatattcaatgttagcccaagtctgaatttacatttgactaaagcagcacataagataatttgctaaaatgctaatctttactaaatagtgagctaaattagaatttctaactcttatattgtgctcttttaaatgccaattacagtcccttactggaattctaactgtaatttgctttgcaatcaaactgcttttagggcagccaatattttattattggaattcagacactgttcttaccgtgtttgtttttaatcaaatattacctaaaaatgtacaaattagtgaaatggttaaacttctgcactttcttagttaccacagtcttcataccaagtattgggtacaggttacaattttgaagccatatgagtttatattgattttttttttccatttaaaaatccactaatggtgtaaaagagaccagtagattttcaatgggaaatgtacctagcaagctggttcttgcttatatatagtgataaactttgtagctgcctctttaaccaagaatttgtaaacacaactctaataaatgtgagttttaaaggattgttatttactactttggattgtaattagaacaatgcacatctgtcttccaagattttgtaaatatttttgatttttttcattaaatgtaaattttacataaaagttgtgctcttaataaacatgtaatatataattta

SEQ ID NO: 133954 - DNA, 726 bp, Homo sapiens
  Payload ID: 6164
  Gene Symbol: FCHO2
  Gene Name: FCH domain only 2
  ENST ID: ENST00000507345
  CDS Start-End: 32-726
cggacgcggaacccggcgcggcggcggcacgatggtcatggcgtatttcgtcgagaatttttggggggaaaaaaatagtggctttgatgtcctctaccataatatgaaacatggacagatatcaacaaaagaactagcagattttgtaagggaacgaacatttgcaccagtatgggatgtattcaaaacatctacagagaaattagcaaattgtcacttggatcttgttagaaaattacaagaattaataaaggaagttcagaagtatggagaagaacaagtaaagtctcataaaaagactaaagaagaagttgcaggaactctggaagctgtccaaaccattcagagcataactcaggccctccagaaatccaaggaaaattacaatgccaagtgtgtagaacaggagcgtttgaaaaaggaaggagctacacaaagagaaatagaaaaggcagctgttaaatctaagaaagctacagatacctataaactctatgtggaaaaatatgcattagcaaaagctgatttcgaacagaaaatgacagaaacagctcagaaatttcaagatattgaagaaactcatctcattcacataaaggaaattataggatccttgtcaaatgctataaaggaaattcatttgcagataggccaggtccatgaagaatttataaataacatggctaatactacagttgaaagtttgatacaaaaatttgctgagtc

SEQ ID NO: 133955 - DNA, 2700 bp, Homo sapiens
  Payload ID: 6164
  Gene Symbol: FCHO2
  Gene Name: FCH domain only 2
  Uniprot ID: Q0JRZ9
  ENST ID: ENST00000512348
  CDS Start-End: 29-2362
acgcggaacccggcgcggcggcggcacgatggtcatggcgtatttcgtcgagaatttttggggggaaaaaaatagtggctttgatgtcctctaccataatatgaaacatggacagatatcaacaaaagaactagcagattttgtaagggaacgagctaccatagaggaggcatactccaggtcaatgacaaaactagcaaaatctgcaagcaattattcacaacttggaacatttgcaccagtatgggatgtattcaaaacatctacagagaaattagcaaattgtcacttggatcttgttagaaaattacaagaattaataaaggaagttcagaagtatggagaagaacaagtaaagtctcataaaaagactaaagaagaagttgcaggaactctggaagctgtccaaaccattcagagcataactcaggccctccagaaatccaaggaaaattacaatgccaagtgtgtagaacaggagcgtttgaaaaaggaaggagctacacaaagagaaatagaaaaggcagctgttaaatctaagaaagctacagatacctataaactctatgtggaaaaatatgcattagcaaaagctgatttcgaacagaaaatgacagaaacagctcaggtccatgaagaatttataaataacatggctaatactacagttgaaagtttgatacaaaaatttgctgagtcaaaaggcactgggaaggaaagacctggcctcattgaatttgaagaatgtgacactgctagtgcagttgaaggtataaaaccaaggaaaagaaagacctttgctttgccaggaatcattaaaaaggaaaaagatgcagaatctgtggaatgtcctgatgcagattcattgaacattcctgatgtagatgaagaaggctacagtattaaaccagaaacaaatcagaatgataccaaagagaaccatttctactcatctagtgattctgactccgaagatgaagaaccaaagaagtatcggatagaaattaagcctatgcatccaaataactcacatcacacaatggcttctttggatgaattaaaagtatctatagggaatataacactctccccagcaatatctagacacagtccagtacagatgaatcggaatttgtctaatgaggagttaacaaaatcaaagccatctgctccacccaatgaaaaaggaaccagtgatttacttgcttgggaccccctatttggaccatctcttgattcatcttcttcatcttcactaacttcatcatcatcagccaggcccacaactcctctttctgtaggcaccattgtcccacctccgaggcctgcttccagaccaaagcttacttcaggcaaactcagtgggattaatgaaatacccaggccattcagcccacctgtaacttccaacaccagcccacctcctgctgcaccattagcccgggcagaaagttcttcttctatctcatcatctgcttcattgagtgctgccaatactccaacagtaggtgtgtcacggggtcccagccctgtcagccttggaaatcaggataccttacctgtggcagttgcccttacagaatctgttaatgcctactttaaaggagcagatcccaccaagtgtattgtgaagatcactggtgatatgacaatgtcatttccaagtggaattattaaagtcttcaccagcaatccaactccagctgtgttgtgcttcagggtgaaaaatatcagcagactagagcagattcttccaaatgcacagcttgtgttcagtgatccatcacaatgtgattccaacacaaaagatttttggatgaacatgcaagctgttacagtctacctcaagaagctgtcagagcaaaatccagctgcttcttattataatgtagatgtattaaagtatcaggtatcatcaaatggtattcagtccactcctctgaatcttgcaacatactggaaatgtagtgctagcaccacagatcttagagtggattataaatacaatccagaagctatggtggcacctagtgtgctttccaacatacaggtggtggtaccagtggatggaggagtaacgaacatgcagtcccttccccctgcaatatggaatgcagaacaaatgaaagccttttggaaattgtctagtatttcagaaaaatcagaaaatggaggttctgggtccctccgagcaaaatttgatctttcagaaggacctagtaaacccacgacacttgcagtacaattcctcagcgagggaagtaccctttcaggagtagatttcgaacttgtgggcactggctataggctttccttaataaagaagcggtttgctactggacgatacctggcggattgttgatggacctgggaaagtgatgtggcttcagggattacaaacctgccattctgcattatctgttctttccaaacactattttaacttgtatgatgtctttcaaacttagacatatttgagagctgactacaaacattaaatcgcacttttaaagtgagtcattgaaataaatagtactgaaatgattctctatgttgtaaatgatcaactacaatattcaggaagcacatttattcagattctcagtaaaaatgaagtttttgtaggattaatttttaaattatttccagtgtctatgttgaaaaaaagggttatagtgtaatatcaggcctaaagtttca

SEQ ID NO: 133956 - DNA, 5939 bp, Homo sapiens
  Payload ID: 6165
  Gene Symbol: FLVCR1
  Gene Name: feline leukemia virus subgroup C cellular receptor 1
  Uniprot ID: Q9Y5Y0
  ENST ID: ENST00000366971
  CDS Start-End: 199-1866
gccgcgcggcgcgggggaggagaccttcatctgttcacgcggtagcgcggattgcggttcgcggcgcgcgccaccggggaaggagcggtgggccgaggggttggaggtggggccccaggaggacctcgggctgtgggccgggagagcggagtcggggagtggggcgggggagcgaggtggcgccggggagcctgggatatggcgcggccagacgatgaggagggggcggcggtggcgcccggacacccgctcgcgaaaggatacctcccgttgccgaggggcgcgcccgttgggaaggagagcgtggagctgcagaacgggcccaaagcgggcaccttcccggtgaatggggccccccgggacagcctcgctgccgcctcgggagttctgggcgggcctcagactccactggccccagaagaggagacccaggcccggctgctgcctgcgggcgcgggagctgagaccccgggggccgagagcagcccgctgccccttacggcgctctccccgcggcgcttcgtggtgctcctgatcttcagcctgtactcgctggtcaacgcctttcagtggatccagtacagcatcattagcaacgtcttcgagggcttctacggtgtcaccttgctgcacatcgactggctgtccatggtgtacatgctggcctacgtgcccctcatcttcccggccacctggctgctggacaccagaggcctgcggctcaccgccctgctgggctccggcctcaactgcctgggtgcctggatcaagtgcggcagtgtgcagcagcatctcttctgggtcaccatgttgggccagtgcttgtgctcggtggcccaggtgttcatcctgggcttgccctcccgcatcgcctcagtgtggtttgggcccaaagaggtgtccacagcttgtgccaccgccgtgctgggcaatcagcttggaactgcagttggctttttgctaccaccagttttagtacccaacacacagaatgacacaaatctcctggcttgtaatatcagcaccatgttttatggaacatcagctgttgccacacttttatttattttaacagcaattgccttcaaagaaaaacctcggtatccaccaagtcaggctcaagcagctcttcaagacagtccccctgaagagtactcctataagaaatcaataagaaacctgtttaaaaacattccttttgtccttctgttgatcacttatggtatcatgactggtgccttttattcagtctcaacgttattaaatcaaatgatattgacatattatgagggagaagaagtcaatgctggaaggattgggctaacgctagtagtagctggaatggtgggctctattctttgtggcttatggctggattatactaaaacatacaaacagactactctgatagtttatattttgtcttttattggaatggttatctttactttcacattggaccttagatatattatcatcgtgtttgttactggaggggtgcttggcttcttcatgactggttacctccctttgggttttgaatttgctgttgaaatcacttaccctgaatctgaaggtacttcatctggtcttcttaatgcttctgcacagatatttggaattttgttcacattggctcaaggaaagctcacatcagactatggtcctaaggcagggaacatttttctctgtgtctggatgtttataggcatcatattaacagcattaatcaagtctgatctgcgaagacacaacataaatataggaattacaaatgttgatgttaaagctataccagctgacagtcccacagaccaagaaccaaaaacggttatgttgtccaagcagtcagaatcagcaatttgaagagaaaggcaaagttactgtcctgtagtaattggggacaatgtgatcatccttggagagagatgtgagcaccaaggctgggtttgtatgtggtgggggaataaacacacttacttgaaaattaccatatgaactctaaatgcataattattattttgcttaattgttaaattaagggaaattttcttaaaattcttctgtttacatcatgttaacactactgtttatctaattagtatccggtttttagtctcatattgtatctgaaagtaagcttcttgacgtttactttttaaaagtcgatgtttttcttttttgtagaaaatggaagcttagaatactttttaaagtgataatatggggtgttcagtccccataagatataatagttcatgcagtttatatattaaagtatccagtggaactaaatgtacaatatattcctaattggctgcctttttcactgtgctgaccagctgttcaagccacttcagtttgagtacaacataccaacatgacactactcacccacaaaggacagcattgggatcaggctttcagatgacctctaagatttttcccatttattgtactcttgttacaaagtactttttaacacatgcagtcaatggctataaaaactattctgtgtacagattctacccagactttggtcttagaattatgttctaattaaggagcctggttacaggttcattctgtcttgagttcttttctgtgctgcctttctatcatggataaatgctaacgctgtattttttcactccaacttgagatagagtagttttgtacccattgccttttttttcttttaaactctctttttttttttttcctgatgtgtaactttctagtaagataatttcatcatgtatgttactggctatttcatgatttcatgtatcacatcgtatattttgccttgaagattcctgaaataaggaaatctataataacttcagatagcctacatgtccccatttagtggagacctcttgaatgctatttgaattctgcagtatcatttttatgaccattctcctttgaggaatactatgcccaggtacatgctctatcagtgtgccgggagagtggattcttttcttcactgcagagtcatcacactgttagaatagtctgctcttttacatgctcaggtagggaaaataggaccaaatatatttccacagtgcctaccactgtgtcatgtttacagtgagagtttaaatattgttgatgtcctgactctgtgagctcatagggagtatcttcatagtaatgacatttgatcagccataaaatttacattatgttcatatgcacccaaaaaagctagtcaggtaatgaatacccttgaagtgaatagcaattttgatttaggcagtgtgttaggccatccttgcattgctataaagaaatatttaggctgggcgtggtggctcacgcctgtaatcccagcactttgggaggctgaagcgtgtggatcacctgaggtcaggagttcaagaccagcctggccaacatggtaaaaccccatctctactaaaaaaaaaaaaaaaaaaaaaaaaaaaaaaaaaggccaggcgcagtgctgtggctcatgcctgtaatctcagcactttgggaggccaaggcaggtggatcacaaagtcaggagttcaaaaccagcctggccaagatggtgaaaccccatctctactaaaaatacaaaaattagcgcagtggcaggcgcctgtaatcccagctactcaggaggctgaggcaggagaatcgcttgaatgcgaatggcagaggttgcagtgagcgaaaatcacactactgcactccagcctgggagataaagtgagactgtctcaaataaataaataaataaataaataaataaataaataaataaataaaacctgaggttgagcacgatggctcacacctatagtcccagcactttgggaggctgaggtgggtggatcatttgaggccaggagttgaagaccagtctggccaacatggcaaaaccccatctctactaaaaatacatacacacacacacacacacacaaattagccgggcatggtggcacacgcctgtagtcccagcttcttgggaagctgaggcatgagaattgcctgaacctggaaggcggaggctacagtgagctgagattgcgccactgcactccagcctgggtgacagagcgagactctgtttcaggaaaaaaagaacagaaatacctgagactgggtaatttataaataaaagaggtttaagtggctcacagttctgcaggctgtgtaagcatggcaccagtgtctgctcggcttctggggagccctcagggagctttactcatggtgaaaggctaagtgggagcagagatgtcacatggcgaagcaggagcaagagagcagggaggtgccacacaccttcaaacaaccagattttgtgaaaactcactcattactgcaaggacagcaccaagccatgagggatccacccgcaggacccaaacaccttctattagggccaaccttcaacattggggattacatttcaatgtgagattggagggacaagtatcccaactatatcaggcagaatatatgcattgatatatattgaaattataacattctctataatcaagtgactgtaaattatgtcgaatctgaccctggggaatgtgttatctaaagaatttgactaagaatcaggaactctgtgtccatgtcctggatgtatttctgtatgttcctataactctggacaaatcattaaacctctctgggcagcgttttcctcatccatgaaatgaatgtgttcaatttgatctcaaagatctttccaaaatattaaatgccattaatcatggaatagaccaaattattgtatcacaggaacttgaatccagccagagaaaaattccctggacaattggataaacaaatgtgattgctaccttatggatacaacggacttttacatttctttttagcctttttagtcagttgagggtaactcaagcagagtatgtccaatcattagcttcctttgatatttacattacaggtaaaaacggccaaaaatatattttaaggtctctccccaaatgtttttatttttaaactatcaatgttgtttaaaataatcatgtacttgttgagttcctgaggtttggaacaaattacacataaaatttagaatactttatttctgaaaagcatatacatatatgttatgtttatttttccttgttgattagaaaggtgatggaatatgtgacaatgcaaaatgaattgataatttttctgtattttgagtgaaagttgtctgtaatatgtcaagcaagaatgttataattctacagtaatgtgtgacttcatgacagagctacattctgagaaatttgtcattaggtgatttcatcattgtgtgaacatcatgaagtgtacttacacaaacctaggtggtagagcctactgcacacctgggctagatggcaaagtctgtcgcttctgggctacagacctgtacagcatggtactgtattgaatactgtaggcaactgtaacacaatggtatctgtgtaatctaaacatagaacagataatacattgtgctacaatgtaacaatggctgtggcatcactaggtgataggaatttttcagttccattataatcttataggatctctgtcatatgtggtcaattgttgatcgaaacatgactgtatgtcgtattttcagaaaatggaataggtaatcatcacttgtgtgaattttaatcaaatgacttaggaaagaaactggatgtttcaaaagctgttgcatttattacaaatgtcacaaatacagctcttgccttttgagaatgttggagagatgtctttaaaaaatatgtttgtgtgtaaaaatgtgtctgtatgcaatagctagaaaaatgcctgtgtcttaagtcattactcatgttctaatttttgttctttgtactatttatctgtatgcttgttcttcagtatttcagactcaaaataaatttatttttttatgttaa

SEQ ID NO: 133957 - DNA, 1108 bp, Homo sapiens
  Payload ID: 6165
  Gene Symbol: FLVCR1
  Gene Name: feline leukemia virus subgroup C cellular receptor 1
  ENST ID: ENST00000419102
  CDS Start-End: 1-1064
tggcctacgtgcccctcatcttcccggccacctggctgctggacaccagaggcctgcggctcaccgccctgctgggctccggcctcaactgcctgggtgcctggatcaagtgcggcagtgtgcagcagcatctcttctgggtcaccatgttgggccagtgcttgtgctcggtggcccaggtgttcatcctgggcttgccctcccgcatcgcctcagtgtggtttgggcccaaagaggtgtccacagcttgtgccaccgccgtgctgggcaatcagcttggaactgcagttggctttttgctaccaccagttttagtacccaacacacagaatgacacaaatctcctggcttgtaatatcagcaccatgttttatggaacatcagctgttgccacacttttatttattttaacagcaattggtatcatgactggtgccttttattcagtctcaacgttattaaatcaaatgatattgacatattatgagggagaagaagtcaatgctggaaggattgggctaacgctagtagtagctggaatggtgggctctattctttgtggcttatggctggattatactaaaacatacaaacagactactctgatagtttatattttgtcttttattggaatggttatctttactttcacattggaccttagatatattatcatcgtgtttgttactggaggggtgcttggcttcttcatgactggttacctccctttgggttttgaatttgctgttgaaatcacttaccctgaatctgaaggtacttcatctggtcttcttaatgcttctgcacagatatttggaattttgttcacattggctcaaggaaagctcacatcagactatggtcctaaggcagggaacatttttctctgtgtctggatgtttataggcatcatattaacagcattaatcaagtctgatctgcgaagacacaacataaatataggaattacaaatgttgatgttaaagctataccagctgacagtcccacagaccaagaaccaaaaacggttatgttgtccaagcagtcagaatcagcaatttgaagagaaaggcaaagttactgtcctgtagtaattggggacaatgt

SEQ ID NO: 133958 - DNA, 3632 bp, Homo sapiens
  Payload ID: 6166
  Gene Symbol: FLVCR2
  Gene Name: feline leukemia virus subgroup C cellular receptor family, member 2
  Uniprot ID: Q9UPI3
  ENST ID: ENST00000238667
  CDS Start-End: 357-1937
gggagaggactctgcgggcgaagtggctgcgcaaggagagaacttttcctgcacaaggaacgcctcgtggggagacccaaggcaggagcggtccggagccggctgcggcgtgtgcggccggccttgggacagcgatcgccgcgggtggcaacagagagccccaagcaaaagtgggagcaggagcttggaggtgagcacaggaagccccacttgaggcttttacgcagcctctagtctctgtttcttctggaataggcaagtgtcctttcaactctaagagaccagcagaggccactgtcccttaagactgccggagtcctcaccacttctccaggattccagaggagactgtggcgatggtgaatgaaggtcccaaccaggaagagagcgatgacacccctgtgccggagtccgcactccaagcggaccccagcgtctcggtccatcccagcgtctcggtccatcccagcgtctccatcaaccccagcgtctctgtccaccccagcagttcggcccaccccagtgccttagcccaacccagtggcttggctcaccccagtagctcgggccctgaggacctcagcgtgatcaaggtgagcaggcgccgttgggccgtggtcctggtgtttagctgctactccatgtgcaactcctttcagtggatccagtacggctccatcaataacatcttcatgcacttctacggtgtcagtgcctttgccattgactggctgtccatgtgctacatgctgacttacatccctctgctcctgccagtggcttggctgctggagaagttcggcctgcgcaccattgctctcactggctcggctctcaactgcctgggggcctgggtgaagctgggcagcctgaagccgcatctctttccggtcaccgtggtgggccagctcatctgctctgtggcccaggttttcatcctgggcatgccctcccgcatcgcttccgtctggttcggggctaatgaggtttcaacagcctgctccgtggctgtctttggcaatcagcttggaattgcgattgggttcttggtccctcctgttttggtacccaacattgaagaccgggacgagcttgcctaccacatcagcatcatgttctatataataggaggtgtggccactctcctcctcatccttgtcatcattgtgttcaaggagaaacctaaatatccccccagcagggcccaatccctgagctatgccttgacctctcctgatgcctcatacttaggttccatcgcccggctcttcaaaaatctcaactttgtgctgcttgtcatcacctatggtctgaatgctggtgctttttatgccttgtccactcttctgaatcgcatggtgatctggcactacccgggggaagaagtgaatgctggaagaattggcctgacgatcgtcattgcaggaatgcttggggctgtgatctcaggaatctggctggataggtccaaaacctacaaagagacaaccctggtagtctatatcatgacactggtgggcatggtggtgtacacgtttaccttgaacctgggacacctgtgggtagtgttcatcactgctggcacaatgggcttctttatgactggctatctcccactgggatttgagtttgctgtggagctcacgtacccagaatcagaaggcatctcctccggcctcctcaacatatctgcacaggtatttgggatcatctttaccatctcccagggccagattattgacaactatggaaccaagcctgggaacatcttcctgtgtgtgttccttactcttggagcagccctcactgcattcattaaggcagatctccggagacagaaagcaaacaaagaaactcttgagaacaaactccaagaggaggaggaggagagcaacaccagcaaagtgcccactgctgtgtcagaggatcatctctgagaggaaggtggtgacaactcagggaacacgaacaccccaccttttccttcagcacagctctcaccgccagcacaaagggcttcgctagagatgtttttggagggaatcagtgggactatttgtggcatggatggcctattcctcctagaacccacgtaagagcttggatgatttagttggagaaaattgcacctatcaccaaatgcaaatttgattcccacctccacccccttttaggttatgggagttggtgttgggacagggtggcagagaatattggagtcaatcctagcttggtctcttgccttccctcttttcctccatccatcgtggacaatgcctgcaaaattttcacaggaagaaagcctattcaggatattaacttgaaatttccagtgtcctaagagcctctcatgaagcccagttctaataagtggcaagctgctctgccggggtcatctcctgggtcatcggactgattgctcaagttctgcaggagaggaagcaccattagaacaactccatcagaacagctccaccgggacttgtgggcctaaattttcctggcctaacgggtctgtctccaaaccctctttcctaagagctgagcaaaccaaccataataaacttgacaaaagactttgttgtggccatgacagagataccgactcaggagggctacctacctaggtgtgatcatgctgggggctaccttctgagtatatttgtgaaagcacatatttgggaactctggtagcttgagttgggaatgggaaggttcttttttacagaagtacttccccagggacttctgtgtgtcacagtcacctctgatgcctttatcttgatgttgcattgggaatctcagccatcagcccaagtgcttgttttattccaaggcagggtaatccccgtcaacttactctaacctttgctgaaaactaatcttgattcattctactctgaaaatccaaaggtgcttctgagagataagagggaaggggtagaaggaaaggtgccccttgaaatgggaattgagcctgttagaattaaaagcttatctcacctctgctggggacagtatttgcaccaccaacccctctcctcacctgctttgagcgataatctttatcagatattctaaacttaaagggattccctttaaaccaactcaagctgatctttcctatctagcctgctgtttggctgtactcatgggctttggtaatatctcctaaaaatgaggttttggtaatttttcctatgcattgggcaactgtgatcgtgaccactgtgctgtcttgctccagccactgccctggcctcagcatatcagggcagcctgtgctggctgcaatactgtggtgcttgggccactgcctgagaggagccaggtttgtgtgtgtctgcatgtgtgtgtgtgtgtgtttgtacagattcaagcaatggatgcaaggaacatgctgtatgtaatagaagaaagaagtccacgttttcggcagaagtagtgagtcagtgtggaagagaggtgagggtgtgctttactttttgataaagagaaagatgtttactcataaacccttcaaaaggtattaacaaaatgtttaccaaacctattgctttattttaaaaacataatttgtgttttctatttgtaagatctgacatttcgaggcaataaaaacttctcagaaa

SEQ ID NO: 133959 - DNA, 1221 bp, Homo sapiens
  Payload ID: 6166
  Gene Symbol: FLVCR2
  Gene Name: feline leukemia virus subgroup C cellular receptor family, member 2
  Uniprot ID: Q9UPI3
  ENST ID: ENST00000539311
  CDS Start-End: 110-1075
acttctgctttctgacttgattacaggcatctttcctttttcatgctgtgcaaaaacttgagctcagcctctcaccccaacacaattcaagacgcagccttgtcccagcatgagcgcagataacagcagcaccatctgtgtttgtagaagcgtgagacaggagcttggaattgcgattgggttcttggtccctcctgttttggtacccaacattgaagaccgggacgagcttgcctaccacatcagcatcatgttctatataataggaggtgtggccactctcctcctcatccttgtcatcattgtgttcaaggagaaacctaaatatccccccagcagggcccaatccctgagctatgccttgacctctcctgatgcctcatacttaggttccatcgcccggctcttcaaaaatctcaactttgtgctgcttgtcatcacctatggtctgaatgctggtgctttttatgccttgtccactcttctgaatcgcatggtgatctggcactacccgggggaagaagtgaatgctggaagaattggcctgacgatcgtcattgcaggaatgcttggggctgtgatctcaggaatctggctggataggtccaaaacctacaaagagacaaccctggtagtctatatcatgacactggtgggcatggtggtgtacacgtttaccttgaacctgggacacctgtgggtagtgttcatcactgctggcacaatgggcttctttatgactggctatctcccactgggatttgagtttgctgtggagctcacgtacccagaatcagaaggcatctcctccggcctcctcaacatatctgcacaggtatttgggatcatctttaccatctcccagggccagattattgacaactatggaaccaagcctgggaacatcttcctgtgtgtgttccttactcttggagcagccctcactgcattcattaaggcagatctccggagacagaaagcaaacaaagaaactcttgagaacaaactccaagaggaggaggaggagagcaacaccagcaaagtgcccactgctgtgtcagaggatcatctctgagaggaaggtggtgacaactcagggaacacgaacaccccaccttttccttcagcacagctctcaccgccagcacaaagggcttcgctagagatgtttttggagggaatcagtgggactatttgtggcatggatggcctattcctcct

SEQ ID NO: 133960 - DNA, 532 bp, Homo sapiens
  Payload ID: 6166
  Gene Symbol: FLVCR2
  Gene Name: feline leukemia virus subgroup C cellular receptor family, member 2
  ENST ID: ENST00000555058
  CDS Start-End: 268-532
acagaagctggagcaaggttgggagctggttttctcctttttttcttctctcccctggaaactcctgatttctgcatacaatgactgggttgacatggctgggtctcctttggcggctctagaggtagctgtctgtatgcaagtctatttgctgtgttcatctactggaaaacataggagcttggaattgcgattgggttcttggtccctcctgttttggtacccaacattgaagaccgggacgagcttgcctaccacatcagcatcatgttctatataataggaggtgtggccactctcctcctcatccttgtcatcattgtgttcaaggagaaacctaaatatccccccagcagggcccaatccctgagctatgccttgacctctcctgatgcctcatacttaggttccatcgcccggctcttcaaaaatctcaactttgtgctgcttgtcatcacctatggtctgaatgctggtgctttttatgccttgtccactcttctgaatcgcatggtgatctggcactacccgg

SEQ ID NO: 133961 - DNA, 584 bp, Homo sapiens
  Payload ID: 6166
  Gene Symbol: FLVCR2
  Gene Name: feline leukemia virus subgroup C cellular receptor family, member 2
  ENST ID: ENST00000553587
  CDS Start-End: 107-508
ttgtctctgtcttctatagcttggaattgcgattgggttcttggtccctcctgttttggtacccaacattgaagaccgggacgagcttgcctaccacatcagcatcatgttctatataataggaggtgtggccactctcctcctcatccttgtcatcattgtgttcaaggagaaacctaaatatccccccagcagggcccaatccctgagctatgccttgacctctcctgatgcctcatacttaggttccatcgcccggctcttcaaaaatctcaactttgtgctgcttgtcatcacctatggtctgaatgctggtgctttttatgccttgtccactcttctgaatcgcatggtgatctggcactacccgggggaagaagtgaatgctggaagaattggcctgacgatcgtcattgcaggaatgcttggggctgtgatctcaggaatctggctggataggtccaaaacctacaagaatctgtgccatccaaattgcttgatccagtgaatctgctaggaaaggtctctgaggcccccgtctgctgactgcatgacaaaccctaaaggaaatgccaatcgtgatg

SEQ ID NO: 133962 - DNA, 669 bp, Homo sapiens
  Payload ID: 6166
  Gene Symbol: FLVCR2
  Gene Name: feline leukemia virus subgroup C cellular receptor family, member 2
  ENST ID: ENST00000554580
  CDS Start-End: 61-669
gggaggagactattttctttcttctccttcccacgctccacctcacttggcttttcaggaatgtctccttacgggatctcttcactcggaaatggactttctaagtggctgagtctgaatgctggtgctttttatgccttgtccactcttctgaatcgcatggtgatctggcactacccgggggaagaagtgaatgctggaagaattggcctgacgatcgtcattgcaggaatgcttggggctgtgatctcaggaatctggctggataggtccaaaacctacaaagagacaaccctggtagtctatatcatgacactggtgggcatggtggtgtacacgtttaccttgaacctgggacacctgtgggtagtgttcatcactgctggcacaatgggcttctttatgactggctatctcccactgggatttgagtttgctgtggagctcacgtacccagaatcagaaggcatctcctccggcctcctcaacatatctgcacaggtatttgggatcatctttaccatctcccagggccagattattgacaactatggaaccaagcctgggaacatcttcctgtgtgtgttccttactcttggagcagccctcactgcattcattaaggcagatctccggagacagaaagcaaacaaagaaactcttgagaac

SEQ ID NO: 133963 - DNA, 938 bp, Homo sapiens
  Payload ID: 6166
  Gene Symbol: FLVCR2
  Gene Name: feline leukemia virus subgroup C cellular receptor family, member 2
  ENST ID: ENST00000555027
  CDS Start-End: 52-777
tggattggttccattgaagaggaactcctgaggctgccctgtccacaagctatgtgtcctgacttacacccttccaagtatgtgcagccgccattgtcatcatcatcatcaccattgaagggaggccaggaggccttttctcctttgggtctgaatgctggtgctttttatgccttgtccactcttctgaatcgcatggtgatctggcactacccgggggaagaagtgaatgctggaagaattggcctgacgatcgtcattgcaggaatgcttggggctgtgatctcaggaatctggctggataggtccaaaacctacaaagagacaaccctggtagtctatatcatgacactggtgggcatggtggtgtacacgtttaccttgaacctgggacacctgtgggtagtgttcatcactgctggcacaatgggcttctttatgactggctatctcccactgggatttgagtttgctgtggagctcacgtacccagaatcagaaggcatctcctccggcctcctcaacatatctgcacaggtatttgggatcatctttaccatctcccagggccagattattgacaactatggaaccaagcctgggaacatcttcctgtgtgtgttccttactcttggagcagccctcactgcattcattaaggcagatctccggagacagaaagcaaacaaagaaactcttgagaacaaactccaagaggaggaggaggagagcaacaccagcaaagtgcccactgctgtgtcagaggatcatctctgagaggaaggtggtgacaactcagggaacacgaacaccccaccttttccttcagcacagctctcaccgccagcacaaagggcttcgctagagatgtttttggagggaatcagtgggactatttgtggcatggatggcctattcctcctagaacccacgtaaga

SEQ ID NO: 133964 - DNA, 1020 bp, Homo sapiens
  Payload ID: 6166
  Gene Symbol: FLVCR2
  Gene Name: feline leukemia virus subgroup C cellular receptor family, member 2
  ENST ID: ENST00000556856
  CDS Start-End: 75-356
ttgggttcttggtccctcctgttttggtacccaacattgaagaccgggacgagcttgcctaccacatcagcatcatgttctatataataggaggtgtggccactctcctcctcatccttgtcatcattgtgttcaaggagaaacctaaatatccccccagcagggcccaatccctgagctatgccttgacctctcctgatgcctcatacttaggttccatcgcccggctcttcaaaaatctcaactttgtgctgcttgtcatcacctatgaaactccaagaggaggaggaggagagcaacaccagcaaagtgcccactgctgtgtcagaggatcatctctgagaggaaggtggtgacaactcagggaacacgaacaccccaccttttccttcagcacagctctcaccgccagcacaaagggcttcgctagagatgtttttggagggaatcagtgggactatttgtggcatggatggcctattcctcctagaacccacgtaagagcttggatgatttagttggagaaaattgcacctatcaccaaatgcaaatttgattcccacctccacccccttttaggttatgggagttggtgttgggacagggtggcagagaatattggagtcaatcctagcttggtctcttgccttccctcttttcctccatccatcgtggacaatgcctgcaaaattttcacaggaagaaagcctattcaggatattaacttgaaatttccagtgtcctaagagcctctcatgaagcccagttctaataagtggcaagctgctctgccggggtcatctcctgggtcatcggactgattgctcaagttctgcaggagaggaagcaccattagaacaactccatcagaacagctccaccgggacttgtgggcctaaattttcctggcctaacgggtctgtctccaaaccctctttcctaagagctgagcaaaccaaccataataaacttgacaaaagactttgttgtggccatgacagagataccgactcaggaggg

SEQ ID NO: 133965 - DNA, 719 bp, Homo sapiens
  Payload ID: 6166
  Gene Symbol: FLVCR2
  Gene Name: feline leukemia virus subgroup C cellular receptor family, member 2
  ENST ID: ENST00000553341
  CDS Start-End: 109-719
ggttgtctctgtcttctatagcttggaattgcgattgggttcttggtccctcctgttttggtacccaacattgaagaccgggacgagcttgcctaccacatcagcatcatgttctatataataggaggtgtggccactctcctcctcatccttgtcatcattggtctgaatgctggtgctttttatgccttgtccactcttctgaatcgcatggtgatctggcactacccgggggaagaagtgaatgctggaagaattggcctgacgatcgtcattgcaggaatgcttggggctgtgatctcaggaatctggctggataggtccaaaacctacaaagagacaaccctggtagtctatatcatgacactggtgggcatggtggtgtacacgtttaccttgaacctgggacacctgtgggtagtgttcatcactgctggcacaatgggcttctttatgactggctatctcccactgggatttgagtttgctgtggagctcacgtacccagaatcagaaggcatctcctccggcctcctcaacatatctgcacaggtatttgggatcatctttaccatctcccagggccagattattgacaactatggaaccaagcctgggaacatcttcctgtgtgtgttccttactcttggagcagccctcactgcattcattaaggcagatctccggagacagaaagcaaacaaagaaactcttgagaa

SEQ ID NO: 133966 - DNA, 9593 bp, Homo sapiens
  Payload ID: 6167
  Gene Symbol: FEM1A
  Gene Name: fem-1 homolog a (C. elegans)
  Uniprot ID: Q9BSK4
  ENST ID: ENST00000269856
  CDS Start-End: 175-2184
atttcccggcgtgctgccatccgtcgggtcgcggcagccattttgttccgcccgaggagaccctaagatggcggcgagggggacggtgaaggttgcctcccgcccgtccgggctctgatcctccgtctccccgtcccccggcggccggcccatggcctggcggaggcccgaaccatggacctccgcaccgccgtgtacaacgccgcccgtgatggcaagctgcagctgctccagaagctgctcagcggccggagccgggaggaactggacgagctgacgggcgaggtggccggcgggggaacgccgctactcatcgccgcccgctacggccacctggacgtggtggagtacctggtggaccggtgcggcgcgagcgtggaggccggtggctcggtgcacttcgatggcgagaccatcgagggcgcgccgccgctgtgggccgcctccgcagccggccacctggacgtggtgcggagcctgctgcgccgcggggcctcggtgaaccgcaccacgcgcaccaactccacgcctctccgcgccgcctgcttcgacggccacctggaggtggtgcgctacctggtcggcgagcaccaggccgacctggaggtggccaaccggcacggccacacgtgcctcatgatctcgtgctacaagggccaccgtgagatcgcccgctacctgctggagcagggcgcccaggtgaaccggcgcagcgccaagggcaacacggccctgcatgactgcgccgagtccggcagcctggagatcctgcagctgctgctggggtgcaaggcccgcatggaacgtgacggctacggcatgaccccgctgctcgcggccagcgtgacgggccacaccaacatcgtggagtacctcatccaggagcagcccggccaggagcaggtcgcagggggagaggctcagcctgggctgccccaagaagacccctccaccagccaggggtgtgcgcagcctcagggggctccgtgctgcagctcctccccagaggaaccactgaacggggaatcttacgaaagctgctgtcccaccagccgggaagctgccgtggaagccttggaattgctgggagctacgtatgtggataagaaacgagatctgcttggggcccttaaacactggaggcgggccatggagctgcgtcaccaggggggcgagtacctgcccaaaccggagcccccacagctggtcctggcctatgactattccagggaggtcaacaccaccgaggagctggaggcgctgatcaccgacccggatgagatgcgcatgcaggccctgttgatccgggagcgcatcctcggtccctcgcacccggacacttcctattacatccgttacaggggtgccgtgtacgccgactcgggcaatttcgagcgctgcatccgcttgtggaagtacgccctggacatgcaacagagcaacctggagcctctgagccccatgaccgccagcagcttcctctccttcgcggaactcttctcctacgtgcttcaggaccgggccgccaaaggcagcctgggcacccagatcggctttgcagacctcatgggggttctcaccaaaggggtccgggaagtggaacgggccctgcagctgcccagggagcccggagactcagcccagttcaccaaggcgctggccatcatcctccacctgctctacctgctggagaaagtggagtgcacccccagccaggagcacctgaagcaccagaccgtctaccgcctgctcaagtgcgcgcccaggggcaagaacggcttcacccctctgcacatggctgtggacaaggacaccacaaacgtgggccgctatcccgtgggcagattcccctccctgcacgtggtcaaagtgctgctcgactgcggggccgacccggacagcagggattttgacaacaacaccccgctacacatagcagcccagaacaactgcccggccatcatgaatgccctgatcgaagcaggggcccacatggacgccaccaatgccttcaagaagacggcctacgagctgctggacgagaagctgctggccaggggtaccatgcagcccttcaactacgtgaccctgcagtgccttgcggcccgggccctggataagaacaagatcccttacaagggcttcatcccggaagatctggaggcgttcatcgaactgcactgacctgcccagaacgcctgcaccctcacctctcccctctcctgctgagatgggggaaatccggctgcggcatagcagatgctcgttcttgcctccttcaggcaccaatcaggagaagggttctgcctcccatcccctctacctgcagacagggtcggaggtgttagcgagcctttggtgctagaagcctgcggggtcatgtgctaagaggacagtctttctccgggagcccgctcactcattctgagttaggaaaagacacaagaccttccccacatcctgtctgcctgggttagggaggcctttgccttgttacctagaggcggagggactgaagccattgcgttccttccctgctagaaacacaggaagaagttgaggactgtctgccttccctcgtccctttacctggccagataactccagccgctgaatacagtgttaggactgggggctcctgagatgagagtttgagattcagggaatgagaccacctctcatttcttccagcatgatcgcgccctgctcccgtgccaccgtagtccctggcagacaggcagggctctgcccagggcagcctgccacttgcatagctttcggttggtttggtgttctgtttatttaataagtgggcaggttgcaagcgttgcacagaaattctgagattttactgcctttttttttttttttaagaaagttgtttgttggactccataagtgaatttcaagcagtgaggattttgtggtgcctgagatggccgagggcacagggagtgagctgtatgtgtgaggaatttggtgagcgagataaaagtccacggtgtcaacccctaaaacatgggtgaccgtacatttttatacatctccactctacggccttttacaggctttccgattttacaggcctttccaagtttccattctccttagagagagaactgtgcttccaaacagaaatcaggagtgaccacaaagcctgaaaacactttgccacccagcaaagaactggcacaattggtttgggtctgcattgccatagtgcccgagttaaaactgcaggccactctgccttgcagtggcctctgatttcattgtgggtgcatccacaggtggcccgagctgttctttcagctgctccaaggattgagacccaagtcatcatgaaaaaggcccaagtacagtcttaatgcgataaatccactagctaagacgtcgagtgccaagaccagccttccagccgaggtttggacaaagtctcaggttcccgtgactcagggtaaggtgctggggctgccagaggacctgccccagcaagatttttgtcaagagcgagactccatcagcccaggcagacgggagcaggttcttggccagcgtagacagcagcaaacagcagcagggaagccattctcactgcatcctccctgcagtagccacggccaggcccttaggaggagcagtgaccgggggtgtccagaaatatcctgtccctggatggaaactaggtctcgtttggatttttttttttttttgccgtgttaggaaattatttattaatttacaagacaggttttaactcagccgaggtgggaaatggtgtccctgtccctcccaaagcacagagcacagaaatgaggccgtttacatggcgagtctccgtgctggtgtttaagtcattaaaaagatactcaaagagaatggcctgcctgatgcgtccttggcgtgggttaactggggaagtcggaggtgggtgagtcagtccatggcattggtgtgagtgaacagagagccctagggccacctcccctagccagaggggtttctgtgttacatactggggctttttttttttttttgagacagagtctcaccctgtcccccaggctggagtgcaatggcgcgatctcagctcactgcaacctctgcctcctgggttcaaacaattctgcttcagcctcctgagtagctgagattacaggcacctgccactatgcccagctaatttttgtattttctgtagaggcaggttttgccatgttggccaggctggtctcaaactcctgaactcaagcgatcctcccacctcagcctcccaaagtgctggaattacaagcatgaaccactgcacctggcctctatgttacatactggggctttgtgtaaaatttcatttgaaaaacagtatgttgctctttgaaaaaaagcctgggcaacatagtgagagcctgtctttacaaaaataaaaaataggctgggtacggtggctcacatctgtaatctcagcaccttgggaagcctgggcaacatagtaagacctctgtctctacattttttttttttttttttttgagatggagtcttgctctgtcacccaggctggagtgcagtgacgccatctcggctcactgcaaccgctgcctcccgggttcaagtgattctcctgcctcagcctcctgagcatctgggactacaggcatacaccaccatgcctggctaattgtgtatttttagcagagacggggtttcaccatattggccatgctggtctcaaactcctgaccttgtgatccactcgcctcggcctcctaaagtgctgggattataggtgtgagccaccacgcctggcccttttttgttttcctttatctgccatctcatctcacctccttgtgtaaacttgttccattctaaaattctggttttctccatatcagaacagtcaaacccccaccagaaagcaccaccccgttagctgggtccatgggattttgctgagcccctgccatgtgccaggcaggtttcaggcccccttggggataaggattgagctgtcgatatgaacgtccggttaatccctgtgcgcccgcctcacgtggcagtggggagaggccctgctgtggggcaccgcatgctgcttccatggtgcattgggttggagggctcttctcccgagggtgggtgtctcccatctcttgccttcacacacctgctgtcttgtttcatttgggactggacagtcccacaggtgacagctgttgggctgttgtatgcctgtttggtgttgcatcaaaggagtgggtttgaatcagcaggtgctctcaaagctgtctcctgggagacacagtactagtgagcatttattgagcacctactgtatgccaggcaccattttctgtggttaaatgcactgcctgtttacacaacagccctctaaaggaggaaaaacatatcagagtcccatggatggaagaaaaataatgaagtaggaaaaacggccctcttaagatgaaggtcatctttttttttttttttttttttttttgagacggagtctctgtcgctcaggctggagtgcagtggtgtgatctcggctcactgcaagctcagcctcccgggttcacaccattctcctgcctcagcctcccgagtagctgggactacaggcacctgccaccatgcccggctaattttttgtatttttagtagagatggggtttcaccgtgttaggatagtcttgatctcctgacctcatgatccgcccacctcggcctcccaaagtgctgggattacaggcatgagccaccgcacccgaccagatgaaggccatcttaaagctcaaccagtttcaggtgagggctgatccagcagatcccaattattcctaaagacctggttgatagctcccttgagactggggtggggtgggtgtcccaagatgaccgccagcagaaaagagagcatctttctcccagtcaaaagccaaagtaggacctatctaaagtaagtcctggccgggcacggtggctcacacctgtaatcccagcaccttgggaggctgaggctggaggatcgcttgagcctgggagtttgagaccatcatgggcagcaaagtgagatcctgtctctacaaaaaaaaaaaaaaaaaaaaattagccatgtgtagtgatatgtagtcccagctgctactggggaggctgaagcaggaggattgattgagcccaggagtttgaggctgcagtgagccttaatggcaccatcacactccagcctgggcaacagagtgagaccctgtttcaaaaaaacaaagcagggccgggcgcaggggctcacgccagtaatcccagcactttgggaggccaaggcgggcggatcacgaggtcaggagatcgagaccatcctggctaacacggtgaaaccccgtctctactaaaaatacaaaaattagccgggtgtggtggcaggtgcctgtagtcccagctactccggagtctgaggcaggagaatggcgtgaacccgggaggcggagcttgcagtgagccgagatcgcaccactgcactccagcctgggcgacagagcgagactccgtctcaaaaaacaaacaaacaaacaaacaaaacaaagcaggtccggtatggcaggcgggggaactgaggctactaagagacattaagatgcttaaggacagccgggcgcggtggcagacgcctgtaatcccagcactttgggaggctgaggcgggcggatcacgaggtcaggagaccaagaccatcctggctaacacggtgaaaccccgtctctctactaaaagcacaaaaaattagccaggcatggtggtgggcgcttgtagtcccagctactcgggaggctgaggcaggagaatggtgtgaactcaggaggcggagcttgcagtgagccgagatcgcaccactgcactccagcctgggcgacagagcacaagactccatctcaaaaaaaaaaaaaagaaagaaaaatgcctaaggacacagcgcatgaaggaagggtcgagattggaacccaggaccgtcagagttcataccttgtgctgattctccatccgggacgccagacacatggatccctttcccctgctttctggtgttgttttggcacaagctctcccatccctggggcaggtggccatcctgcctccgcatcctgagcgtctgtttccctcggggatctgccagactcagccccctaaccccaagaaaatcactcacaaaaatcatctgagctaaatgcttgctttgaaagctcagacctggggattgtaactttagcctcataccttctaatgaaggccatcttaaagctctaccagtttcagctgagggccgatccagcagatcccagttgttcctaaagacctggttgctagctcctctgagactggggtggggtgggtgtcccaaggtgatgaccaggagaaaagagagcgtcttcctcccagtcacatcccaagattcgtgaccgagcgcggtggctcacgcctgtaattccagcactttgggagaccgaggcaggtggatcacgaggtcaggagttcgagaccagcctggtcaacatggtgaaaccctatctattctaaaaatacaaaaaattagccaggcacggtggcaggcacctgtaatcccagctacttgggaggctgaggaaggagaatcgcttgaacccgggagatggaggttgcagtgagccgagattgcaccactgcactccagcctgggcaacagagcaagactctgtctcaaaacaaaacaaaacaaacaaacaaacaaacaaacaaaaaactaaaaacatcaagatacgctctgattggaccagcctgggtcccatgttcttccatgacccaatcctagtagcccaggagtgggatgtgccaattggcttggcctgaggagggcccccagagggtctgtaatccatgtgtaactggagttgctgtaaaatggggccatctggctgggtgcggtggctcacgcctgtaatcccaacactttgggaggccgaggcgggcggatcacgaggtcaggagatcaagaccatcctggctaacacggtgaaaccccgtctctactaaaaatacaaaaaattagccgggcgtcgtggcaggcgcctgtagtcccagttactcgggaggctgaggcaggagagtggcgtgaacccgggaggcggagttacagtgagccgagatcgcgccactgcactccagcctgggtgacatagcaagactctgtctcaaaaaaaaaaaaaaaaaaaaaaaaaaaaatggggccatcaatgccatggagggtagcaaaaaatgttcacaatagtaaaatgactacctgccgttgatcagtgaagaaaaaagctcagagagctcaagtggagtacctaaggccacacagccaagagggagagccaagtcgtttgtggttaaatgtcctgcctgtttacacagcagccctctaaaggcggaaaaacatgtcagagtcccatggacgggagaaaaataagaataataataaagtaggaaaaacagccctcttaagaggaaggccatcttaaagctctaccagcttcaggtgagggctgatccagcagatcccagagaaacaggctcacagagaggggagggggcttgtctaagcttacccagcccggaagcatcggggtcaaagcttaaccccctgctggaaggtgtcgagagccaggcagccaagcctgacctgggagatggggaagtgggggcccccccaagctcgccgactgcccttcccagcctgctgccagtctgattccacagaactgaagtcgggacctggagttctgctcattcgctcatctactcagtgactttcttagaccctccccagcactttgagggtgtcagtcactgctgcgtcctcagcacccacgccagggtctgtcccacgccaggtggcctgtaaatatgggctgagcaagcgaacagtgaacgagttgggaattcacatcctcctctgactacttggggcagcagcaggggacacaagcaggcccctatggctttgccagaccccgggtgccgccgcccccatggaattgcaggactgttatctgagcaacgtcgacgggggagaacacccctgcccgaggttaaagatagcaccgctcgaatcacatcacaggccgaaaaggccagatgacccaccagggacattgaatccgtgtcccgagaggggtggggcgggggtgtggattcctgcggggagcttcgggactggaaaaaacagagggtgctctgaccgagtgtttaccaaaacatgtattaggcaagacccgggccgaatgtgggtggcaccgcccctgtgctgggccaggagaatgtgcccgcaccggtcccagatcctgtttccccagtgggttgtacaagacaccttgaacttctgcatgaactgggacattcagaattccctggagcaaccccctccctccaccctgtgccttgatatctcctattaaagcttgtgtttgaatgtctgttaatagacatgatttaattattgatattaattcaaatgtattaatttgaattattaacttattaatcatttgatgtcgattaaagcaatgatcttgatccaa

SEQ ID NO: 133967 - DNA, 7122 bp, Homo sapiens
  Payload ID: 6168
  Gene Symbol: FEM1B
  Gene Name: fem-1 homolog b (C. elegans)
  Uniprot ID: Q9UK73
  ENST ID: ENST00000306917
  CDS Start-End: 616-2499
cgctcttgcgggagcgttccgcatcgccccgggggcccctacgcgaggatctccggggccgttggcagcgcctggcacttctgagctcggcggacgagagcctgcaggtttcctccagtcagggacggcgaagggcggaaagcgcaggaggaggcagtgttaggccttaggccgggtgggccgggtcaggagagacgcgcccatctttcgccatccggggtgcgcgaggtcctctcgggacccggccggcgacccgtagctcgggcacgcgcctgtcgcatcccgcaggaaggaggggtccggcctgaggcccggggcggcgtccgccatggagatcccctcggtccagggccggcgcctgggacctggcgggcggccctgaccgccttcctccctgcgcgggctgggtcgcggacgtgcccttcgcggcactcggcctcctctgcgtctccgccttccctgggccgcactgctgcctgggcgcggcggcggcgacggcgccctgttgaatgggctgtgagggcccaggtttaaagcgctggcgaacgcggcctccgggggcgcacggcagctgcagcggtggcgaccaaacgggtgttggagttggcggcggccatggagggcctggctggctatgtatacaaggcggccagcgagggcaaggtgctgactctggccgccttgcttctcaaccggtctgaaagcgacatccgctatctgcttggctatgtcagccagcagggagggcagcgctccacgcccctcatcatcgcagcccgcaatggacacgcaaaggtggtacgcttgctcttagaacattaccgggtgcagactcagcagactggcaccgtccgcttcgacgggtatgtcattgatggtgccactgctctttggtgtgcagctggagcaggacattttgaagttgttaaacttctagtcagccatggagccaacgtgaaccataccacagtaactaattcaacccccctgcgggcagcatgctttgatggcagactggacattgtgaaatacttggttgaaaataatgccaacatcagcattgccaacaaatatgacaacacctgcctaatgattgcggcatataagggacacactgatgtggtcagataccttttagaacaacgtgctgatcccaatgccaaagcacattgtggagccacagcattgcactttgcagctgaagctgggcacatagatattgtgaaagagctgataaaatggcgtgctgctatagtagtgaatggccatgggatgacgccattgaaagtagctgccgaaagctgtaaagctgatgtcgtagaactgttactctctcatgctgattgcgaccgaagaagtcggattgaagctttggaactcttgggtgcctcctttgcaaatgaccgtgagaactatgacatcataaagacataccactatctatatttagccatgttagagaggttccaagatggtgataacattctcgaaaaagaggttcttccaccaatccatgcttatgggaatagaactgaatgtagaaatcctcaggaactggagtccattcggcaagacagagatgctcttcatatggaaggccttatagttcgggaacggattttaggtgctgacaatattgatgtttctcatcccatcatttacagaggagctgtttatgcggataatatggaatttgagcagtgtatcaagttgtggcttcatgccctgcacctcagacaaaaaggtaacaggaacacccacaaggatcttcttcgatttgctcaagttttctcacaaatgatacatttgaatgaaactgtgaaggccccagacatagaatgtgttttgagatgcagtgttttggaaatagaacaaagtatgaacagagtgaaaaatatttcagatgctgatgtccacaatgctatggacaattatgaatgtaatctctatacctttctgtatttagtgtgcatctctaccaaaacacagtgcagcgaagaagatcagtgcaaaattaacaagcagatctacaacctgattcaccttgatcccagaactcgtgaaggtttcaccttgctgcatctggctgtcaattccaatactccagttgatgatttccacaccaatgacgtctgcagctttccaaatgcacttgtcacaaagctcctgctggactgtggtgctgaggtgaatgccgtggacaatgagggaaacagtgcccttcatattatcgttcagtacaacaggcccatcagtgattttttgaccttgcactccatcatcattagcctagttgaagccggagctcacactgacatgacgaataaacagaataagactccgctagacaaaagtacaactggggtatctgaaatactgcttaaaactcaaatgaagatgagtctcaagtgcctggctgcccgagcagttcgggctaatgacattaactaccaagaccagatccccagaactcttgaagagtttgttggatttcattaagtgactggatatgtaaagtcgtttaatgtggtgctaaaaagtaaaggacttttaatcacagacagtagaattatgtgttcataaattctgcttttctttccactacccttcctcccatcccatccttccttagttctgtatttgtttttcttgcctcatggtaattgatttcagacagactttaacaaaaccacattgttttggtgtaactataaggtatttgcatattggttacctatttgtctttcttttttttaaaggaacagatataaaatgttttgtttatgtaacaagggacatttataatttcaagttgataatgttttaaacagctgcttacaaaagtatttctgttaagcctatgtcagcatgttatccatgcagcagttttgaggattttatgaagaaaaagagctaaaaaggaacattaagaggaatgggatatccaggtgttctgcacatgccaaactgctgtagatagtttacactcttccattatttatacggagtgatgcagcacattttagcattcaggaggatttttaaaaaatagctgcagattaatctggaaaatgtgctaatttaataatagttacaaatttataaatttaaatccatttgaaattgttgcattatgctgggtagtatatacaaaatggttatcatcttaaaccaacttttcagagaatcttgatggactctgcctttaggcttgaattcttcaaagtctattttaatgaaatttatctaaattgcagcagtctatttgattcagctcatagacatgtaaaaattatgaatgctgttttcttatgaaacaaattgtcacagtgtagttatacattctatttttgtccccttttccctttttctcctgtatcttttaaaatttggaaactacttttccagaaggcattatttatgcctccctaataaggtattttacttatgacagatgaaaaggaaccaggatatgtttgaattttttcactttcttagtctgtgacaagaagtagaaatatcactagtgtggtataggaacttacatgttttttatgatgaaaataattctcaatgccacttgaaaggtaattgtgtctgagagctgcaaatttttcaaccacaaaatgtcacttattcctacaggctatacagaggtctttatggtttttttgttttgttttaatggcaacattgtaactgtcaaactaaaagggtattctgtgattatcttttaagcattacagaaattcaagtgaaagttatatgcttatttctattgatgttaaaaatgataatgaaagcaaaattagctgtatctgtaattttctctctagtgccaaatgaatgccttagctactcatagtgcatggtactgtaagtgaagacctgtagctttttttttttctttaatgaaaagcattataatgatgtagcagcatcagatataaacttaaaaaaaaaggtttcaattaacattttatatatggataatgctttgtaaagtgtaagagaaaggttgcagttggatcagtataaaacaatgaccaagccaaaatcagcaccctagggccttaaataaaatagagataccccacaaaatgaaatattttgaaggatgggaggggacagaaggggggactatcccccaaggatgcaagatactttttacagttgctatcattatactttgtcttcttgcttcagttaggaaggttttgatggtaaattctgtcatggtaatagatacctattttcctaacctgagattttacaaggaaggtttttaggttggcttaaatggaggtatttatttgagtgagccctaatttgaaaattaccagacttgatcctcctggtatgaatcaaggaaatactgtaccttgctcttagcaactctcagtggcctgaaagagaaaatgcacttcttcaaggtgagtgaatcatgctttttccacagttcagatcagaccctttatttttcaaactacaaggcctgcttattggacagtctaaggaatagctttgatacttggtattcagttggttccattattaatgtatattatttttatttaaacatcaaaacttaaaatatcagataatgttgcatgttttaaaaacacatttcatccctttggctacccaggaccagcactatttaagacactgcttatttataaaatgagaataatgattatatgtacatattcagacatcaaaatttaatgacattctattttgagaagggaagacaatgctgaagaaagtaaaactgttgattgaaatgctgacagggtggagaacgaatttgaagacagtggaataaactatgaactatgctaatggtaattagattttttgtttgtttagtatagtggtaaattgtgtagtatcttgctgagaatctaattctatcttgtaaaatcaatccaaatgtgtattgtgaaacacctgtataaaatcatttttgaaataagtgatctacatgcctgtttttttaaaatgtttttggtagaattgtttgaaaatatgtttagccagacccttccccaacttaatttttttttaaaaaaggaaaataggtaagaaaatgatagttctatatctcagccctctgtgaactctaggctgtctccattttgcagccactttggtcatttgatgtttactattggtatacttatgctttgaattgtaaatcttcattgatggtattacagattcaaccaaaacttctctgtcctgttcagtaattgttatataaatctggatgagctagggaggcccaggtggatgttttcattcgcaaatcatgagaaacttaagtgggttttatgcacttgatagagttggcaaaattgaactatgaagttaactatttaactcaaggaatgggcggcaaacccatcccctcgattgataaagaaggggaacatttttacattagaactgacactgaaaacatagctttttcagtccaccctggttgctctagtagcccacagcccaatcacgttaaggttctttgctgtgggaattttaaataaaccaaaccccaaagcagaccatctgtaagctttggtctgcttgtttctgagaagggttttatttcattatactaatagtggactaataattggtaattgtgagaacttaggtatgataacattgtttgaagtaaaatatgatttgggggcagcagctttctaaataccaactctgtttgacaaatgttttgaaaattaaaatttcaagtgagcaacaccctgttaagagttttcactatagttgaggcagctactttatgaataagaccactttgggttatttaagcagaagcgtttcttttttttttttggaatggggtgggatgaggagtgagttgccagacctttgattagtttgctggtttagaaacagccagtggctgaattagtgagtaaatgaatgaaagtataaaggacttgttttttatgatagattttctgtaagaatcttaaatgttccttttcaaattagatgtgttgatgcacacatgactattctgtttttctcactgactatataacattaaaaaggggttaaagaaaacaaaactctgccttttgtgctatgaaatatttttagtccagaggttttaagctgtgtgtccattcctactctgaaaatgcatagctttgttctggatgtcatctcttgaaagtagaaaactcctatgtgtttatcacattgcagggctttcttatgtatttctggcagacttgcccaaatctttagatgggctgggttatacagcatgccctcccccaaataagggatctgaaataaatactacactattgatagtggagatatattaatttttaaaactgtaaagtaaatgtggtctctaggtttgtggtgtgtacctttgtgttaatgtgtagggaagagacagtgacttgatggttatggggagtgtatcttgatgtgtgtataggggtaagtattgctaaattatttacagcttttattcagggtgagtcatgtgatgaatggcctaatcagaaaagtgaaggagcgaagatgcaagcttgccaaatgatgaaatgaacaagattttgtatctattttttatcaggtgttgtaaaatttgtgcatggctttttgttgttgttgcttagtaactggtagaggagaaaagatgaggaaagaaactcagctttcctcacagtcttttcaaaggtacacagttggggagtaaaatctgactggcctaatcgatggaaaagaccctgtccttttcaccccatcctgcaatcctccgtgcagaggaactacactgttgtattctagtaattcactgtgatttataacaaaccggtgatgtcattctattgtgcacttttgtcaaaccatttatgtgactttaataaacatagtaaacttgctgactgcaccagaggtccattagtgatttatatattgcatgacattttctatttgagtttgacatgtagagtcatttttagtttcatggcaattgacagtcctaataactcagctaatttgaaactaacaatcttgctgtgtaaaaggaaaaaatggtgtttgtgttcagtaaatgtttgaaaaaaacta

SEQ ID NO: 133968 - DNA, 878 bp, Homo sapiens
  Payload ID: 6168
  Gene Symbol: FEM1B
  Gene Name: fem-1 homolog b (C. elegans)
  ENST ID: ENST00000566008
  CDS Start-End: 1-809
aagatggtgataacattctcgaaaaagaggttcttccaccaatccatgcttatgggaatagaactgaatgtagaaatcctcaggaactggagtccattcggcaagacagagatgctcttcatatggaaggccttatagttcgggaacggattttaggtgctgacaatattgatgtttctcatcccatcatttacagaggagctgtttatgcggataatatggaatttgagcagtgtatcaagttgtggcttcatgccctgcacctcagacaaaaagtgtgcatctctaccaaaacacagtgcagcgaagaagatcagtgcaaaattaacaagcagatctacaacctgattcaccttgatcccagaactcgtgaaggtttcaccttgctgcatctggctgtcaattccaatactccagttgatgatttccacaccaatgacgtctgcagctttccaaatgcacttgtcacaaagctcctgctggactgtggtgctgaggtgaatgccgtggacaatgagggaaacagtgcccttcatattatcgttcagtacaacaggcccatcagtgattttttgaccttgcactccatcatcattagcctagttgaagccggagctcacactgacatgacgaataaacagaataagactccgctagacaaaagtacaactggggtatctgaaatactgcttaaaactcaaatgaagatgagtctcaagtgcctggctgcccgagcagttcgggctaatgacattaactaccaagaccagatccccagaactcttgaagagtttgttggatttcattaagtgactggatatgtaaagtcgtttaatgtggtgctaaaaagtaaaggacttttaatcacagacagtaga

SEQ ID NO: 133969 - DNA, 579 bp, Homo sapiens
  Payload ID: 6168
  Gene Symbol: FEM1B
  Gene Name: fem-1 homolog b (C. elegans)
  ENST ID: ENST00000570067
  CDS Start-End: 567-579
attcccgcacctagagaaggagtgaagcacagtgacctctgaacctccagtaccgttccacctgtataggcatatgaagtcattgagatatgaatttctgtaataacagctgcttgggaatactgctgctgaggcaatgtgcataagggagaatagtggggagaaaaaagagttaagaatttcgaaaggttttgcttattgccatctttttcagtcgtcaaagagatgttttgaggtggcaattaaaagaacctgaaatgactagaaatgtagcattgagcctgtgtagtggcttatcttgcccaatgttctgtactggccagagaaattaatgagttcggtatgtcattgatggtgccactgctctttggtgtgcagctggagcaggacattttgaagttgttaaacttctagtcagccatggagccaacgtgaaccataccacagtaactaattcaacccccctgcgggcagcatgctttgatggcagactggacattgtgaaatacttggttgaaaataatgccaacatcagcattgccaacaaatatgacaacacctgcctaatgattgcggcat

SEQ ID NO: 133970 - DNA, 574 bp, Homo sapiens
  Payload ID: 6168
  Gene Symbol: FEM1B
  Gene Name: fem-1 homolog b (C. elegans)
  ENST ID: ENST00000566739
  CDS Start-End: 334-574
agtaaccagtgaatcaacttggtgatgaagaagctacctccacgcatttcctctgtgccttctgaagtgtctttacttttgctagtagaaagttcgtgatttttcaggtatgtcattgatggtgccactgctctttggtgtgcagctggagcaggacattttgaagttgttaaacttctagtcagccatggagccaacgtgaaccataccacagtaactaattcaacccccctgcgggcagcatgctttgatggcagactggacattgtgaaatacttggttgaaaataatgccaacatcagcattgccaacaaatatgacaacacctgcctaatgattgcggcatataagggacacactgatgtggtcagataccttttagaacaacgtgctgatcccaatgccaaagcacattgtggagccacagcattgcactttgcagctgaagctgggcacatagatattgtgaaagagctgataaaatggcgtgctgctatagtagtgaatggccatgggatgacgccattgaaagtagctgccgaaagctgtaaagctgatgtcgtagaactgttac

SEQ ID NO: 133971 - DNA, 5816 bp, Homo sapiens
  Payload ID: 6169
  Gene Symbol: FEM1C
  Gene Name: fem-1 homolog c (C. elegans)
  Uniprot ID: Q96JP0
  ENST ID: ENST00000274457
  CDS Start-End: 563-2416
ccgccccgcgcctaggctgttgctggccgcggccgccgccctcccccggcccaatggcgtggcggcacagtcagtgatgtgacgctcaggcttgtccggcccccggctcgcagcccattacaccatccgtcgcagcagtcgctgcagccgctgcagtccgagccgactaagggcgggaggcagctcgggtggcggggcgtggcgaacagcgcggccggattcattcctttggggcgcggagcatggaggagctgtgcggccgcaggcggagcagggcggcccgggcggcggtggggacaacggtttccctttgaaggggacggacaaagcccgagtgaccagcggcggcggggaggactagtccccgggcagtttggtgccctggttgtcagatgttggaaagcagtaggacggaacatactcttcgtggttgtgtatccgttctggggtgcagcaattaacattggactttggttcctgtgactcttgcctgtgtcgatagagttaaactggagctctgctttgaaagataaataaagcacagcctctcaactggacataaatggatctaaagacagcagtatttaacgcagctcgggatggcaaactccggcttctcaccaaattgttggcaagcaaatccaaagaggaggtttcctccttgatctctgaaaaaacaaatggggccacgccactcttgatggccgccaggtatgggcaccttgacatggtggaattcctcctagagcaatgcagtgcctccatagaagttgggggctccgtcaattttgatggcgaaaccattgagggggctccccctttatgggccgcttctgcagcaggacatctgaaggtggtccagtccttgttaaatcatggagcatctgtcaacaacacgactttaaccaattcaactcctcttcgagctgcgtgtttcgatggccatttggaaatagtgaagtaccttgtagaacacaaagctgatttggaagtgtcaaaccgacatgggcatacgtgcttgatgatttcatgttacaaaggacataaagagattgctcagtatttacttgaaaagggggcagatgttaatagaaaaagtgtcaaaggtaatactgcattgcatgattgtgcagaatctggaagtttggacatcatgaagatgcttcttatgtattgtgccaagatggaaaaggatggttatggaatgactccccttctctcagcaagtgtgactggtcacacaaatattgtggattttctgacacaccatgcacagaccagcaagacagaacgtattaatgctctagagcttctgggagctacatttgtagacaaaaaaagagatctgcttggggctttgaaatactggaaaaaggcaatgaacatgaggtacagtgataggactaatattattagtaaaccagtgccacagacactaataatggcttatgattatgccaaggaagtgaacagtgcagaagagctagaaggtcttattgctgatcctgatgagatgagaatgcaggcactattaatcagagaacgtattcttggtccttctcatcctgatacctcttactatattagatatagaggcgctgtctatgcagactctggaaatttcaaacgatgcatcaacctatggaagtatgctttggatatgcagcagagcaatttggatcctttaagcccaatgaccgccagcagcttattatcttttgcagaactattctcctttatgctacaggatagggctaaaggcctgctgggtactactgttacatttgatgatcttatgggcatactttgcaaaagcgtccttgaaatagagcgagctatcaaacaaactcagtgtccagctgacccattacagttaaataaggccctttctattattttgcacttaatttgcttgttagagaaagttccttgtactctagaacaagaccatttcaaaaagcagactatatacaggtttcttaagctgcatccaaggggaaagaataacttcagccctcttcatctggctgtggacaagaatactacatgtgtagggcggtaccctgtttgtaaatttccatctctacaagttactgcaatactgatagaatgtggtgctgatgtgaacgtcagagactcggatgacaacagtcccctgcatatcgctgctcttaacaaccatccagacatcatgaatctccttattaaatcaggtgcacattttgatgccacaaacttgcacaaacaaactgctagtgacttgctggatgagaaggaaatagctaaaaatttaatccagcctataaatcataccacattgcagtgtcttgctgctcgtgtcatagtgaatcatagaatatattataaagggcatatcccagaaaagctagagacttttgtttcccttcatagatgataacttgactgtattttagcactgttaaagcacgaattggtaacagttgtttcataaatgagcactgttgtgataacaccagcattcatttagcttgattgatatcattgtgctctcattggctaaagcattataagcatcaaatttacaacattggtttcccaatatttaatataaatataccatataatatattgtttgtgaattattgagaaatgtaacattcaaatttctaaaattgtctgccaaaggcttattcattctggttttgtttgctgttgggtgtttggggcagagttaaccatttctccatggtgtctttatactttactggtttgtgaattttatacaattgaaagtctttttttcttgcttctttcttctcttctcaagtttcccccctgtttctactttattgtttgtcctaaccatttctactacagttttttccttatggacccatactaggttgtacaaaccttaaggactcgttaccatttgcagttaccataagtgctttatcttctctatgcacaggcttaaacttgactgttgtatgttagcatattttctatgcagcagttggtcaacttcaactcaaaacactgttttcttatgtttgttacaaacttaattttttgaaagtactctgtagcatgacaatttttagagctgcaggttagctattatagctcaagcttttttgtttgtttttttcttcactttcttcacatctgaggtttctttctctaatccactgaaattattgtgtgctaaatttgggaaacagatctattctaactcattaacccagttgaaatttaggtctgtcatcttaatatatcatgcagtaaaaggaagaatctttttaaagtgacccacctttcatgctgctccagcattgtcctgcttgtgctgatggtgtgattaggtgtagagaatttgcttaaatttaacttcaaagttcatcacacagcttaatgagtcacattgaaatactcagtaattgaactgcaaatcacttttagttacaaaaagagctaaagcatgtcagtggcatgatgcttgccaagccagatctaggcatctaggataattaaggtattttagtatgcaatttactgccataatatcaaaggtcagtaacagtgttctttctttcttcaagcttatgtatacctttaaagataacttgcatgaattactttgattactttggtctcaattatttgtcaccccagttaaacatgaaaggttgcagtgcttcctgttcccttactggaagttagctttttcttttctctttcttcctttctttctctcactctttctttctctttctctttctctctctctctctctctcactcactcactcacagatttgctaatgccacagaaagggctcttttaacttaagataagtgaaaagtactaaaaaagattcaggtaattatcattcagcactttattgtaattcagaataaaatttatgatggcatatttgccctgcaaatgtcttaatgaagttgttctcaataaaaagctccttattgatttgagaaaaactcagtttacctgtgagttcaatgagctggatcactcacttggatttttgtgttgacattttattctgagggttgatgttacactatttaaggagtcatcaatgcaaacagtcacattaggtatgtcatcatctttagtcagtaaaaaccttgtaatgaggagtagtaaataaacaagagaacattagactttttggttaaataattgagatttaatttttaaaagatattcttactcatttgctaggttgtaaatttgatttcaccattaagaaaaggtaaattggatataaatgaacgatctccaactttttgatgaagaggttttactatctctcactgtgggaaaatttgatgaaatatttgaactgtcacatatattaagaatactttatgatttagaccaatattctagaaatatcaaatgtcagtatcttgaaatcatctgcctctaactttgtggtataagaattatatatgaataagctattatttttataaaggaaaactttgccattatagtaaattacattagttgatctcgataatttgaggataacagatgacaattgaatttttaattgatttagtatttcctcctcctctttgggggctgggtgggagggcttacatgctcttatagtgaggcacatctcactgttttgcagcagaatttgaattgtgcaactcctgtgtaaagtaaggatttctttaaatagcatttttgcaccagtaaaaatagataacttagaactcagtcttgataactgaaatgacttatttcacttagaatacatttctcccttctctgccatctccacaaatgccattgggaggttttgaaaaaccagttaatttaatagctcaaaattgtccctgattttattttcttttagggaaaattgtttcataaatgtgacactgataaagcctttgtcagaaagtattctcacaattatgagatggattataataaaatacttaaatttgtgttattttttgaaccacagatgagtaaatttaataatgaaccaattacactcttgagtctaactaaactgtacactgtagcacggtgttattgactggagttaatgtgtaagttattaacatttctatgaaaatgcccttttggggcctcctgaattttagatgttccactgttttgatcatttctataaaagaaatggtcattttacttagatgccagtctactttataaagacaaatggattatagacttaaaaatagtcatttttcttattcataaatctgacaggcataaacccaaatcaaagataatttggtgcccattatgaatttgaagttaagtgatagctcacttgtaaagtgactaccttaatgtgtatagagaccccagtctactattatttgggaaaattgtttaggttatatgggaaaagtagctctttaaaaatcatattgcccaacagaaaccttaggctgaatttacaggtatgataatttttgtaattaattttcttagaattgtgcaggctggatgagataatgacatactcttttacactgtaacagcagcattattgcctagaactttaaccattttagagttagatactaaggaaacaaactaattggtcatcatcattttctttttttctttttcttttttttttttttgcccttatgtgtcactaaacaactagtttctctcccttttgtcagttcccattgtgtattttttcaaaagaagtactgtattcggatgccagctaataaattgtcacacaatggaaaatcatatgccacaacattcattgtaaggtttaataaaattaaatttgcaccaaa

SEQ ID NO: 133972 - DNA, 12119 bp, Homo sapiens
  Payload ID: 6170
  Gene Symbol: FER
  Gene Name: fer (fps/fes related) tyrosine kinase
  Uniprot ID: P16591
  ENST ID: ENST00000281092
  CDS Start-End: 385-2853
gtcacaccctcgaataatgacgcatacctatcctactgttactgatcacctagtaataatcttgtagttcacattactcatttttcaccaaattcttttggtgaaggacgcttcagaaacggccatcactgaagagcagacccgtttgggttctccacgcattctagactcccgaagagctcatgttttttggctagacctatgaccattttcgctagacttcactgcacgttttctcaagtatcttctttgtccctaatgtgtgacacctcatcatggacacgctactttagctaaggcatgaccagcaatgaacagtagtaagatatgtgctgattagaaggctcacttgtgcagtgtggaggataaccagtgccttacaaaatggggtttgggagtgacctgaagaattcacatgaagcagtgttaaaattgcaagactgggaattacggttactggaaacagtaaagaaatttatggccctgagaataaaaagtgataaagaatatgcatctactttacagaacctttgtaatcaagttgataaggaaagtactgtccaaatgaattatgtcagcaacgtatccaagtcttggctacttatgattcagcagacagaacaacttagtaggataatgaagacacatgcagaggacttgaactctggacctttacacaggctcaccatgatgattaaggacaagcagcaggtgaagaaaagttacataggtgttcatcagcagatagaggcagagatgatcaaggttaccaaaacagaattggagaagttaaaatgcagctatagacaattaataaaagaaatgaattctgccaaagagaaatataaagaagctttagctaaagggaaggaaactgaaaaggccaaggaacgatacgacaaagccacaatgaaacttcatatgttgcacaatcagtatgtattggcgttgaaaggggcacagctccatcagaatcagtattatgatatcacacttcccctgcttctggactccttacaaaagatgcaagaagaaatgataaaagcactcaaaggtatatttgatgaatacagccagataaccagtcttgtcacagaggaaatagtgaatgtccataaagagattcaaatgtcggttgaacagatagatcctagtacagaatacaataatttcatagatgttcacagaacaacggctgctaaagaacaagaaatagagtttgatacttccttactggaagaaaatgaaaatcttcaggcaaatgagatcatgtggaataacttaacagcagaaagtttgcaagtaatgttgaaaacgttagcggaagaacttatgcaaacacagcagatgcttttaaacaaggaggaggctgttttggagttagagaagagaattgaagaatcttctgaaacttgtgagaagaagtctgatattgtgcttctgctaagccaaaaacaggcacttgaagaactgaaacagtcagtccagcagctgagatgcactgaagcaaagttttcagcacagaaggaattactagagcaaaaagtgcaagaaaatgatgggaaagagccacctccagtagtaaattatgaagaagatgcacgatcagttacatctatggaaagaaaggagaggctatccaaatttgaatctattcgtcattcaattgctggaataattaggtctccaaaatctgcactgggctcttcagcactttctgatatgatctccatcagtgagaagcctttggcagaacaggactggtaccatggtgcaattcccagaatagaagctcaagaactgttaaaaaaacaaggagactttttggtgcgagagagtcatgggaaacctggtgaatatgtcctttctgtatattctgatggacagaggagacattttatcatacaatatgttgataacatgtatcgattcgagggcactgggttttcaaacattcctcaacttatagatcatcactatacaacaaaacaggtcatcactaagaaatcaggtgtagttctgctgaatcctattcctaaggacaagaaatggattctcagtcatgaagatgtcatattgggagaattactgggcaagggaaattttggtgaagtatataagggcacattaaaggataaaacttctgttgctgttaaaacatgtaaagaagatcttcctcaggaattgaaaataaaatttttacaagaagccaaaattctcaagcaatatgatcatcccaatattgtcaaacttataggagtttgcacacaaagacagcctgtctacatcattatggaactggtttcaggaggtgatttcctcacctttctgagaaggaagaaggatgaactaaaactcaaacagttagtgaaattttcattagacgctgctgctggtatgttgtatctcgagagtaaaaactgtatacacagggaccttgctgcaagaaactgcctggtaggtgaaaataatgttctgaaaatcagtgactttggaatgtctcgtcaagaggatggtggagtgtattcatcttctggcttaaagcagattcccattaaatggacagcaccggaagctcttaattatgggagatacagttcagagagtgacgtgtggagctttggcatccttctctgggagaccttcagcttaggggtttgtccgtaccctggaatgacaaatcagcaagcaagagagcaagtagaaagaggataccggatgtcagctccccagcactgtccagaggatatttccaaaatcatgatgaagtgttgggattataaacctgaaaatcgccctaagttcagtgaacttcagaaagagctcactatcatcaagagaaaactcacatagtgacaggatggcgccaaactcagccttcaggactctgtcctccagcagagtaacattattgttctcattaacaatgaatttataccacattaccttcgacagtcttctaccattattttttattaactgggtgttttaaaagtacgttccacttgtaaaaagtcaaaggcaaatttgttaaagaaataggcagtcctaccaagggctttcttagctaaccatagcaatcctaccatttcaggccattgcaaatagaaaagcacaggcttctaagtgtgtgaaggataaaagatctatcctatccttttcacaccttgtttctacttcaggcacagtttgtaggctgccatcctatgccacagaccctactccgttggtgctataaacagcattggtaatgccatgtttgcaggacatgttccaaccacagctggctttcacctctgccaaagcaggattatatttgtaaacaaacaaacagaattttatattgggaattatttggacctcctgagatttttcttttctttcttgccaggtataagcccaatgtaagaatcatcatgctcctacattatttgtaaggttgtcattttcctcctcctttgtctgggcatcagaaaacaatgcacgtaggtcgggcacggtggctcacgcctgtaatcccaggcatgtaatctcatgcctgggattacaggcgtgagccacagtgcccagccccctccctcctttgggaggctgaggcaggcggatcacctgaggtcaggagttcgagaccagcctggcttgcatggtgaaaccctgtctctaccaaaaaaaaaaaaagaaacacacacacaacgcatgaaacgtcgtcaaagttagagttgaggcagttgcttttcaaggatgtacagagagctgtgaagcaagaaacagatttgaacaggagggtgggctggagaacagagcagctaaagaatgattaacagagtaaagaagaaagtgaaaatataaaaccaccttatcagagttatgcctttctaaacatctaaacaaacaaacattcacatattctattctaaaaacacataataatacatattctattttatggtctgaatttaccagaaaggtcctaagaaaagtttcaggagttcgtagagtcctcgtaatggcaacaaaaattttgagagaaactgcaaagcacaaatccacagaaataacagcatactttcagttaagcattttcaccttagagggggcattccaaaatgtaatttcctttatttgtaccagtttttagagctgtcagaatttcatgattctagttcaccaacacattcacgtgtgtacatgcgcgtgcacacacaccaccaaggtgcaagacagatgtgaatgaagtagacagtctagaagtcaggtgaatattaatgagaaatatgacatagggacagccctcccatttctacttccaccttcattgaccattatactgccccctggacattcttaccattagctgacaggtatgcaagcagagtgctgaagatgtctcatgtgaataaaatgtaactcactcactcagttaaaactaggattctgtatcttaactcttatctagggaacttacttacttaccccatgatctgtatatagttgcctctcaggataaatgcatatatagaagatggtcatgctcagggctaaatatgttctggaagccttttataagttctcaggcctgtgtcctggtaaacattaccttagtgattatttggtctgcattcattggaagagcttagggatagaaaatgcctcctgccctctccagctgtttgctgcctgtaccatcgcacagaactcacaccagtactttagagtatgaaagataatactgaagagaaaagtgacttgtatctaacatttcaatctccttgcagatttcatacatacttaatgattagtacattcagactaaagggaaatttcttttgatggcacgtactatggtaaatcaaagcgcaaactcagaagtgctatggtattgaggcacttaccaaccttcaaaagtaagagtaaaatgggatattcctacccttttttttagtatttctaagtgaatctctgtaatattctttgtctgtttaaagaaaacagcctcccatctcatagtggcttcatgctaagctctcagcaaggagagagaatgatggttttggctttagttttatgaacaagacctaaagcttaatcctgacattctggtgttaagaatgaacacagcattgatatttcacttatccaggctgttagaatttgcagttcacatcattactctgtgcttaaatttaaaaagcttttcaaaacatcgtgacatgtgtagcatttaaattccattttattctttgtcctaaagcaggcagtggtatagttcaggattaataacttattgggagtctctcagtcatatagaatattaaatttaatatagtcacatgcattaagaaaaacttacgcaaacagtttttcactgttaattttgttgtgcttgaagcataatttattcatcccttctgtcactgataattaattattggaattatatactttaggaggctaatccatgcccaggaagcacgaacatactgttcagaatgtgcaagttgatgtagggaaaggaagattcagaaatgtacaaaatcctgtgatttgtttagtaagaaaagagttgtaaccaaaatttcttctggtccggatgtaattagtccagtcacaaatctttgtgttgttaatggattattcaagatatatatatatattcttactactgcatagttcctctcataagtccttaaatttattaaaagggggaggtaaacacaagcagtctgtgtctcactggtcactaaggggcctttatgagacagtttaggttgttcatcatttcacaaggaaagaaatttttcactgttaaattaacatttattaccaacatgtgaaacctaaaattaattttgcattccatgtaatctaaggccaaagccaacatattctttctcttctgggaaaataaaattgacaggttttgtttaaacttcagaaactgaagctttatttcagcctgtcctgccatgaggtctccagtgagaggtctccagtgaaaggtctcatgtaattgtttctcttttatctcccaaatttaatgtgggcaataaaattctcctttcgtaattcactgttttattacaaatacgatattactgaaacatcttattagcagataagtatagaccaggagcctaactgtgttagatattttcagtgcacatttcacagttgtttttcattttaggattattttgagaagaaaaaatgttttgtaattgaaatagttttaatttcctttaaaccataatttggtttttctatctatattatattcagttcagttttcccatataacttttgtgaagattggctagtaccacaaaataactatggcttcacaatactagtgttagattatgtcaagaagaaagtgttttagttacaacatacgccacccactgaggaccttgtagtgggataaacaaaaattaaaatgcaacaatccaaataaattataatgtaacaatacaaatatctgaatcataagtcacagtttttcagggttctttcagtcacaccactttataattaattctggtgagtcatcagatgtaggaatgtacctgaaaaccttacttagtatactgtgtacactgtttaatggccatgcatcttttgaagtttgatattttctgaaaaagcattgtttgcctcagccctcttctttttacgtatactccatttatcattgatattttagatgtttcttatcaacaaaattggctgccctggttagtgctgagtcatcgcaagacttgcttttgcatttaggaagccacaccctcccacaaaacagaacagtgcaaaataagcagcagagagacagacagttggaaaagacatgttttctttaggtattaatatcttaattaaatggaatcagattttgtatggaaatgagtttatattacatttccattatactaagtcagtgtgaaagtttaccatcaaaatagcgttacttcttttatgactaactctgatttgcttatacatatcagaatgatattcattaaatattttaatttcatttatttttctatgttttgattagtttcacatcaagtctgaatactatattttggaagaatccaaaaccacatatgaagatactgattttaaaagtcaggatttcatgtaccaagaatgacctacttgaaggagattttgctacactcttagagtcccaaaaattcccctttaaaaaaaatgctgtcctacagaaggtgtataaactataccttagccataattcaatttaatgaaatactaccccattaaaagccatcctcctgcctcataccgattcagaaattaaattctgaacttttagtgtaggcattaggaatcacttagccacttaataaggactgagattcttgggtggcagaaaaatcctggtgtgctagattcttagtcactttaaactgcatagaagtaatgagcataggcttcagtatatttaataaggtgctgaggcagcagattcaaatgcaaaagagggaggaaccagttattccaaggcaggatgatgcacccccacacagagtgtggaaaaattaaagtgaaacaaagatttggacagtgtcattaggaagcctgaggagaacatgctacaaggccagatcctgtcctatggaaaataaaaaagatcagcagaactaaagcaaaagcagtcatctccagtgtgtgggccttagcaaagagtaaaccaaatacctctccttgtgttaggagcactgttatattcccagctcagagatgattgtgtgctgggaaatgcttatattcattatttcccaactaatgcatttggacatatgtattccagtttttcaaagacactacccaaagcttctttacatttgcattggttatatttaatatttcttaagctaagatcactgattatccacacgttattagaaatctttggttacagtgaggcttaacctgggctaaagtctcctaaatgggactacacttagatccgccctatttcacctttggactaacgttgactaaatggctcctagagttacccacagagggagcttactatgatgagagctactgtggggaaacatagtattcaacagagaaatggaagaatacaagtagcaatgttccttgtcttcaataacatttgagggaaaggaatctagaaatcctaaagcttagtcagggtgcctaaggtaagacacaaaaagaaagagacatccagaaaggaaggttgaaaggaaatgaagggcagtaacaaagcaccaatgtaaaatgacccatagccaacaataaatgcaataacaataaaggaaactaaccctcacaaagggtttgaggagcttcctgctgtgtgtccttaaacagtgcgtgcctcttaagtctctacaacacttttttaaagggcattgaattggacattggtttaatttttacctacgctccctataatctcaggaggtaaccattatttaatcagaattacccttgctctgtttatctgtgaggcctcagacacaacggtggttcagccctctccctaagcagtagcaagctgagtaatggcacacatatgtctaggatagccagcattcaggaaaattgctgtgaacctcctgtttttaattttaatatagaaaaagtctttcaggtttgtgacacgaagacagatttagcttcccacttgtcagcaaatttgtaaaaacctcaaaacaaatgaatatttggaattcactctaagagatacaaatcctgaatttctaactatcttctcaaatattactgaggccagcaagatgcaagtgttctacaaaataatgaactgttctaagtgacagtgttgatgctggaagtggaatgttatgttttcgctcagctgtattcattcagaaagtttttcttgaacatctgccacatgaggtgcagagaatactaccaggtgctagtttttccagtatttgacttctgattactatttccttttctcatctttagtttttcaagattttgctttaccaaaatagtaaagcctttatcatcagcttatattgaataatgttgtaattggtttcaatcaaagtttctcctcaggtacttgggggcccctagccttctaaggaactcccaggcacctacttaacaaggccagctacacactcagtatgtgataagccccatgatggatgcaggttagaattcaaagacctggttggagtcctagatgtggagacaggatgatcaggtcacacttgttagatgactaacactatcagtagaagctcttgagagattttcctaacgcagcaagatttctgtgagtagaggtatcctgggaggtatcctgggaggcagcctattgacttgaccaagtaagctgatcaggtggcctcctctacccactaaagaaatgtgtaaacactagcaataattgctttatcttaaactcctggacatactcagttcttccattccactgttctattgccaataccttttgttgttttcttcacactcctcttggcagcaaatgtctgaaagtatttcaattgtgtaatgttaaggagttttttcatagcttcagaaaagagggcagcaaatatgaagccttaagttcaaaataagtcattctacctagaaatacagaccccagagcacattgcatgaaaatacctgtactctgcagttcctcaaagcagtattcttcctgaaaagccaaacaccacacctattttcctatttgctaagaatcagaataagcacgttgtaaatagtatccaaagcagattctaaaatgacatagtaagaagccagattcaaattgtaaccaaagaagacaatagaaatcccactttaccccactgtcatcagttagaacacccttgcaaaaactgtaaccacttaagcaattcatctgatcccagaagatcataccttcttttgaaagtataggacagatatcagtgggaaacgtcggcgttctgagcaacacaggataaatgtaggagggccttaaaaaataaatctcaattcatacactggagcagcaaaaaactgagcaggaaaggaaacagaatccaaagtcatttttcatatagctgttgtcaaatagtataaccttggtgtcttctttgagttgcctggacagtatttatgaaacaaaaaactaaatgccccccatttggggacggggggaggggttcagacctctaacctggattcagagccttagaggccgagagggaatctggaatctggtattactgagatcctaggtaaaagaaccagcctggcagtctttcccacctcattggtccgtgcttttatttttaaacccaaaagaaagaaagaaacacaccctcttatgtaggaatttcccttttacaaataatttgacctggtagaaataaacttgcctgcctgctcttaaatgccagacagttggaagcaaatgccgagggaaaggtgcccagagccatgcttgataggactttgaatattttctccttaattaaagtacgttgcttgtatttagactataagatgctatggaggtctatcccatgccatgccaatgtgaattgctttgcttcagtaacaatcagaagaccagtccaacagaaaataacttgtcataattccaccttagattctagacctctcatacctgcagtgtacagaatatgtacatgttccaatggaattcactatttttggctttagtgtcaaagagattggttctacaaggttcatctgatttcccataacaagtaaattttataatcctatgattctaaattcaatccccaatatagattctaagcatcaaatcaaaatcacagacaaaggggaactggtcgagaggggtcttagttatttcaaatccatgaccaaagtgtccaaagacatgaaactcttatacctgctgagcatttcactttactatacaaaatgtcagctacccagttgcatcctgtgacatgatcagactgtcaatgtggaccagtggccaggagcatatttatgggccatttctgttcatcattctttacagagcattgaggtttcccactgaaacagcttctttagtcagacgtctatagattttacataaatttacatttaaatgcattaagttagatggcccaattgagcatctgaatgaatatagtgggggttggtggtggtgcaaattctgctggctttatgttatggttttcttcgtgttttttcttggttttgtctggcttcttctggcaagtgccctaaaagactggaacactgtataaagtcatagacatagaaccatatgggaaagcccagatgaaaaaatggaagaataaaatcaagttgtcaaagttccagcaacagccctgacttcttcaggaatccaagcaaattgaaagccaagacaaaatgtacaaatggtgcccatgccattcatttgactgtgggtggccctctagtctagggctctcttagtgaatggttgtggaaatatgatttttctaagttccttccttttccttttgatagatgagtttgagatgatggagtaggagtggggccctcaggcacttctggtaaagacattccacctgcaagcagcattttgagtaaagcactgctgtggtttgccgatttatggtccatttaatgttaggctaaagcacctttaatcatttttgttgttttaagataatgtatttgtgaagtggataaacactggaaatagggtgcttcttctggaaagttcagtgtaaaacacaaacaaggctttggcgggtttatctggctttataaacaagtctgaaaaatggatgaaagctaaatatataaagcagttggttgtctatcttttatcatttttactcagatctgtatttaacacttatttatttgttagtttttacattcaaaagaaatacactttgaactttggctaacattgtaggatattttttaattgtttctacatttttaaagcatgattcatcatttttgtaaacttagatcattttttaattgtcttttcttttccaatagaccagttaccactcatgtgtctgcagaacctctttattgtattcctataataaatgtaaaatatttgtagcaaa

SEQ ID NO: 133973 - DNA, 1531 bp, Homo sapiens
  Payload ID: 6170
  Gene Symbol: FER
  Gene Name: fer (fps/fes related) tyrosine kinase
  ENST ID: ENST00000438717
  CDS Start-End: 199-1434
ttctcttttagtattgtgcttctgctaagccaaaaacaggcacttgaagaactgaaacagtcagtccagcagctgagatgcactgaagcaaagttttcagcacagaaggaattactagagcaaaaagtgcaagaaaatgatgggaaagagccacctccagtagtaaattatgaagaagatgcacgatcagttacatctatggaaagaaaggagaggctatccaaatttgaatctattcgtcattcaattgctggaataattaggtctccaaaatctgcactgggctcttcagcactttctgatatgatctccatcagtgagaagcctttggcagaacaggactggtaccatggtgcaattcccagaatagaagctcaagaactgttaaaaaaacaaggagactttttggtgcgagagagtcatgggaaacctggtgaatatgtcctttctgtatattctgatggacagaggagacattttatcatacaatatgttgataacatgtatcgattcgagggcactgggttttcaaacattcctcaacttatagatcatcactatacaacaaaacaggtcatcactaagaaatcaggtgtagttctgctgaatcctattcctaaggacaagaaatggattctcagtcatgaagatgtcatattgggagaattactgggcaagggaaattttggtgaagtatataagggcacattaaaggataaaacttctgttgctgttaaaacatgtaaagaagatcttcctcaggaattgaaaataaaatttttacaagaagccaaaattctcaagcaatatgatcatcccaatattgtcaaacttataggagtttgcacacaaagacagcctgtctacatcattatggaactggtttcaggaggtgatttcctcacctttctgagaaggaagaaggatgaactaaaactcaaacagttagtgaaattttcattagacgctgctgctggtatgttgtatctcgagagtaaaaactgtatacacagggaccttgctgcaagaaactgcctggtaggtgaaaataatgttctgaaaatcagtgactttggaatgtctcgtcaagaggatggtggagtgtattcatcttctggcttaaagcagattcccattaaatggacagcaccggaagctcttaattatgggagatacagttcagagagtgacgtgtggagctttggcatccttctctgggagaccttcagcttaggggtttgtccgtaccctggaatgacaaatcagcaagcaagagagcaagtagaaagaggataccggatgtcagctccccagcactgtccagaggatatttccaaaatcatgatgaagtgttgggattataaacctgaaaatcgccctaagttcagtgaacttcagaaagagctcactatcatcaagagaaaactcacatagtgacaggatggcgccaaactcagccttcaggactctgtcctccagcagagtaacattattgttctcattaacaatgaatttataccacattaccttc

SEQ ID NO: 133974 - DNA, 3132 bp, Homo sapiens
  Payload ID: 6170
  Gene Symbol: FER
  Gene Name: fer (fps/fes related) tyrosine kinase
  ENST ID: ENST00000504143
  CDS Start-End: 238-492
agtctgaggggttcgggcttgtcaggttctagctcatgttttttggctagacctatgaccattttcgctagacttcactgcacgttttctcaagtatcttctttgtccctaatgtgtgacacctcatcatggacacgctactttagctaaggcatgaccagcaatgaacagtagtaagatatgtgctgattagaaggctcacttgtgcagtgtggaggataaccagtgccttacaaaatggggtttgggagtgacctgaagaattcacatgaagcagtgttaaaattgcaagactgggaattacggttactggaaacagtaaagaaatttatggccctgagaataaaaagtgataaagaatatgcatctactttacagaacctttgtaatcaagttgataaggaaagtactgtccaaatgaattatgtcagcaacgtatccaagggaaggaaactgaaaaggccaaggaacgatacgacaaagccacaatgaaacttcatatgttgcacaatcagtatgtattggcgttgaaaggggcacagctccatcagaatcagtattatgatatcacacttcccctgcttctggactccttacaaaagatgcaagaagaaatgataaaagcactcaaaggtatatttgatgaatacagccagataaccagtcttgtcacagaggaaatagtgaatgtccataaagagattcaaatgtcggttgaacagatagatcctagtacagaatacaataatttcatagatgttcacagaacaacggctgctaaagaacaagaaatagagtttgatacttccttactggaagaaaatgaaaatcttcaggcaaatgagatcatgtggaataacttaacagcagaaagtttgcaagtaatgttgaaaacgttagcggaagaacttatgcaaacacagcagatgcttttaaacaaggaggaggctgttttggagttagagaagagaattgaagaatcttctgaaacttgtgagaagaagtctgatattgtgcttctgctaagccaaaaacaggcacttgaagaactgaaacagtcagtccagcagctgagatgcactgaagcaaagttttcagcacagaaggaattactagagcaaaaagtgcaagaaaatgatgggaaagagccacctccagtagtaaattatgaagaagatgcacgatcagttacatctatggaaagaaaggagaggctatccaaatttgaatctattcgtcattcaattgctggaataattaggtctccaaaatctgcactgggctcttcagcactttctgatatgatctccatcagtgagaagcctttggcagaacaggactggtaccatggtgcaattcccagaatagaagctcaagaactgttaaaaaaacaaggagactttttggtgcgagagagtcatgggaaacctggtgaatatgtcctttctgtatattctgatggacagaggagacattttatcatacaatatgttgataacatgtatcgattcgagggcactgggttttcaaacattcctcaacttatagatcatcactatacaacaaaacaggtcatcactaagaaatcaggtgtagttctgctgaatcctattcctaaggacaagaaatggattctcagtcatgaagatgtcatattgggagaattactgggcaagggaaattttggtgaagtatataagggcacattaaaggataaaacttctgttgctgttaaaacatgtaaagaagatcttcctcaggaattgaaaataaaatttttacaagaagccaaaattctcaagcaatatgatcatcccaatattgtcaaacttataggagtttgcacacaaagacagcctgtctacatcattatggaactggtttcaggaggtgatttcctcacctttctgagaaggaagaaggatgaactaaaactcaaacagttagtgaaattttcattagacgctgctgctggtatgttgtatctcgagagtaaaaactgtatacacagggaccttgctgcaagaaactgcctggtaggtgaaaataatgttctgaaaatcagtgactttggaatgtctcgtcaagaggatggtggagtgtattcatcttctggcttaaagcagattcccattaaatggacagcaccggaagctcttaattatgggagatacagttcagagagtgacgtgtggagctttggcatccttctctgggagaccttcagcttaggggtttgtccgtaccctggaatgacaaatcagcaagcaagagagcaagtagaaagaggataccggatgtcagctccccagcactgtccagaggatatttccaaaatcatgatgaagtgttgggattataaacctgaaaatcgccctaagttcagtgaacttcagaaagagctcactatcatcaagagaaaactcacatagtgacaggatggcgccaaactcagccttcaggactctgtcctccagcagagtaacattattgttctcattaacaatgaatttataccacattaccttcgacagtcttctaccattattttttattaactgggtgttttaaaagtacgttccacttgtaaaaagtcaaaggcaaatttgttaaagaaataggcagtcctaccaagggctttcttagctaaccatagcaatcctaccatttcaggccattgcaaatagaaaagcacaggcttctaagtgtgtgaaggataaaagatctatcctatccttttcacaccttgtttctacttcaggcacagtttgtaggctgccatcctatgccacagaccctactccgttggtgctataaacagcattggtaatgccatgtttgcaggacatgttccaaccacagctggctttcacctctgccaaagcaggattatatttgtaaacaaacaaacagaattttatattgggaattatttggacctcctgagatttttcttttctttcttgccaggtataagcccaatgtaagaatcatcatgctcctacattatttgtaaggttgtcattttcctcctcctttgtctgggcatcagaaaacaatgcacgtaggtcgggcacggtggctcacgcctgtaatcccaggcatgtaatctcatgcctgggattacaggcg

SEQ ID NO: 133975 - DNA, 1420 bp, Homo sapiens
  Payload ID: 6170
  Gene Symbol: FER
  Gene Name: fer (fps/fes related) tyrosine kinase
  Uniprot ID: P16591
  ENST ID: ENST00000618353
  CDS Start-End: 56-1417
ttggtaaattgacttccttgggcccactgtcactatctcttagctaaattttgagatggagcagaaaatgaaatgtcctcattgtaaggatcagctggagtctggtttcggctcccaatcctgtaaaacatgtgctttaatgttcagctctgagccttccacatcagaagtccacagagatcaggaaagaaaggagaggctatccaaatttgaatctattcgtcattcaattgctggaataattaggtctccaaaatctgcactgggctcttcagcactttctgatatgatctccatcagtgagaagcctttggcagaacaggactggtaccatggtgcaattcccagaatagaagctcaagaactgttaaaaaaacaaggagactttttggtgcgagagagtcatgggaaacctggtgaatatgtcctttctgtatattctgatggacagaggagacattttatcatacaatatgttgataacatgtatcgattcgagggcactgggttttcaaacattcctcaacttatagatcatcactatacaacaaaacaggtcatcactaagaaatcaggtgtagttctgctgaatcctattcctaaggacaagaaatggattctcagtcatgaagatgtcatattgggagaattactgggcaagggaaattttggtgaagtatataagggcacattaaaggataaaacttctgttgctgttaaaacatgtaaagaagatcttcctcaggaattgaaaataaaatttttacaagaagccaaaattctcaagcaatatgatcatcccaatattgtcaaacttataggagtttgcacacaaagacagcctgtctacatcattatggaactggtttcaggaggtgatttcctcacctttctgagaaggaagaaggatgaactaaaactcaaacagttagtgaaattttcattagacgctgctgctggtatgttgtatctcgagagtaaaaactgtatacacagggaccttgctgcaagaaactgcctggtaggtgaaaataatgttctgaaaatcagtgactttggaatgtctcgtcaagaggatggtggagtgtattcatcttctggcttaaagcagattcccattaaatggacagcaccggaagctcttaattatgggagatacagttcagagagtgacgtgtggagctttggcatccttctctgggagaccttcagcttaggggtttgtccgtaccctggaatgacaaatcagcaagcaagagagcaagtagaaagaggataccggatgtcagctccccagcactgtccagaggatatttccaaaatcatgatgaagtgttgggattataaacctgaaaatcgccctaagttcagtgaacttcagaaagagctcactatcatcaagagaaaactcacatagtga

SEQ ID NO: 133976 - DNA, 558 bp, Homo sapiens
  Payload ID: 6170
  Gene Symbol: FER
  Gene Name: fer (fps/fes related) tyrosine kinase
  ENST ID: ENST00000628534
  CDS Start-End: 70-558
acatacacagatatgtgctgattagaaggctcacttgtgcagtgtggaggataaccagtgccttacaaaatggggtttgggagtgacctgaagaattcacatgaagcagtgttaaaattgcaagactgggaattacggttactggaaacagtaaagaaatttatggccctgagaataaaaagtgataaagaatatgcatctactttacagaacctttgtaatcaagttgataaggaaagtactgtccaaatgaattatgtcagcaacgtatccaagtcttggctacttatgattcagcagacagaacaacttagtaggataatgaagacacatgcagaggacttgaactctggacctttacacaggctcaccatgatgattaaggacaagcagcaggtgaagaaaagttacataggtgttcatcagcagatagaggcagagatgatcaaggttaccaaaacagaattggagaagttaaaatgcagctatagacaattaataaaagaaatgaattctgccaaagagaaatataaagaagctttagctaaagataaaaaa

SEQ ID NO: 133977 - DNA, 6477 bp, Homo sapiens
  Payload ID: 6171
  Gene Symbol: FER1L5
  Gene Name: fer-1-like family member 5
  Uniprot ID: A0AVI2
  ENST ID: ENST00000623019
  CDS Start-End: 1-6282
atgctgcggcttgtggtgcagtcggccaagattgacccaccactagccccactacccaggccctgcatgtccatcgacttcagagatatcaagaaaagaactcgtgtggtggaagggaatgatcccgtgtggaatgagaccctaatctggcacctctggaaccgccccctggaaaatgactccttcctgcaagtcacccttcaggacatgggctcacaaaagaaagaaagattcattggcctggccacagtactgctcaagccattgttgaaacaaccaagtgaggtcctttttgtgaaggacttgaccctgctcaaccattccatgaagcccacagattgtactgtcaccctacaggtggcccacatgagcaaccaggatattgagaagacaggagctgaagaccacctgggcataacggcaagagaggcagccagtcagaaactgatggtccctggctccactgcgcacagggctctgtcctcaaagcctcagcactttcaggttcgagtgaaggtgtttgaagcccgacagctcatgggcaacaacatcaaaccagtggtgaaggtgtccatcgcaggccagcagcaccagacacgcatcaagatgggaaacaaccctttctttaatgagatcttcttccagaattttcatgaggttcctgcaaagttctttgatgagaccatcttaatccagacagatattgggtttatctaccattctccaggtcacacactcctaaggaaatggctaggcctctgccagccaaataaccctggcagtggtgtgacaggctacctgaaagtcaccatctatgccctcggtgtgggagaccaggccctgatagatcaaaagctgctctatggcaccgatgacaccgatattcagatcttcaagtcagcggtagtcccgatcaacatggcttacttacagctcttcatctactgcgcagaggaccttcacctcaagaaacaccagtcagtgaatcctcagttggaggtggaactaattggggaaaagctcaggacacacatgcagacccaaaccgacaacccgatatggaaccagatcctgaccttccggattcagctaccctgcctctccagctacatcaagttcagagtcttggactgccgcaagaaggactgcccggatgagattgggactgccagcctgtccctcaaccagatctcgtccaccggagaagagatagaaggcaagcaaagcctcgagcccacttcctacacccctcgagtgtactccggcttcctgccctgctttggccccagcttcctgactctgcatgggggtaaaaaggcccctttcaggatccaggaagaaggcgcttgtattcccgactctgttagggatggtttagcttatcgaggccgagtcttcctggagttaatcacccaaatcaagtcctatcaagactccacgataaaggatctctcccatgaagtgaccaggatagagaagcaccagaaccgccaaaagtatgggctgtgcgtcatcttcctttcctgtaccatgatgcccaactttaaagagctgatccatttcgaggtcagcatcggtcactatgggaacaagatggacctgaattacaagcctctagtctcaagcacaccgtacagcccagtgatatatgatgggaacatctaccattatgtgccctggtacaacaccaagcctgtcgtggccgtgacctccaactgggaggacgtcagcttccgcatgaactgcctcaacctcctccacttcactcgggaccgcctgaaagccaacctggacaccctgaaatccacgcggaatccgaaggatccagctctcctctaccagtgggagaaactgctgagggagctggcagaggactgcaagcgccctctgccctgcatgacctatcagcccaaagccaccagcctggacaggaagaggtggcagctccgcagcctcctcctgcaggaactggcccaaaaggccaagcaagccaagcccaaggacatggtggccacagcggaggactggctgtaccgcctcaacaccgtgctccctgagccccagatgggcctccctgacgtgatgatttggctggtggccaaggagcagcgagtggcctatgcacaggtgcctgcccactccgtcctcttctccccggcaggggctctgcactccggcaggctctgtgggaagatacagacactcttcctacagtacccagagggtgaaggacagaaggatgtgctcccagctcacctccgggtctgcatgtggcttggcaatgtcacagacagcaaggacctgcagctgctccgccagggtgacacagcggtgtacgccgagatgtatgagaatcaggccaagtataaagaccagtgggggcagcaggggctgtatcactgccccaacttctcggatgtcatggggaacaagaccctccccatgacggatttccaaccacccctgggatggcactggcaggacagctggacagtggaacctcagagaaggctcctcctggacatagacatcaacaagagccaggtgctggaggaggtatatgagaaccagggccgtgacaccagaggggcctgggggcctgccgccatcccaaacacagacgtgaatggacagcccatggaggcccgggagaacgtgaagtgcccccaaggctggcactttaagaaggactgggtggtggagctgaaccacgcagtggacagctgggagtatggagtggggatcccaccgtcgggcctgccccaggtctggagcccggtggagaagacctaccactcgtgccgccgccggcgctgggcgcgtgtgcgcttcaggaaccatggggagctgagccacgagcaggagaccctctccttcctgcagctgggcctggccaagggcgaggaggagggctgggagtatgacaccttcggctccaagttccacctcaaccctcagccccagagccggttccgccgccgctgctggcgccgcaggctggcccccaacaaggacaagggcatcgcgcccatattcctcctggaggggtccttggcttgcgagggtggcagtgtgagggaggagggtgactgggcctgggctagaggaaacaggagcagcacccaagagcctcaggggagactgtcctgggtacaggctatggatctgaaataccacgctgggaaggaagaggacagcaagacatggccatggggtctggacagacagttcagggacccccagaggcaggacacccggccccccaacttgcccttcatctactgcaccttcaataagccccactactaccagctcttctgctacatctaccaggcccggaacctggtgtccaatcagatcctgacattccaagggcccttcattcgggtggtcttcctgaaccacagccagtgcacccaaaccctgaggagctctgcaggccccacatgggcccagacactcatcttccagcacctccttctgtacgagaacccacaggacaccaaagagagcccaccgcttgtggtgctggagctgtggcagcgtgacttctggggcaaggagagcttgtggggacggagcgtgtggcccccaatggtctggctggatctccaggaccggatcctgccccccatgaggtggcatccccttgtaaaggagttggggaaggaagagggcgagatcttggcatcctgtgagctgatcctccagactgagaagcttggagagaagcagctgcctatcttaagcgttccctggaagaatggggcatacacactccccaagagcatccagcccacgataaagaggatggccattgagatcctggcctggggccttcggaacatgaagaaggcgagctccccccagctcctggtggaattcggggaagagtccctgaggacagaacccatcagggactttcagaccaaccccaacttccccgagtctgagtctgtcctagtcctcacagtgctcatgccgacggaggaggcctatgcactgcccctcgtggtgaaggtggtagacaactgggccttcggccagcagaccgtgacgggccaggccaacatcgacttcctccagccctacttctgtgacccctgggctcaagactatatgcacccaaagcttccaacgctgtctgagaagaagcaccaagacttcctaggctacctctacagaaagttctggttcaagtccagtaaagcagaggatgagtatgagcatgaggtggactggtggagcaagctgttctgggccacagatgagcacaagtccctgaagtacaagtacaaagactaccacaccctcaaggtgtatgagtgtgagctggaggccgtgccagccttccagggcctgcaggacttctgccagaccttcaaactctaccaggagcagcccaagttggacagccccgtggtaggggagttcaagggccttttccgcatctacccctttcctgagaatccagaagccccaaagcccccgctgcagttcttggtttggccagagagagaggacttcccccagccgtgcttggtgcgggtgtacatggtacgagccatcaacctgcagccccaggactacaatggcctgtgtgacccttatgtgatcctgaaactgggcaagacagagcttggcaaccgggacatgtaccagcccaacactctggatcccatctttggcatgatgtttgaactcacctgcaacatacccctggagaaggacctagagatccagctctatgacttcgacctattttcacctgatgataagataggaaccacagtcatcgaccttgaaaaccgactcctatctggctttggagctcattgtgggctctccaaatcctactgccagtcagggccctttagatggcgggatcagatgcccccaagctacctcctagaacgctatgccaagcggaaagggctacctccgcctctgttcagtcctgaggaagatgctgttttctataatgggaaaaagttcaagctgcaaagctttgagcccaaaacccctactgttcatggtttgggacccaagaaggaacgccttgcactgtacctcctgcacacccaggggctggtacctgagcacgtggagacccgcacactgtacagccacagccagccaggcatcgaccagggaaaggtgcaaatgtgggtggacatcttccccaagaagctggggcctcctggcccccaagtcaacatcaaccccagaaagcctaaacgcaaagcctcagagcacagtggccacaggtatgagctgcgatgcatcatctggaagactgccaatgtggacctggtggatgacaatttaagtagagagaagacgagcgacatctacatcaaagggtggttatacgggctggagaaggacatgcagaagacagacatccactaccactcgctgactggggaggccgacttcaactggcggttcatctttaccatggactacctggcggcggagcgcacgtgtgtccagagccagaaggattacatatggagcctggatgccacgtccatgaagttcccagcccgacttatcatccaggtctgggacaatgacatcttctcccccgacgacttcctaggggtcctggagctggatttgtctgacatgcccctcccggctcggcacgccaagcagtgctccatcaggatgatggacgccgaccccaagtggccctatttcatccaatacaagcacttctccctctttaagaagaagactgtgactggctggtggccttgccaggtcctcgatggtggcaaatggcgcttgtcgggcaaggtgaagatgagcctggagattctgtcagagaaggaagccttaatcaagccagccgggcgaggccagtcggaacccaaccagtaccccacacttcatcctcccctacgcaccaacacctctttcacgtggctgcggtcaccagttcaaaacttctgctatattttctggaaacgctatcgcttcaaactcatagcctttatggtcatatcgattatagcacttatgctgtttaacttcatctattcagctccgcactatttggccatgagctggatcaaacctcaacttcagctgtatcctcccattaaaatattcaatatcatcaattcactaaacaccagcaacgccagctcttccatccttcccacccaggatccaaacctaaagcctacaatagaccatgagtggaaactccacccaggacccacaaatcacctgagtgatattttcccagaacttccagccccaggagactaattagtccatgctgcctggctttcctcctgctaccaacagccctccccttgggctggctaccagttctttgtttctatcttctagaatatatgcaagatgctaggaatattctggctattgtgttcagaaatcactttcaacaagacgagcagagctgtaattttccactgaaataaacaagttctataacagaga

SEQ ID NO: 133978 - DNA, 6367 bp, Homo sapiens
  Payload ID: 6171
  Gene Symbol: FER1L5
  Gene Name: fer-1-like family member 5
  ENST ID: ENST00000624922
  CDS Start-End: 1-6174
atgctgcggcttgtggtgcagtcggccaagattgacccaccactagccccactacccaggccctgcatgtccatcgacttcagagatatcaagaaaagaactcgtgtggtggaagggaatgatcccgtgtggaatgagaccctaatctggcacctctggaaccgccccctggaaaatgactccttcctgcaagtcacccttcaggacatgggctcacaaaagaaagaaagattcattggcctggccacagtactgctcaagccattgttgaaacaaccaagtgaggtcctttttgtgaaggacttgaccctgctcaaccattccatgaagcccacagattgtactgtcaccctacaggtggcccacatgagcaaccaggatattgagaagacaggagctgaagaccacctgggcataacggcaagagaggcagccagtcagaaactgatggtccctggctccactgcgcacagggctctgtcctcaaagcctcagcactttcaggttcgagtgaaggtgtttgaagcccgacagctcatgggcaacaacatcaaaccagtggtgaaggtgtccatcgcaggccagcagcaccagacacgcatcaagatgggaaacaaccctttctttaatgagatcttcttccagaattttcatgaggttcctgcaaagttctttgatgagaccatcttaatccaggtggtgaactcctcagcaatgagatacaaagcagagatcgggagatttcaaacagatattgggtttatctaccattctccaggtcacacactcctaaggaaatggctaggcctctgccagccaaataaccctggcagtggtgtgacaggctacctgaaagtcaccatctatgccctcggtgtgggagaccaggccctgatagatcaaaagctgctctatggcaccgatgacaccgatattcagatcttcaagtcagcggtagtcccgatcaacatggcttacttacagctcttcatctactgcgcagaggaccttcacctcaagaaacaccagtcagtgaatcctcagttggaggtggaactaattggggaaaagctcaggacacacatgcagacccaaaccgacaacccgatatggaaccagatcctgaccttccggattcagctaccctgcctctccagctacatcaagttcagagtcttggactgccgcaagaaggactgcccggatgagattgggactgccagcctgtccctcaaccagatctcgtccaccggagaagagatagaaggagtgtactccggcttcctgccctgctttggccccagcttcctgactctgcatgggggtaaaaaggcccctttcaggatccaggaagaaggcgcttgtattcccgactctgttagggatggtttagcttatcgaggccgagtcttcctggagttaatcacccaaatcaagtcctatcaagactccacgataaaggatctctcccatgaagtgaccaggatagagaagcaccagaaccgccaaaagtatgggctgtgcgtcatcttcctttcctgtaccatgatgcccaactttaaagagctgatccatttcgaggtcagcatcggtcactatgggaacaagatggacctgaattacaagcctctagtctcaagcacaccgtacagcccagtgatatatgatgggaacatctaccattatgtgccctggtacaacaccaagcctgtcgtggccgtgacctccaactgggaggacgtcagcttccgcatgaactgcctcaacctcctccacttcactcgggaccgcctgaaagccaacctggacaccctgaaatccacgcggaatccgaaggatccagctctcctctaccagtgggagaaactgctgagggagctggcagaggactgcaagcgccctctgccctgcatgacctatcagcccaaagccaccagcctggacaggaagaggtggcagctccgcagcctcctcctgcaggaactggcccaaaaggccaagcaagccaagcccaaggacatggtggccacagcggaggactggctgtaccgcctcaacaccgtgctccctgagccccagatgggcctccctgacgtgatgatttggctggtggccaaggagcagcgagtggcctatgcacaggtgcctgcccactccgtcctcttctccccggcaggggctctgcactccggcaggctctgtgggaagatacagacactcttcctacagtacccagagggtgaaggacagaaggatgtgctcccagctcacctccgggtctgcatgtggcttggcaatgtcacagacagcaaggacctgcagctgctccgccagggtgacacagcggtgtacgccgagatgtatgagaatcaggccaagtataaagaccagtgggggcagcaggggctgtatcactgccccaacttctcggatgtcatggggaacaagaccctccccatgacggatttccaaccacccctgggatggcactggcaggacagctggacagtggaacctcagagaaggctcctcctggacatagacatcaacaagagccaggtgctggaggaggtatatgagaaccagggccgtgacaccagaggggcctgggggcctgccgccatcccaaacacagacgtgaatggacagcccatggaggcccgggagaacgtgaagtgcccccaaggctggcactttaagaaggactgggtggtggagctgaaccacgcagtggacagtaagggctgggagtatggagtggggatcccaccgtcgggcctgccccaggtctggagcccggtggagaagacctaccactcgtgccgccgccggcgctgggcgcgtgtgcgcttcaggaaccatggggagctgagccacgagcaggagaccctctccttcctgcagctgggcctggccaagggcgaggaggagggctgggagtatgacaccttcggctccaagttccacctcaaccctcagccccagagccggttccgccgccgctgctggcgccgcaggctggcccccaacaaggacaagggcatcgcgcccatattcctcctggaggggtccttggctatggatctgaaataccacgctgggaaggaagaggacagcaagacatggccatggggtctggacagacagttcagggacccccagaggcaggacacccggccccccaacttgcccttcatctactgcaccttcaataagccccactactaccagctcttctgctacatctaccaggcccggaacctggtgtccaatcagatcctgacattccaagggcccttcattcgggtggtcttcctgaaccacagccagtgcacccaaaccctgaggagctctgcaggccccacatgggcccagacactcatcttccagcacctccttctgtacgagaacccacaggacaccaaagagagcccaccgcttgtggtgctggagctgtggcagcgtgacttctggggcaaggagagcttgtggggacggagcgtgtggcccccaatggtctggctggatctccaggaccggatcctgccccccatgaggtggcatccccttgtaaaggagttggggaaggaagagggcgagatcttggcatcctgtgagctgatcctccagactgagaagcttggagagaagcagctgcctatcttaagcgttccctggaagaatggggcatacacactccccaagagcatccagcccacgataaagaggatggccattgagatcctggcctggggccttcggaacatgaagaaggcgagctccccccagctcctggtggaattcggggaagagtccctgaggacagaacccatcagggactttcagaccaaccccaacttccccgagtctgagtctgtcctagtcctcacagtgctcatgccgacggaggaggcctatgcactgcccctcgtggtgaaggtggtagacaactgggccttcggccagcagaccgtgacgggccaggccaacatcgacttcctccagccctacttctgtgacccctgggctcaagactatatgcacccaaagcttccaacgctgtctgagaagaagcaccaagacttcctaggctacctctacagaaagttctggttcaagtccagtaaagcagaggatgagtatgagcatgaggtggactggtggagcaagctgttctgggccacagatgagcacaagtccctgaagtacaagtacaaagactaccacaccctcaaggtgtatgagtgtgagctggaggccgtgccagccttccagggcctgcaggacttctgccagaccttcaaactctaccaggagcagcccaagttggacagccccgtggtaggggagttcaagggccttttccgcatctacccctttcctgagaatccagaagccccaaagcccccgctgcagttcttggtttggccagagagagaggacttcccccagccgtgcttggtgcgggtgtacatggtacgagccatcaacctgcagccccaggactacaatggcctgtgtgacccttatgtgatcctgaaactgggcaagacagagcttggcaaccgggacatgtaccagcccaacactctggatcccatctttggcatgatgtttgaactcacctgcaacatacccctggagaaggacctagagatccagctctatgacttcgacctattttcacctgatgataagataggaaccacagtcatcgaccttgaaaaccgactcctatctggctttggagctcattgtgggctctccaaatcctactgccagtcagggccctttagatggcgggatcagatgcccccaagctacctcctagaacgctatgccaagcggaaagggctacctccgcctctgttcagtcctgaggaagatgctgttttctataatgggaaaaagttcaagctgcaaagctttgagcccaaaacccctactgttcatggtttgggacccaagaaggaacgccttgcactgtacctcctgcacacccaggggctggtacctgagcacgtggagacccgcacactgtacagccacagccagccaggcatcgaccagggaaaggtgcaaatgtgggtggacatcttccccaagaagctggggcctcctggcccccaagtcaacatcaaccccagaaagcctaaacggtatgagctgcgatgcatcatctggaagactgccaatgtggacctggtggatgacaatttaagtagagagaagacgagcgacatctacatcaaagggtggttatacgggctggagaaggacatgcagaagacagacatccactaccactcgctgactggggaggccgacttcaactggcggttcatctttaccatggactacctggcggcggagcgcacgtgtgtccagagccagaaggattacatatggagcctggatgccacgtccatgaagttcccagcccgacttatcatccaggtctgggacaatgacatcttctcccccgacgacttcctaggggtcctggagctggatttgtctgacatgcccctcccggctcggcacgccaagcagtgctccatcaggatgatggacgccgaccccaagtggccctatttcatccaatacaagcacttctccctctttaagaagaagactgtgactggctggtggccttgccaggtcctcgatggtggcaaatggcgcttgtcgggcaaggtgaagatgagcctggagattctgtcagagaaggaagccttaatcaagccagccgggcgaggccagtcggaacccaaccagtaccccacacttcatcctcccctacgcaccaacacctctttcacgtggctgcggtcaccagttcaaaacttctgctatattttctggaaacgctatcgcttcaaactcatagcctttatggtcatatcgattatagcacttatgctgtttaacttcatctattcagctccgcactatttggccatgagctggatcaaacctcaacttcagctgtatcctcccattaaaatattcaatatcatcaattcactaaacaccagcaacgccagctcttccatccttcccacccaggatccaaacctaaagcctacaatagaccatgagtggaaactccacccaggacccacaaatcacctgagtgatattttcccagaacttccagccccaggagactaattagtccatgctgcctggctttcctcctgctaccaacagccctccccttgggctggctaccagttctttgtttctatcttctagaatatatgcaagatgctaggaatattctggctattgtgttcagaaatcactttcaacaagacgagcagagctgtaattttccactgaaataaacaagttctataacaga

SEQ ID NO: 133979 - DNA, 6294 bp, Homo sapiens
  Payload ID: 6171
  Gene Symbol: FER1L5
  Gene Name: fer-1-like family member 5
  ENST ID: ENST00000622983
  CDS Start-End: 1-6294
atgctgcggcttgtggtgcagtcggccaagattgacccaccactagccccactacccaggccctgcatgtccatcgacttcagagatatcaagaaaagaactcgtgtggtggaagggaatgatcccgtgtggaatgagaccctaatctggcacctctggaaccgccccctggaaaatgactccttcctgcaagtcacccttcaggacatgggctcacaaaagaaagaaagattcattggcctggccacagtactgctcaagccattgttgaaacaaccaagtgaggtcctttttgtgaaggacttgaccctgctcaaccattccatgaagcccacagattgtactgtcaccctacaggtggcccacatgagcaaccaggatattgagaagacaggagctgaagaccacctgggcataacggcaagagaggcagccagtcagaaactgatggtccctggctccactgcgcacagggctctgtcctcaaagcctcagcactttcaggttcgagtgaaggtgtttgaagcccgacagctcatgggcaacaacatcaaaccagtggtgaaggtgtccatcgcaggccagcagcaccagacacgcatcaagatgggaaacaaccctttctttaatgaggtgggcatcttcttccagaattttcatgaggttcctgcaaagttctttgatgagaccatcttaatccagacagatattgggtttatctaccattctccaggtcacacactcctaaggaaatggctaggcctctgccagccaaataaccctggcagtggtgtgacaggctacctgaaagtcaccatctatgccctcggtgtgggagaccaggccctgatagatcaaaagctgctctatggcaccgatgacaccgatattcagatcttcaagtcagcggtagtcccgatcaacatggcttacttacagctcttcatctactgcgcagaggaccttcacctcgagttcatagagaaacaccagtcagtgaatcctcagttggaggtggaactaattggggaaaagctcaggacacacatgcagacccaaaccgacaacccgatatggaaccagatcctgaccttccggattcagctaccctgcctctccagctacatcaagttcagagtcttggactgccgcaagaaggactgcccggatgagattgggactgccagcctgtccctcaaccagatctcgtccaccggagaagagatagaaggagtgtactccggcttcctgccctgctttggccccagcttcctgactctgcatgggggtaaaaaggcccctttcaggatccaggaagaaggcgcttgtattcccgactctgttagggatggtttagcttatcgaggccgagtcttcctggagttaatcacccaaatcaagtcctatcaagactccacgataaaggatctctcccatgaagtgaccaggatagagaagcaccagaaccgccaaaagtatgggctgtgcgtcatcttcctttcctgtaccatgatgcccaactttaaagagctgatccatttcgaggtcagcatcggtcactatgggaacaagatggacctgaattacaagcctctagtctcaagcacaccgtacagcccagtgatatatgatgggaacatctaccattatgtgccctggtacaacaccaagcctgtcgtggccgtgacctccaactgggaggacgtcagcttccgcatgaactgcctcaacctcctccacttcactcgggaccgcctgaaagccaacctggacaccctgaaatccacgcggaatccgaaggatccagctctcctctaccagtgggagaaactgctgagggagctggcagaggactgcaagcgccctctgccctgcatgacctatcagcccaaagccaccagcctggacaggaagaggtggcagctccgcagcctcctcctgcaggaactggcccaaaaggccaagcaagccaagcccaaggacatggtggccacagcggaggactggctgtaccgcctcaacaccgtgctccctgagccccagatgggcctccctgacgtgatgatttggctggtggccaaggagcagcgagtggcctatgcacaggtgcctgcccactccgtcctcttctccccggcaggggctctgcactccggcaggctctgtgggaagatacagtacccagagggtgaaggacagaaggatgtgctcccagctcacctccgggtctgcatgtggcttggcaatgtcacagacagcaaggacctgcagctgctccgccagggtgacacagcggtgtacgccgagatggtgagttatgagaatcaggccaagtataaagaccagtgggggcagcaggggctgtatcactgccccaacttctcggatgtcatggggaacaagaccctccccatgacggatttccaaccacccctgggatggcactggcaggacagctggacagtggaacctcagagaaggctcctcctggacatagacatcaacaagagccaggtgctggaggaggtatatgagaaccagggccgtgacaccagaggggcctgggggcctgccgccatcccaaacacagacgtgaatggacagcccatggaggcccgggagaacgtgaagtgcccccaaggctggcactttaagaaggactgggtggtggagctgaaccacgcagtggacagtaagggctgggagtatggagtggggatcccaccgtcgggcctgccccaggtctggagcccggtggagaagacctaccactcgtgccgccgccggcgctgggcgcgtgtgcgcttcaggaaccatggggagctgagccacgagcaggagaccctctccttcctgcagctgggcctggccaagggcgaggaggagggctgggagtatgacaccttcggctccaagttccacctcaaccctcagccccagagccggttccgccgccgctgctggcgccgcaggctggcccccaacaaggacaagggcatcgcgcccatattcctcctggaggggtccttggctatggatctgaaataccacgctgggaaggaagaggacagcaagacatggccatggggtctggacagacagttcagggacccccagaggcaggacacccggccccccaacttgcccttcatctactgcaccttcaataagccccactactaccagctcttctgctacatctaccaggcccggaacctggtgtccaatcagatcctgacattccaagggcccttcattcgggtggtcttcctgaaccacagccagtgcacccaaaccctgaggagctctgcaggccccacatgggcccagacactcatcttccagcacctccttctgtacgagaacccacaggacaccaaagagagcccaccgcttgtggtgctggagctgtggcagcgtgacttctggggcaaggagagcttgtggggacggagcgtgtggcccccaatggtctggctggatctccaggaccggatcctgccccccatgaggtggcatccccttgtaaaggagttggggaaggaagagggcgagatcttggcatcctgtgagctgatcctccagactgagaagcttggagagaagcagctgcctatcttaagcgttccctggaagaatggggcatacacactccccaagagcatccagcccacgataaagaggatggccattgaggtgctggcgatgtgggatggggacggtgggcaggacaggcgggggtggtctggagtgcgctgcagccttctgctggtcctccctgactactggatccaaagctcacaccccgaaaaagactacctgggaggtggagggagacaggagagaaacgaagaggttctggtgatcctggcctggggccttcggaacatgaagaaggcgagctccccccagctcctggtggaattcggggaagagtccctgaggacagaacccatcagggactttcagaccaaccccaacttccccgagtctgagtctgtcctagtcctcacagtgctcatgccgacggaggaggcctatgcactgcccctcgtggtgaaggtggtagacaactgggccttcggccagcagaccgtgacgggccaggccaacatcgacttcctccagccctacttctgtgacccctgggctcaagactatatgcacccaaagcttccaacgctgtctgagaagaagcaccaagacttcctaggctacctctacagaaagttctggttcaagtccagtaaagcagaggatgagtatgagcatgaggtggactggtggagcaagctgttctgggccacagatgagcacaagtccctgaagtacaagtacaaagactaccacaccctcaaggtgtatgagtgtgagctggaggccgtgccagccttccagggcctgcaggacttctgccagaccttcaaactctaccaggagcagcccaagttggacagccccgtggtaggggagttcaagggccttttccgcatctacccctttcctgagaatccagaagccccaaagcccccgctgcagttcttggtttggccagagagagaggacttcccccagccgtgcttggtgcgggtgtacatggtacgagccatcaacctgcagccccaggactacaatggcctgtgtgacccttatgtgatcctgaaactgggcaagacagagcttggcaaccgggacatgtaccagcccaacactctggatcccatctttggcatgtttgaactcacctgcaacatacccctggagaaggacctagagatccagctctatgacttcgacctattttcacctgatgataagataggaaccacagtcatcgaccttgaaaaccgactcctatctggctttggagctcattgtgggctctccaaatcctactgccagtcagggccctttagatggcgggatcagatgcccccaagctacctcctagaacgctatgccaagcggaaagggctacctccgcctctgttcagtcctgaggaagatgctgttttctataatgggaaaaagttcaagctgcaaagctttgagcccaaaacccctactgttcatggtttgggacccaagaaggaacgccttgcactgtacctcctgcacacccaggggctggtacctgagcacgtggagacccgcacactgtacagccacagccagccaggcatcgaccagggaaaggtgcaaatgtgggtggacatcttccccaagaagctggggcctcctggcccccaagtcaacatcaaccccagaaagcctaaacggtatgagctgcgatgcatcatctggaagactgccaatgtggacctggtggatgacaatttaagtagagagaagacgagcgacatctacatcaaagggtggttatacgggctggagaaggacatgcagaagacagacatccactaccactcgctgactggggaggccgacttcaactggcggttcatctttaccatggactacctggcggcggagcgcacgtgtgtccagagccagaaggattacatatggagcctggatgccacgtccatgaagttcccagcccgacttatcatccaggtctgggacaatgacatcttctcccccgacgacttcctaggggtcctggagctggatttgtctgacatgcccctcccggctcggcacgccaagcagtgctccatcaggatgatggacgccgaccccaagtggccctatttcatccaatacaagcacttctccctctttaagaagaagactgtgactggctggtggccttgccaggtcctcgatggtggcaaatggcgcttgtcgggcaaggtgaagatgagcctggagattctgtcagagaaggaagccttaatcaagccagccgggcgaggccagtcggaacccaaccagtaccccacacttcatcctcccctacgcaccaacacctctttcacgtggctgcggtcaccagttcaaaacttctgctatattttctggaaacgctatcgcttcaaactcatagcctttatggtcatatcgattatagcacttatgctgtttaacttcatctattcagctccgcactatttggccatgagctggatcaaacctcaacttcagctgtatcctcccattaaaatattcaatatcatcaattcactaaacaccagcaacgccagctcttccatccttcccacccaggatccaaacctaaagcctacaatagaccatgagtggaaactccacccaggacccacaaatcacctgagtgatattttcccagaacttccagccccaggagactaa

SEQ ID NO: 133980 - DNA, 6513 bp, Homo sapiens
  Payload ID: 6171
  Gene Symbol: FER1L5
  Gene Name: fer-1-like family member 5
  ENST ID: ENST00000623246
  CDS Start-End: 1033-6318
atgctgcggcttgtggtgcagtcggccaagattgacccaccactagccccactacccaggccctgcatgtccatcgacttcagagatatcaagaaaagaactcgtgtggtggaagggaatgatcccgtgtggaatgagaccctaatctggcacctctggaaccgccccctggaaaatgactccttcctgcaagtcacccttcaggacatgggctcacaaaagaaagaaagattcattggcctggccacagtactgctcaagccattgttgaaacaaccaagtgaggtcctttttgtgaaggacttgaccctgctcaaccattccatgaagcccacagattgtactgtcaccctacaggtggcccacatgagcaaccaggatattgagaagacaggagctgaagaccacctgggcataacggcaagagaggcagccagtcagaaactgatggtccctggctccactgcgcacagggctctgtcctcaaagcctcagcactttcaggttcgagtgaaggtgtttgaagcccgacagctcatgggcaacaacatcaaaccagtggtgaaggtgtccatcgcaggccagcagcaccagacacgcatcaagatgggaaacaaccctttctttaatgagatcttcttccagaattttcatgaggttcctgcaaagttctttgatgagaccatcttaatccagacagatattgggtttatctaccattctccaggtcacacactcctaaggaaatggctaggcctctgccagccaaataaccctggcagtggtgtgacaggctacctgaaagtcaccatctatgccctcggtgtgggagaccaggccctgatagatcaaaagctgctctatggcaccgatgacaccgatattcagatcttcaagtcagcggtagtcccgatcaacatggcttacttacagctcttcatctactgcgcagaggaccttcacctcaagaaacaccagtcagtgaatcctcagttggaggtggaactaattggggaaaagctcaggacacacatgcagacccaaaccgacaacccgatatggaaccagatcctgaccttccggattcagctaccctgcctctccagctacatcaagttcagagtcttggactgccgcaagaaggactgcccggatgagattgggactgccagcctgtccctcaaccagatctcgtccaccggagaagagatagaaggcaagcaaagcctcgagcccacttcctacacccctcgagtgtactccggcttcctgccctgctttggccccagcttcctgactctgcatgggggtaaaaaggcccctttcaggatccaggaagaaggcgcttgtattcccgactctgttagggatggtttagcttatcgaggccgagtcttcctggagttaatcacccaaatcaagtcctatcaagactccacgataaaggatctctcccatgaagtgaccaggatagagaagcaccagaaccgccaaaagtatgggctgtgcgtcatcttcctttcctgtaccatgatgcccaactttaaagagctgatccatttcgaggtcagcatcggtcactatgggaacaagatggacctgaattacaagcctctagtctcaagcacaccgtacagcccagtgatatatgatgggaacatctaccattatgtgccctggtacaacaccaagcctgtcgtggccgtgacctccaactgggaggacgtcagcttccgcatgaactgcctcaacctcctccacttcactcgggaccgcctgaaagccaacctggacaccctgaaatccacgcggaatccgaaggatccagctctcctctaccagtgggagaaactgctgagggagctggcagaggactgcaagcgccctctgccctgcatgacctatcagcccaaagccaccagcctggacaggaagaggtggcagctccgcagcctcctcctgcaggaactggcccaaaaggccaagcaagccaagcccaaggacatggtggccacagcggaggactggctgtaccgcctcaacaccgtgctccctgagccccagatgggcctccctgacgtgatgatttggctggtggccaaggagcagcgagtggcctatgcacaggtgcctgcccactccgtcctcttctccccggcaggggctctgcactccggcaggctctgggggaaggggcagtacccagagggtgaaggacagaaggatgtgctcccagctcacctccgggtctgcatgtggcttggcaatgtcacagacagcaaggacctgcagctgctccgccagggtgacacagcggtgtacgccgagatggtgaattatgagaatcaggccaagtataaagaccagtgggggcagcaggggctgtatcactgccccaacttctcggatgtcatggggaacaagaccctccccatgacggatttccaaccacccctgggatggcactggcaggacagctggacagtggaacctcagagaaggctcctcctggacatagacatcaacaagagccaggtgctggaggaggtatatgagaaccagggccgtgacaccagaggggcctgggggcctgccgccatcccaaacacagacgtgaatggacagcccatggaggcccgggagaacgtgaagtgcccccaaggctggcactttaagaaggactgggtggtggagctgaaccacgcagtggacagtaagggctgggagtatggagtggggatcccaccgtcgggcctgccccaggtctggagcccggtggagaagacctaccactcgtgccgccgccggcgctgggcgcgtgtgcgcttcaggaaccatggggagctgagccacgagcaggagaccctctccttcctgcagctgggcctggccaagggcgaggaggagggctgggagtatgacaccttcggctccaagttccacctcaaccctcagccccagagccggttccgccgccgctgctggcgccgcaggctggcccccaacaaggacaagggcatcgcgcccatattcctcctggaggggtccttggctatggatctgaaataccacgctgggaaggaagaggacagcaagacatggccatggggtctggacagacagttcagggacccccagaggcaggacacccggccccccaacttgcccttcatctactgcaccttcaataagccccactactaccagctcttctgctacatctaccaggcccggaacctggtgtccaatcagatcctgacattccaagggcccttcattcgggtggtcttcctgaaccacagccagtgcacccaaaccctgaggagctctgcaggccccacatgggcccagacactcatcttccagcacctccttctgtacgagaacccacaggacaccaaagagagcccaccgcttgtggtgctggagctgtggcagcgtgacttctggggcaaggagagcttgtggggacggagcgtgtggcccccaatggtctggctggatctccaggaccggatcctgccccccatgaggtggcatccccttgtaaaggagttggggaaggaagagggcgagatcttggcatcctgtgagctgatcctccagactgagaagcttggagagaagcagctgcctatcttaagcgttccctggaagaatggggcatacacactccccaagagcatccagcccacgataaagaggatggccattgaggtgctggcgatgtgggatggggacggtgggcaggacaggcgggggtggtctggagtgcgctgcagccttctgctggtcctccctgactactggatccaaagctcacaccccgaaaaagactacctgggaggtggagggagacaggagagaaacgaagaggttctggtcatcctggcctggggccttcggaacatgaagaaggcgagctccccccagctcctggtggaattcggggaagagtccctgaggacagaacccatcagggactttcagaccaaccccaacttccccgagtctgagtctgtcctagtcctcacagtgctcatgccgacggaggaggcctatgcactgcccctcgtggtgaaggtggtagacaactgggccttcggccagcagaccgtgacgggccaggccaacatcgacttcctccagccctacttctgtgacccctgggctcaagactatatgcacccaaagcttccaacgctgtctgagaagaagcaccaagacttcctaggctacctctacagaaagttctggttcaagtccagtaaagcagaggatgagtatgagcatgaggtggactggtggagcaagctgttctgggccacagatgagcacaagtccctgaagtacaagtacaaagactaccacaccctcaaggtgtatgagtgtgagctggaggccgtgccagccttccagggcctgcaggacttctgccagaccttcaaactctaccaggagcagcccaagttggacagccccgtggtaggggagttcaagggccttttccgcatctacccctttcctgagaatccagaagccccaaagcccccgctgcagttcttggtttggccagagagagaggacttcccccagccgtgcttggtgcgggtgtacatggtacgagccatcaacctgcagccccaggactacaatggcctgtgtgacccttatgtgatcctgaaactgggcaagacagagcttggcaaccgggacatgtaccagcccaacactctggatcccatctttggcatgatgtttgaactcacctgcaacatacccctggagaaggacctagagatccagctctatgacttcgacctattttcacctgatgataagataggaaccacagtcatcgaccttgaaaaccgactcctatctggctttggagctcattgtgggctctccaaatcctactgccagtcagggccctttagatggcgggatcagatgcccccaagctacctcctagaacgctatgccaagcggaaagggctacctccgcctctgttcagtcctgaggaagatgctgttttctataatgggaaaaagttcaagctgcaaagctttgagcccaaaacccctactgttcatggtttgggacccaagaaggaacgccttgcactgtacctcctgcacacccaggggctggtacctgagcacgtggagacccgcacactgtacagccacagccagccaggcatcgaccagggaaaggtgcaaatgtgggtggacatcttccccaagaagctggggcctcctggcccccaagtcaacatcaaccccagaaagcctaaacggtatgagctgcgatgcatcatctggaagactgccaatgtggacctggtggatgacaatttaagtagagagaagacgagcgacatctacatcaaagggtggttatacgggctggagaaggacatgcagaagacagacatccactaccactcgctgactggggaggccgacttcaactggcggttcatctttaccatggactacctggcggcggagcgcacgtgtgtccagagccagaaggattacatatggagcctggatgccacgtccatgaagttcccagcccgacttatcatccaggtctgggacaatgacatcttctcccccgacgacttcctaggggtcctggagctggatttgtctgacatgcccctcccggctcggcacgccaagcagtgctccatcaggatgatggacgccgaccccaagtggccctatttcatccaatacaagcacttctccctctttaagaagaagactgtgactggctggtggccttgccaggtcctcgatggtggcaaatggcgcttgtcgggcaaggtgaagatgagcctggagattctgtcagagaaggaagccttaatcaagccagccgggcgaggccagtcggaacccaaccagtaccccacacttcatcctcccctacgcaccaacacctctttcacgtggctgcggtcaccagttcaaaacttctgctatattttctggaaacgctatcgcttcaaactcatagcctttatggtcatatcgattatagcacttatgctgtttaacttcatctattcagctccgcactatttggccatgagctggatcaaacctcaacttcagctgtatcctcccattaaaatattcaatatcatcaattcactaaacaccagcaacgccagctcttccatccttcccacccaggatccaaacctaaagcctacaatagaccatgagtggaaactccacccaggacccacaaatcacctgagtgatattttcccagaacttccagccccaggagactaattagtccatgctgcctggctttcctcctgctaccaacagccctccccttgggctggctaccagttctttgtttctatcttctagaatatatgcaagatgctaggaatattctggctattgtgttcagaaatcactttcaacaagacgagcagagctgtaattttccactgaaataaacaagttctataacagaga

SEQ ID NO: 133981 - DNA, 5859 bp, Homo sapiens
  Payload ID: 6172
  Gene Symbol: FER1L6
  Gene Name: fer-1-like family member 6
  Uniprot ID: Q2WGJ9
  ENST ID: ENST00000399018
  CDS Start-End: 15-5588
ttttcagaaaggggatgtttgggctgaaggtgaagaagaagagaaataaggcagagaaggggttaatcctagccaacaaggctgcgaaagatagtcaaggtgacactgaagcactgcaggaggagccttctcaccaggaaggaccgagaggagatttggtccatgatgatgcttctatctttcctgtcccctcagcttctccaaagagaagatcaaaactgttgactaagatccatgatggggaggtcagatcccaaaattatcaaattgccataaccatcaccgaggctcgccagctggtgggtgagaacattgacccagttgtgaccattgagattggggatgagaagaagcaaagcacagtgaaggaaggaaccaacagcccattttataatgaatactttgtcttcgacttcattgggccccaagtgcatctttttgacaagatcatcaaaatctccgtctttcaccacaagctgataggaagtgtactgattggctctttcaaagtagacctggggaccgtgtacaaccaacctggtcatcagttctgcaacaagtgggccctgctcacagaccctggtgacatcaggactggcaccaaggggtacctgaaatgtgacatcagtgtcatgggaaaaggtgatgtcttgaagaccagccctaaaacttctgacaccgaggagccaatagaaaagaaccttttgatccccaatgggtttccactggagagaccgtgggccagattctatgtgagactctacaaagcagaagggttgcccaaaatgaattcaagcatcatggcgaacgtcaccaaggcatttgtgggtgacagtaaggacctggtggatccctttgtggaggtctcctttgctgggcagatggggcgaaccacagtgcagaagaactgtgctgatcctgtgtggcatgaacaggtgatcttcaaggaaatgttccctcccttgtgtcggagggtgaaaatccaggtgtgggatgaaggcagcatgaatgacgtagccctggcaacccatttcattgacctgaagaaaatctccaacgaacaggatggagacaaaggctttctgcccacctttgggcctgcctggattaacctgtatggctcgcccaggaaccacagtctgatggatgactaccaggaaatgaacgaaggctttggggaaggtgtgtcattcaggggcagaatcttggtagaaattgctgtggaaatcctctcaggacgggcacaggaatctaaattttccaaggccctgaaggagctcaagttgccttccaaggacaaagactccaaatcttccaaaggtaaagacaaggctgacaaaactgaagatggaaaatcccaacaggcttcaaacaaaactaactcaaccgaggtggaggtggaatcgttcgatgtccccccggagattgtaccagaaaaaaatgaggaatttttactctttggagcattttttgaagctaccatgattgaccggaagattggagataaacccatcagctttgaagtttctattggtaattttggaaacctgattgatggaggatcccatcatgggagtaagaagtcagctgaatcagctgaagaagacctccttccactgcttcacgaagggcaaggggatgtggcccatgatgttcccattcctatggcctccaccactcacccggagaagccactggtgacagaagggaacaggaattacaactatttgccatttgaggctaagaagccctgtgtctatttcatcagctcttggggagaccagaccttcaggctgcactggtccaacatgctggagaaaatggcagacttcctggaagaaagtatagaagaagtgagagaattgatcaagatttcacaggaggcacctgaagagaaaatgaaaacagtgctcagtgacttcatcagtcggagcagtgcctttatctctgaagcagaaaaaaagcccaagatgttgaaccaaaccactttagataagaagcgacttacgctctgctggcaggagctggaagcaatgtgcaaggaggccaaggggatcattcagcagcagaagaaaaagttatctgttgatgaaatgattcacgaagcccaaaactttgtggaaaaaatccgctttcttgttgatgagccccagcacactatccctgacgttttcatctggatgctcagcaacaacaggagagtggcctatgcccgcatcgcctccaaagacctcctctattcccctgtcgcggggcagatgggcaaacactgcggcaagatcaaaactcacttcctcaaacctcctgggaaacgaccggctggttggtctgtgcaagcaaaagtcgacgtgtacctgtggctgggctccatcaagcatgccagtgccattttggacaacttgccagtaggctatgaagcagaaatgtcctccaaaggggctggcaccaatcaccccccatctaacctgctctaccaagaacagcatgtttttcagctgagggctcacatgtaccaagcccggggcctcatcgcagctgacagcaatggactttcagacccttttgccaaagtcacgttcctttctcactgccagacaacaaagataatctcccagaccctctctccgacctggaaccagatgctgctgttcaatgatttggtgctgcatggagatgtgaaggagctggcagagtccccgcccttagtggtggtggagctgtatgacagcgacgctgtggggaagccagaatatttgggtgccacagtggctgctcctgttgtgaagctggctgaccaggactatgagccccccaggttatgctatcaccccatcttttgtgggaatctctctggaggggatctccttgctgtatttgaactgctgcaggttcctccttctgggctgcaaggcctcccacccgttgagccaccagacatcacccagatctacccggttcctgccaacattcggccggtgctgagcaaataccgagtggaggttctcttctggggagttcgggaaatgaagaaggtgcagctcctctctgtggatcggcctcaggctctcattgagtgcggaggacaaggtgtgaagtcctgcgtgatccagagctacaagaacaacccgaacttcagcatccaggcagacgctttcgaagtggaactgcctgagaacgagcttctgcacccgccactgagcatctgcgtggtggactggagagcttttgggaggagtacccttgtgggcacctacaccatcaactacttgaagcagtttttgtgtaaactcagagagccccttgcccccatcacacaggtggatggaacccagcctgggcacgatatttcagattcgctaacagccactgagtcctctggagcccacagctcctcccaggatcccccagcagatcacatttatgtggatgttgagccacctcccacagtggtgcccgactctgcccaggcccagccggccatcctggttgacgtccctgactcatccccgatgctggagcctgaacacacacctgtagcccaggagccaccaaaagatggaaaacctaaggatcccaggaagccttcccggaggtccactaagaggagaaagaggaccatagcagatgaatctgctgaaaacgtgattgactggtggtctaagtattatgcctccctgaagaaagcccagaaggcaaaggagagaaatcccaagggaaaaaaaggcaatacagaggcaaagccagatgaggtagtggtagatatagaagatgggccaaagaagaagaaagacaaaatgctcaagaagaaacccaaagatgatggaatccccaacctggccatcttgcagatatatgacggtgatctcgagagtgaattcaacaattttgaagactgggtgaaaacttttgagctcttcagaggcaagtctacggaagatgaccatggtcttgatggagaccgagtcataggaaaatttaagggctccttctgcatctacaaaagcccccaggattctagctctgaggacagcgggcagctgagaatccagcaagggattccgcccaatcaccctgtcacagtgctgatcagagtatacattgtcgcggcatttaatcttagtccagctgatccagatggcaaatcagatccctacattgtgatcaagcttggcaagacagaaatcaaagaccgggataaatacatccctaaacaactgaacccagtatttggaaggtcatttgagatccaagccacattcccaaaagagtccctgctctccatcctgatctatgaccatgacatgattggcacagatgaccttattggtgagaccaagatcgacctggagaaccgcttctacagcaaacaccgagccatctgtggcttgcagagccagtatgagatagaaggatacaatgcctggagagacacgtccaaacccaccgaaatcctcactaagctctgcaaagacaacaagctggatggaccctactttcaccctgggaaaatacagataggaaaccaagtcttttctggaaaaactatcttcactgaagaggacactgatgagacagtggagtcttatgaacacctggccctcaaggttttacactcttgggaggatatcccggaagtcgggtgtaggctggttcctgaacacatagaaactcggccactgtaccacaaggataagccaggaatggagcagggccgcctgcagatgtgggtggacatgtttcccaaggatatgcctcaacctggacctcctgttgacatctctccaaggcgacccaaaggatacgaattgagagtgaccatctggaacactgaagatgtcattttagaggatgagaatatcttcacaggccaaaaatcaagtgatatttatgtgaaagggtggttaaagggcttggaggatgacaagcaggagacagatgtgcattacaactccctgactggagagggcaacttcaactggcgcttcctgtttccctttcagtatctcccagctgagaagcaaatggtcattaccaagagggagaacatcttctctttagagaagatggagtgtaagactcctgctgtgttggtgctgcaggtttgggattttgaaaggctgtcctcagatgacttcctgggcaccctggaaatgaacctcaacagtttccctcgagcagctaagtctgccaaagcctgtgatcttgccaagtttgaaaatgcaagtgaggagaccaagatctctatattccagcaaaaacgtgtgcgtggctggtggcctttttctaaaagcaaagaactcacaggcaaggttgaagctgagttccacctagttacagcagaagaagctgagaaaaatcctgttggaaaagcccgaaaggagccagagcccctggccaagcccaaccgcccagacacctccttttcgtggttcatgagcccctttaagtgcctgtactacctcatctggaagaattacaaaaagtacatcatcattgctttcattctcatcatcctcatcatcttcctcgtccttttcatctacaccttgccaggagccatcagccgaaggatcgttgtgggctcatagaggatcatggaggacccagatcctcgccatatactaatcctctcttccttatctgggagcatctaagaacatgtcccatgcatggcactgtgctgagtgctaaggggacagatcaacccttcttggaagagatggaaaagaaacatttcctccctgctccaacccctgcctccaagtttcaaacttgtaaggcatgttttatcccttgggcagcatgaaataaggcactttcacctcatggtaatcaacaatgacctcaaattgacttaga

SEQ ID NO: 133982 - DNA, 6051 bp, Homo sapiens
  Payload ID: 6172
  Gene Symbol: FER1L6
  Gene Name: fer-1-like family member 6
  Uniprot ID: Q2WGJ9
  ENST ID: ENST00000522917
  CDS Start-End: 207-5780
tggtgaggttgcctgtaactgacttcaaaaggccattccaccattccgtcaagccagctgctttagaacggttgggaacaccgtgagaccagtgaattccacgagcacgaacccactgctgcgcttcatttgctgtgaagtgagtcccttgatcagagcaatgctgtgtggaccatcgtgaaggtggacaaggcattttaaaggggatgtttgggctgaaggtgaagaagaagagaaataaggcagagaaggggttaatcctagccaacaaggctgcgaaagatagtcaaggtgacactgaagcactgcaggaggagccttctcaccaggaaggaccgagaggagatttggtccatgatgatgcttctatctttcctgtcccctcagcttctccaaagagaagatcaaaactgttgactaagatccatgatggggaggtcagatcccaaaattatcaaattgccataaccatcaccgaggctcgccagctggtgggtgagaacattgacccagttgtgaccattgagattggggatgagaagaagcaaagcacagtgaaggaaggaaccaacagcccattttataatgaatactttgtcttcgacttcattgggccccaagtgcatctttttgacaagatcatcaaaatctccgtctttcaccacaagctgataggaagtgtactgattggctctttcaaagtagacctggggaccgtgtacaaccaacctggtcatcagttctgcaacaagtgggccctgctcacagaccctggtgacatcaggactggcaccaaggggtacctgaaatgtgacatcagtgtcatgggaaaaggtgatgtcttgaagaccagccctaaaacttctgacaccgaggagccaatagaaaagaaccttttgatccccaatgggtttccactggagagaccgtgggccagattctatgtgagactctacaaagcagaagggttgcccaaaatgaattcaagcatcatggcgaacgtcaccaaggcatttgtgggtgacagtaaggacctggtggatccctttgtggaggtctcctttgctgggcagatggggcgaaccacagtgcagaagaactgtgctgatcctgtgtggcatgaacaggtgatcttcaaggaaatgttccctcccttgtgtcggagggtgaaaatccaggtgtgggatgaaggcagcatgaatgacgtagccctggcaacccatttcattgacctgaagaaaatctccaacgaacaggatggagacaaaggctttctgcccacctttgggcctgcctggattaacctgtatggctcgcccaggaaccacagtctgatggatgactaccaggaaatgaacgaaggctttggggaaggtgtgtcattcaggggcagaatcttggtagaaattgctgtggaaatcctctcaggacgggcacaggaatctaaattttccaaggccctgaaggagctcaagttgccttccaaggacaaagactccaaatcttccaaaggtaaagacaaggctgacaaaactgaagatggaaaatcccaacaggcttcaaacaaaactaactcaaccgaggtggaggtggaatcgttcgatgtccccccggagattgtaccagaaaaaaatgaggaatttttactctttggagcattttttgaagctaccatgattgaccggaagattggagataaacccatcagctttgaagtttctattggtaattttggaaacctgattgatggaggatcccatcatgggagtaagaagtcagctgaatcagctgaagaagacctccttccactgcttcacgaagggcaaggggatgtggcccatgatgttcccattcctatggcctccaccactcacccggagaagccactggtgacagaagggaacaggaattacaactatttgccatttgaggctaagaagccctgtgtctatttcatcagctcttggggagaccagaccttcaggctgcactggtccaacatgctggagaaaatggcagacttcctggaagaaagtatagaagaagtgagagaattgatcaagatttcacaggaggcacctgaagagaaaatgaaaacagtgctcagtgacttcatcagtcggagcagtgcctttatctctgaagcagaaaaaaagcccaagatgttgaaccaaaccactttagataagaagcgacttacgctctgctggcaggagctggaagcaatgtgcaaggaggccaaggggatcattcagcagcagaagaaaaagttatctgttgatgaaatgattcacgaagcccaaaactttgtggaaaaaatccgctttcttgttgatgagccccagcacactatccctgacgttttcatctggatgctcagcaacaacaggagagtggcctatgcccgcatcgcctccaaagacctcctctattcccctgtcgcggggcagatgggcaaacactgcggcaagatcaaaactcacttcctcaaacctcctgggaaacgaccggctggttggtctgtgcaagcaaaagtcgacgtgtacctgtggctgggctccatcaagcatgccagtgccattttggacaacttgccagtaggctatgaagcagaaatgtcctccaaaggggctggcaccaatcaccccccatctaacctgctctaccaagaacagcatgtttttcagctgagggctcacatgtaccaagcccggggcctcatcgcagctgacagcaatggactttcagacccttttgccaaagtcacgttcctttctcactgccagacaacaaagataatctcccagaccctctctccgacctggaaccagatgctgctgttcaatgatttggtgctgcatggagatgtgaaggagctggcagagtccccgcccttagtggtggtggagctgtatgacagcgacgctgtggggaagccagaatatttgggtgccacagtggctgctcctgttgtgaagctggctgaccaggactatgagccccccaggttatgctatcaccccatcttttgtgggaatctctctggaggggatctccttgctgtatttgaactgctgcaggttcctccttctgggctgcaaggcctcccacccgttgagccaccagacatcacccagatctacccggttcctgccaacattcggccggtgctgagcaaataccgagtggaggttctcttctggggagttcgggaaatgaagaaggtgcagctcctctctgtggatcggcctcaggctctcattgagtgcggaggacaaggtgtgaagtcctgcgtgatccagagctacaagaacaacccgaacttcagcatccaggcagacgctttcgaagtggaactgcctgagaacgagcttctgcacccgccactgagcatctgcgtggtggactggagagcttttgggaggagtacccttgtgggcacctacaccatcaactacttgaagcagtttttgtgtaaactcagagagccccttgcccccatcacacaggtggatggaacccagcctgggcacgatatttcagattcgctaacagccactgagtcctctggagcccacagctcctcccaggatcccccagcagatcacatttatgtggatgttgagccacctcccacagtggtgcccgactctgcccaggcccagccggccatcctggttgacgtccctgactcatccccgatgctggagcctgaacacacacctgtagcccaggagccaccaaaagatggaaaacctaaggatcccaggaagccttcccggaggtccactaagaggagaaagaggaccatagcagatgaatctgctgaaaacgtgattgactggtggtctaagtattatgcctccctgaagaaagcccagaaggcaaaggagagaaatcccaagggaaaaaaaggcaatacagaggcaaagccagatgaggtagtggtagatatagaagatgggccaaagaagaagaaagacaaaatgctcaagaagaaacccaaagatgatggaatccccaacctggccatcttgcagatatatgacggtgatctcgagagtgaattcaacaattttgaagactgggtgaaaacttttgagctcttcagaggcaagtctacggaagatgaccatggtcttgatggagaccgagtcataggaaaatttaagggctccttctgcatctacaaaagcccccaggattctagctctgaggacagcgggcagctgagaatccagcaagggattccgcccaatcaccctgtcacagtgctgatcagagtatacattgtcgcggcatttaatcttagtccagctgatccagatggcaaatcagatccctacattgtgatcaagcttggcaagacagaaatcaaagaccgggataaatacatccctaaacaactgaacccagtatttggaaggtcatttgagatccaagccacattcccaaaagagtccctgctctccatcctgatctatgaccatgacatgattggcacagatgaccttattggtgagaccaagatcgacctggagaaccgcttctacagcaaacaccgagccatctgtggcttgcagagccagtatgagatagaaggatacaatgcctggagagacacgtccaaacccaccgaaatcctcactaagctctgcaaagacaacaagctggatggaccctactttcaccctgggaaaatacagataggaaaccaagtcttttctggaaaaactatcttcactgaagaggacactgatgagacagtggagtcttatgaacacctggccctcaaggttttacactcttgggaggatatcccggaagtcgggtgtaggctggttcctgaacacatagaaactcggccactgtaccacaaggataagccaggaatggagcagggccgcctgcagatgtgggtggacatgtttcccaaggatatgcctcaacctggacctcctgttgacatctctccaaggcgacccaaaggatacgaattgagagtgaccatctggaacactgaagatgtcattttagaggatgagaatatcttcacaggccaaaaatcaagtgatatttatgtgaaagggtggttaaagggcttggaggatgacaagcaggagacagatgtgcattacaactccctgactggagagggcaacttcaactggcgcttcctgtttccctttcagtatctcccagctgagaagcaaatggtcattaccaagagggagaacatcttctctttagagaagatggagtgtaagactcctgctgtgttggtgctgcaggtttgggattttgaaaggctgtcctcagatgacttcctgggcaccctggaaatgaacctcaacagtttccctcgagcagctaagtctgccaaagcctgtgatcttgccaagtttgaaaatgcaagtgaggagaccaagatctctatattccagcaaaaacgtgtgcgtggctggtggcctttttctaaaagcaaagaactcacaggcaaggttgaagctgagttccacctagttacagcagaagaagctgagaaaaatcctgttggaaaagcccgaaaggagccagagcccctggccaagcccaaccgcccagacacctccttttcgtggttcatgagcccctttaagtgcctgtactacctcatctggaagaattacaaaaagtacatcatcattgctttcattctcatcatcctcatcatcttcctcgtccttttcatctacaccttgccaggagccatcagccgaaggatcgttgtgggctcatagaggatcatggaggacccagatcctcgccatatactaatcctctcttccttatctgggagcatctaagaacatgtcccatgcatggcactgtgctgagtgctaaggggacagatcaacccttcttggaagagatggaaaagaaacatttcctccctgctccaacccctgcctccaagtttcaaacttgtaaggcatgttttatcccttgggcagcatgaaataaggcactttcacctcatggtaatcaacaatgacctcaaattgacttaga

SEQ ID NO: 133983 - DNA, 640 bp, Homo sapiens
  Payload ID: 6173
  Gene Symbol: FERD3L
  Gene Name: Fer3-like bHLH transcription factor
  Uniprot ID: Q96RJ6
  ENST ID: ENST00000275461
  CDS Start-End: 60-560
accagcaacctcgcccctccctgcggaaaaccgatgagaggcagggccaagccgaagcgatggcggcctatccggagagctgcgtggacactacggtgctggacttcgtcgcagacctgtccctggcctccccgagacgccctctcctctgcgacttcgcacccggggtctccttgggggacccagcccttgcgctccgagagggaagacccaggaggatggcgcggtttgaagagggggacccagaagaagaggagtgcgaagtggaccagggggacggagaagaggaggaggaagaggagcgcggaagaggtgtctccctattaggccgccccaagaggaaaagggtgatcacctacgcccagcgccaggccgccaacatccgcgaaaggaagcggatgttcaacctcaacgaggcctttgaccagctgcggaggaaggtgcccacgtttgcttacgagaaaaggctgtcccggatcgagaccctccgcctggccatcgtctatatctccttcatgaccgagctcttggagagctgtgagaagaaggaaagcggctgagcctggtgtggagagtctgcccttcctcgtctggtagtgctggggtgtgtcaggaccgggcactgggtgaggctaaaggg

SEQ ID NO: 133984 - DNA, 4971 bp, Homo sapiens
  Payload ID: 6174
  Gene Symbol: FRMPD1
  Gene Name: FERM and PDZ domain containing 1
  Uniprot ID: Q5SYB0
  ENST ID: ENST00000377765
  CDS Start-End: 100-4836
ggccgcgaccgtgcccgccgctgggcggggccgcccttctccgagagcgtcagcccgctaggtccttgtccgcgcgggcggcacctcctctgcaggtaaatggaagagctggagaccagtttattccagacacggaaagcacatagaatagaacaaatggtggcaagatggcttcggcgctcccgggacagctcggcccgggctaaagttgctgcagctgatgggcccgccaggaacccaactcagaccctcatccctgtgcgacacacagtaaagatagacaaagacaccctcctccaggactatggatttcacatttctgagagccttccccttacagtggtggctgtcacagcaggaggctctgctcacggcaagcttttccctggtgatcagatcctccaaatgaacaatgagcctgctgaagacctttcctgggaacgagcagtcgatattctcagggaagcagaagattctctttcaatcacagttgttcgctgcacgtcgggagtccctaaatcgtccttcctgaccgaggagaagagagccagactgaagaccaaccccgtgaaggtgcactttgctgaagaagtgctcatcagtggacacagccagggtaattctctgctgtgtatgcccaacgtgctcaagctatacttggagaatggacagaccaaagctttcaagtttgaggcaaacacaaccgtgaaggacatcatcctcaccgtgaaggagaagctgtccatccgaagtatcgagtactttgcactggccctggaagagcagtacagcatctcccggctgcacctgctgcacgaagaggaactcatccagcaggtggtagaaagggaggagtcacatgactaccgctgcctcttcagggtctgttttgttcccaaggaccccctggacctcctgaaagaagaccccgtggcctttgaatacctctatctgcagagctgcagcgatgtgctccaggagcgctttgctgtagaaatgaaatgtagctctgcactccgactcgcggctctgcacatccaggaacggatctacgcctgtgcccagccacagaagatctctttaaagtatatagagaaagactggggaatagagaactttatatctccaactttactccgaaacatgaaaggcaaagacatcaagaaagccattagcttccacatgaagaggaaccagaatttgctggaaccccgacagaagcaacttatttctgctgcccagctacgtttaaattatctacagatcctcggagaactcaagacatatggtggaagaatctttaatgctactttaatgttacaggatagagaatcctacattgcccttctagttggagccaagtatgggattagccaggttatcaatagcaaactcaacatcatgtccacattggcagagtttgcaaacatcagccgtgtagagctaacggaagagtctgagaaagtgagcgtcgtcaaagtgtatcttcaggacgtcaaggttctgactttgctgctggaatccaacagtgcaaaagacctagcctgcctgattgctgggtactacaggctgttggttgacccagttacctccattttcctctggcctggaaacaaacaacaagcgcaccgggtatctgcagaagaaggctatgaatccagggcctgcagtgactcagaggagtcctctgaggtggactgcgtactcgaacctctctctgacaggcgcctggtgaaactggcaccctgcagatcactcataaaggaggagcagcctcctgggaacagccccacacctgaggtggctaggaggggccccagcacctgcggggccagcagcacgacagacagtgccgagtccgaggcgtccgactcagccaacactgagagccgcggctacaggaccagtggctcgagtgagtccatggacgctctggaagaggatgacttagacacctgctcctccagcaggtccaccttcttccactttggctcgccaggcctcgcagagagcattgactctgacagccaggaggagagaagcgggattgaaaccagtggcttcctctgtctcctggacctggcccagagagccaacccccagtgccagaagacagagttttccgagagtgctgctttggagacatttggctgggcaccagaactgagcacagtcaggctggaccccaggctgtatgaaggcagccacgctgactactacagcctgtgttccagtgtctccccggccagctacctgagtgacagttccgagagtacagcttcccggcaagggggagccccgccagcctggggtcagcagggctggactgaggcccagcccagttccatgctggaacccctggccctgcacccaccactggcctttgaggatggcagctcagatgaggaatactatgacgcggctgataagctcactcccccaggccccccgtcagggcccagagatgtttctactgcagaacccagtgccacaagcttgcagaataaggccagcacttctagccctgagaacagcctgccttgtgggccagatggaagacagccaagcaggaggggaggggtgaagaaatatgccaagaccctgaggaaaagaaggtctttcctacagaccgactacacctctcaggtctcatttcccctggtgccatcagcctccctggagagtgtagacgacgtgtgctactatgacagggagccctacctggcccttggtgcaccctccccaactgtgtcctctctgcaggacatgcagggtgagcctggccttctggagaccaaggccttggggctgctggctcctctgagggagaccaagagcacaaacccagcctccagggtcatggagatggagcccgagaccatggaaaccaaatcagtcatcgactctcgagtgtcttctatttctgccattcgcttccggattgaccccaacaataaagagaattctggtgttgtccctgctgccagctcctcagcaagcactcctcactgttctaacccaggttcatctggcccagatactgctcaggcaaggccttcccaaatcttacctctatctcaagacctggatgggattgcccccaaagaaccaaccatagagcatggagacagctccttctccctctccagtggtgaccctaacccagacagagcctgcctggccagcaacccaggactaaataatgtctctcaaggagacacactagagctccagttggagccccatgtccagttggaaatgggattggaatctttttgtacaaatcatatacaagaaactgcccccaaatacacagagcctttgttgtctcctagagatgagcctagaagtgatgaatgtggaataaatccaggagagaagatagcttctatccctacaaaggaagagccacaaggacaactatctctggaaagagacagagaagttacaaacaaaaatggcaccaacgtatttcaggaggagtctaggaaggattcaggtgactccccgggtgatgtgtcaaataatgtttcacagactcttgatattagctctccagctggtaaaatagtaacctccctttctttagatgctcctgtaacagggaccgagcagatcccaccacatccccctagagaccctcaaggacagagcagagaacccccagggcaaggctgccaggctcaagaacaaaaactattcgtagagttggatttagaccctgatttctttcttgggaagcagacagtttcaccagccgtccctccagaggggatcaaggcagaggcacctaaccatgtgacagggcaagatatagcccctagggacagccctgagtgggtctgttttaatcctgagccttccctgccagaaccactaccatgtccacaagaggatcctcacttagaaacttcaaaccattgcttactctcagaaggcaaaagtgacagctctagcatctgcctttctgctgagaagtcttttctgtgctttgccccagaaagccatcctgaagtctctgccagtctcagggtggccacatctttgggttttgcaggcatgaatgagatggtggctcccaggatagggatggaccagtgcagctgtcagttctcctatgccacatgcttccgtggcccgcagcctgagacagaggaagaagacagggacttggaagcacaccccatggcccccctcacctcaccgccctctgcgggaagcccggtggttctgccctggaggcctgcccgagcccacagctgcaccaccgcacccctgtcgaggaaaagccacatctggccagagtactgctccagggcactgagacagctgaaagccacccctgccagcacccctgagggcttcatccaactcatggagagcttgctggagctacaagacattttagaaacttcctggggggttggaaacaaacatcccccagagaagtgcacctggcactttaccgaaagccggagccgcctctgcatgggctcccagaagctcctgtcgagctgtcggcatgtgatcagaatggaccagtcccccgaagagatgcagggggccgtgcgtgacaccttccagcacctggtccagctggccggcctgtgctttcagttcacagactgtagccgctgctccgcccggcacagggaggcagcggggaacctgagggatgtggtgtacacctaccatcagtttatagaggctgctaaatcgacctgcgagagaggctaccacgacctgagtgtgaaactcctggcccgtcagtgcacggccctcacggccgccgtgttctgtttgacccagaagttccgggcatccacggccctgtaaacaggtcaacggcccaagggcctcctgccctgtcctgccttggacacttccctgagaagccccttccactctcccacccaccctcttcaaatgtttactatatagagtattcaaataaactgctgcttaatcttg

SEQ ID NO: 133985 - DNA, 499 bp, Homo sapiens
  Payload ID: 6174
  Gene Symbol: FRMPD1
  Gene Name: FERM and PDZ domain containing 1
  ENST ID: ENST00000359927
  CDS Start-End: 312-499
ggggtcgggagttggagaccagcctgaccaacatggagaaaccccaactctactaaaaatacaaaattagccgggcatggtggcgcatgcctgtaatcccagctactcgggaggctgaggcaggagaatcgcttgaacccgggaggcggaggttgtggtgagctgagatcacgccattgcactccagcctgggcaacaagagcaaaactctctctcaaaaaaaaaaaaagaaaagaaaaaagaaagtaaataggggatttgaacagaaacaggtttgcaggtagaaaaaaacgtctcaaccactgaggtaaatggaagagctggagaccagtttattccagacacggaaagcacatagaatagaacaaatggtggcaagatggcttcggcgctcccgggacagctcggcccgggctaaagttgctgcagctgatgggcccgccaggaacccaactcagaccctcatccctgtgcgacacacagtaaagatagacaaaga

SEQ ID NO: 133986 - DNA, 5465 bp, Homo sapiens
  Payload ID: 6174
  Gene Symbol: FRMPD1
  Gene Name: FERM and PDZ domain containing 1
  Uniprot ID: Q5SYB0
  ENST ID: ENST00000539465
  CDS Start-End: 594-5330
gaacacaactgggcagaactagcaggagaccaagtattatgtggcacagaataaactctacaactataaaatggatgcatcatgagaccttgggtgtcatcttctgtgttgcccttggcacagaggaagccagtttgccaatcaaggacctctagggtttcctctctcgactggctcaagtggttgaggtcttgaggatgagaatgccatctgcaggactcctgtgcctgtcgtgctgaaaggagagaagccagacatgttgacaggcatagctgcagctgcccagtatccgcagatgaggagggtcatgctcctgtgaggagggggcccgtgccacagagataccacccaactttgcccacatggcctggcagtcggttttacttgggcttatcgatgagctatgggaaggtcatttgatattcacattcttgtggccgcaatgttgggaatgtggccttttatctttaaaaatagctgtgtgctgggaggcccgggagcagtgtcctgggatggaggggagctgccagcagggggaagaggtgtggatttctttccgaggaagagtcccttcagctctgtgccactggtaaatggaagagctggagaccagtttattccagacacggaaagcacatagaatagaacaaatggtggcaagatggcttcggcgctcccgggacagctcggcccgggctaaagttgctgcagctgatgggcccgccaggaacccaactcagaccctcatccctgtgcgacacacagtaaagatagacaaagacaccctcctccaggactatggatttcacatttctgagagccttccccttacagtggtggctgtcacagcaggaggctctgctcacggcaagcttttccctggtgatcagatcctccaaatgaacaatgagcctgctgaagacctttcctgggaacgagcagtcgatattctcagggaagcagaagattctctttcaatcacagttgttcgctgcacgtcgggagtccctaaatcgtccttcctgaccgaggagaagagagccagactgaagaccaaccccgtgaaggtgcactttgctgaagaagtgctcatcagtggacacagccagggtaattctctgctgtgtatgcccaacgtgctcaagctatacttggagaatggacagaccaaagctttcaagtttgaggcaaacacaaccgtgaaggacatcatcctcaccgtgaaggagaagctgtccatccgaagtatcgagtactttgcactggccctggaagagcagtacagcatctcccggctgcacctgctgcacgaagaggaactcatccagcaggtggtagaaagggaggagtcacatgactaccgctgcctcttcagggtctgttttgttcccaaggaccccctggacctcctgaaagaagaccccgtggcctttgaatacctctatctgcagagctgcagcgatgtgctccaggagcgctttgctgtagaaatgaaatgtagctctgcactccgactcgcggctctgcacatccaggaacggatctacgcctgtgcccagccacagaagatctctttaaagtatatagagaaagactggggaatagagaactttatatctccaactttactccgaaacatgaaaggcaaagacatcaagaaagccattagcttccacatgaagaggaaccagaatttgctggaaccccgacagaagcaacttatttctgctgcccagctacgtttaaattatctacagatcctcggagaactcaagacatatggtggaagaatctttaatgctactttaatgttacaggatagagaatcctacattgcccttctagttggagccaagtatgggattagccaggttatcaatagcaaactcaacatcatgtccacattggcagagtttgcaaacatcagccgtgtagagctaacggaagagtctgagaaagtgagcgtcgtcaaagtgtatcttcaggacgtcaaggttctgactttgctgctggaatccaacagtgcaaaagacctagcctgcctgattgctgggtactacaggctgttggttgacccagttacctccattttcctctggcctggaaacaaacaacaagcgcaccgggtatctgcagaagaaggctatgaatccagggcctgcagtgactcagaggagtcctctgaggtggactgcgtactcgaacctctctctgacaggcgcctggtgaaactggcaccctgcagatcactcataaaggaggagcagcctcctgggaacagccccacacctgaggtggctaggaggggccccagcacctgcggggccagcagcacgacagacagtgccgagtccgaggcgtccgactcagccaacactgagagccgcggctacaggaccagtggctcgagtgagtccatggacgctctggaagaggatgacttagacacctgctcctccagcaggtccaccttcttccactttggctcgccaggcctcgcagagagcattgactctgacagccaggaggagagaagcgggattgaaaccagtggcttcctctgtctcctggacctggcccagagagccaacccccagtgccagaagacagagttttccgagagtgctgctttggagacatttggctgggcaccagaactgagcacagtcaggctggaccccaggctgtatgaaggcagccacgctgactactacagcctgtgttccagtgtctccccggccagctacctgagtgacagttccgagagtacagcttcccggcaagggggagccccgccagcctggggtcagcagggctggactgaggcccagcccagttccatgctggaacccctggccctgcacccaccactggcctttgaggatggcagctcagatgaggaatactatgacgcggctgataagctcactcccccaggccccccgtcagggcccagagatgtttctactgcagaacccagtgccacaagcttgcagaataaggccagcacttctagccctgagaacagcctgccttgtgggccagatggaagacagccaagcaggaggggaggggtgaagaaatatgccaagaccctgaggaaaagaaggtctttcctacagaccgactacacctctcaggtctcatttcccctggtgccatcagcctccctggagagtgtagacgacgtgtgctactatgacagggagccctacctggcccttggtgcaccctccccaactgtgtcctctctgcaggacatgcagggtgagcctggccttctggagaccaaggccttggggctgctggctcctctgagggagaccaagagcacaaacccagcctccagggtcatggagatggagcccgagaccatggaaaccaaatcagtcatcgactctcgagtgtcttctatttctgccattcgcttccggattgaccccaacaataaagagaattctggtgttgtccctgctgccagctcctcagcaagcactcctcactgttctaacccaggttcatctggcccagatactgctcaggcaaggccttcccaaatcttacctctatctcaagacctggatgggattgcccccaaagaaccaaccatagagcatggagacagctccttctccctctccagtggtgaccctaacccagacagagcctgcctggccagcaacccaggactaaataatgtctctcaaggagacacactagagctccagttggagccccatgtccagttggaaatgggattggaatctttttgtacaaatcatatacaagaaactgcccccaaatacacagagcctttgttgtctcctagagatgagcctagaagtgatgaatgtggaataaatccaggagagaagatagcttctatccctacaaaggaagagccacaaggacaactatctctggaaagagacagagaagttacaaacaaaaatggcaccaacgtatttcaggaggagtctaggaaggattcaggtgactccccgggtgatgtgtcaaataatgtttcacagactcttgatattagctctccagctggtaaaatagtaacctccctttctttagatgctcctgtaacagggaccgagcagatcccaccacatccccctagagaccctcaaggacagagcagagaacccccagggcaaggctgccaggctcaagaacaaaaactattcgtagagttggatttagaccctgatttctttcttgggaagcagacagtttcaccagccgtccctccagaggggatcaaggcagaggcacctaaccatgtgacagggcaagatatagcccctagggacagccctgagtgggtctgttttaatcctgagccttccctgccagaaccactaccatgtccacaagaggatcctcacttagaaacttcaaaccattgcttactctcagaaggcaaaagtgacagctctagcatctgcctttctgctgagaagtcttttctgtgctttgccccagaaagccatcctgaagtctctgccagtctcagggtggccacatctttgggttttgcaggcatgaatgagatggtggctcccaggatagggatggaccagtgcagctgtcagttctcctatgccacatgcttccgtggcccgcagcctgagacagaggaagaagacagggacttggaagcacaccccatggcccccctcacctcaccgccctctgcgggaagcccggtggttctgccctggaggcctgcccgagcccacagctgcaccaccgcacccctgtcgaggaaaagccacatctggccagagtactgctccagggcactgagacagctgaaagccacccctgccagcacccctgagggcttcatccaactcatggagagcttgctggagctacaagacattttagaaacttcctggggggttggaaacaaacatcccccagagaagtgcacctggcactttaccgaaagccggagccgcctctgcatgggctcccagaagctcctgtcgagctgtcggcatgtgatcagaatggaccagtcccccgaagagatgcagggggccgtgcgtgacaccttccagcacctggtccagctggccggcctgtgctttcagttcacagactgtagccgctgctccgcccggcacagggaggcagcggggaacctgagggatgtggtgtacacctaccatcagtttatagaggctgctaaatcgacctgcgagagaggctaccacgacctgagtgtgaaactcctggcccgtcagtgcacggccctcacggccgccgtgttctgtttgacccagaagttccgggcatccacggccctgtaaacaggtcaacggcccaagggcctcctgccctgtcctgccttggacacttccctgagaagccccttccactctcccacccaccctcttcaaatgtttactatatagagtattcaaataaactgctgcttaatcttg

SEQ ID NO: 133987 - DNA, 4665 bp, Homo sapiens
  Payload ID: 6175
  Gene Symbol: FRMPD2
  Gene Name: FERM and PDZ domain containing 2
  Uniprot ID: Q68DX3
  ENST ID: ENST00000305531
  CDS Start-End: 48-3902
gagtacgggcccggacatgttcctggacattgcagaggccctgtcacatgcatgtctttattgtaggcatgagcctgtcctctgtgacgctggccagcgccctacaggtcaggggtgaagctctgtctgaggaggaaatctggtccctcctgttcctggccgctgagcagctcctggaagacctccgcaacgattcctcggactatgtggtttgcccctggtcagccctgctttctgcagctggaagcctttctttccaaggccgtgtttctcatatagaggctgctcctttcaaggcccctgaactgctacagggacagagtgaggatgagcagcctgatgcatctcagcccctgcagctctgcgagcccctgcactccatcctgctgaccatgtgtgaagaccagcctcacaggcggtgcacgttgcagtcggttctggaagcttgtcgggttcatgagaaagaagtgtctgtctacccagcccctgctggtctccacatcagaaggctggttggcttggttctgggtaccatttctgaggtggagaaaagagttgtggaggaaagctcctctgtgcagcagaacagaagctacctgctcaggaagaggctgcgtgggacaagcagcgagagcccagcggcacaggccccggagtgtctgcatccttgcagagtttcagaaagaagcacggagacccagagctcaccagagccccattggagcaccttgacacacagtcactgcagcctccttgttaaccgcgctcttccaggagcagatccccaggaccagcaggcgggccggaggctcagctctggatctgtgcactcggcagcagacagctcatggccaacaactccttctcagaggggttttctgcaaagaaggagcaagttttccaggccagagttcatcctgttggctggagaggccccgatgacactacatctgccgggatcggttgtgaccaaaaaagggaaatcctatttggctctcagggacctctgtgtggtcctgctgaacgggcagcacctggaggtaaaatgtgatgttgaatcaacagtgggagctgtcttcaatgccgtgacatcctttgccaacctcgaggaactcacctactttggcttggcgtatatgaaaagcaaagagttctttttcctggacagtgaaaccagattgtgcaaaatagctcctgaaggctggagagagcagcctcagaagacctccatgaataccttcacactcttcctgaggataaagttctttgtcagccactatgggctgctccagcacagcctgacaaggcaccagttttacctgcagcttcggaaagatatcctggaggagaggctgtactgcaatgaagagatactgctgcagctgggggtccttgccttgcaggctgagtttggcaattaccctaaggaggtggagagtaagccatactttcacgttgaagattacatcccagcgagtctgatcgagaggatgaccgctctacgggtccaggttgaagtctcagagatgcaccggctcagctctgcactgtggggagaggatgctgagctgaagttcttgagggtcactcagcagctcccagaatacggtgtgctggttcaccaagtattctcagagaagaggaggccagaagaggagatggccctggggatctgtgccaagggtgtcatagtctatgaagtgaaaaacaacagcagaattgcaatgttacggtttcagtggagagaaaccgggaagatttctacttatcaaaaaaagttcaccatcacaagcagtgtcactgggaagaagcacacatttgtcacagattcagccaagaccagtaaatacttactggacctctgctcagcccagcatgggtttaatgcacagatgggctctgggcagccttcccatgttttatttgaccatgataagtttgtgcaaatggccaatttgagtcctgcacaccaggcccggtctaagcctctcatttggattcagagattgtcatgctcagaaaacgagttgtttgtatccaggcttcagggtgctgcaggaggcctgctgagtacatcaatggataacttcaacgtggacggcagcaaggaggctggagcagaaggcatcgggcgcagcccctgcactggccgggagcagctgaagagtgcctgtgtgatccagaagccaatgacctgggactctctctctggaccacctgttcagagcatgcatgcaggctcaaagaataataggaggaagagctttatagctgaaccgggccgagaaattgtacgtgtgacactgaaacgtgacccacatcgtggttttgggtttgtcattaatgagggagagtattcaggccaagctgaccctggcatttttatatcttctattatacctggaggaccagcagaaaaagcaaaaacgatcaaaccaggagggcagatactagccctgaatcacatcagtctggagggcttcacattcaacatggctgttaggatgatccagaattcccctgacaacatagaattaattatttctcagtcaaaaggtgttggtggaaataacccagatgaagaaaagaatagcacagccaattctggggtctcctctacagacatcctgagcttcgggtaccagggaagtttgttgtcacacacacaagaccaggacagaaatactgaagaactagacatggctggggtgcagagcttagtgcccaggctgagacatcagctttcctttctgccgttaaagggtgctggttcttcttgtcctccatcacctccagaaatcagtgctggtgaaatctactttgtggaactggttaaagaagatgggacacttggattcagtgtaactggtggcattaacaccagtgtgccatatggtggtatctatgtgaaatccattgttcctggaggaccagctgccaaggaagggcagatcctacagggtgaccgactcctgcaggtggatggagtgattctgtgcggcctcacccacaagcaggctgtgcagtgcctgacgggtcctgggcaggttgcaagactggtcttagagagaagagtccccaggagtacacagcagtgtccttctgctaatgacagcatgggagatgaacgcacggctgtttccttggtaacagccttgcctggcaggccttcgagctgtgtctcagtgacagatggtcctaagtttgaagtcaaactaaaaaagaatgccaatggtttgggattcagtttcgtgcagatggagaaagagagctgcagccatctcaaaagtgatcttgtgaggattaagaggctctttccggggcagccagctgaggagaatggggccattgcagctggtgacattatcctggccgtgaatggaaggtccacggaaggcctcatcttccaggaggtgctgcatttactgagaggggccccacaggaagtcacgctcctcctttgccgaccccctccaggtgcgctgcctgagctggagcaggaatggcagacacctgaactctcagctgacaaagaattcaccagggcaacatgtactgactcatgtaccagccccatcctggatcaagaggacagctggagggacagtgcctccccagatgcaggggaaggcctgggtctcaggccagagtcttcccaaaaggccatcagagaggcacaatggggccaaaacagagagagaccttgggccagttccttgacacattctcctgagtcccaccctcatttatgcaaacttcaccaagaaagggatgaatcaacattggcgacctctttggaaaaggatgtgaggcaaaactgctattcagtttgtgatatcatgagacttggaagatattccttctcatctcctctaaccagactttcgacagatattttctgagcaccttctctgcatgtctgcagtgctgtgtaaaatgccctacctttgcatggactattctttctaatcaagaggcgtgtgtggcgaacttggggcagcccctggaagtcttgttctttgaccattacgtctgcggctgcatcaccagataatgagcttcaccactcgtctgcctcctgtgtccttccgcggggagtaaatgtcacttcagcttgccgcatctctaaataggcaaattttcagtgctcagaaaaggacctgatctttgcacaaagtgctttgatggttgcctgcttgagtcactcccaatcccttcctgaagccctttctttataattcttctgttgaaatagccatcatattcacagtactaatcacagcatctcacatttactaaaaacttaccccataccaggaacccagagttgggggggctgtgtcagaattatgtaatttacgtgtcccaataatcctagacgcttcttgaccatctagttttgtcaaatgagaaaactgaggttccaaagaagtcaataaacttgtccaaagtctgaccgactctgcttgccatgtgacgagtctgtcttagaactgggtcattgccctgcttgcaatgctgtgccctctggcaagcccccccatccccccggtctcctgagctcggtaaggtgctccagctgcttctatcatagcacttcctacatggactgtaacatttctttactgctccaacttctcattaaattgggggctcctcaaagcc

SEQ ID NO: 133988 - DNA, 4997 bp, Homo sapiens
  Payload ID: 6175
  Gene Symbol: FRMPD2
  Gene Name: FERM and PDZ domain containing 2
  Uniprot ID: Q68DX3
  ENST ID: ENST00000374201
  CDS Start-End: 304-4233
gagctcttcctggctctctcacgggtcactggctttgaggacgcaggctgctggggtggcagtgcctgctaacaggccagagactgcgcaggacccagggaatgagagtggtggcaggaaagggaaggggccttgttgactcactcgctgggcagcaagtgcttagtgacaagcagtaaacaaagacagcggcaacagtgctggtggcagggagctccgcggacagacttgcaagagacccctgctccttgttggaaagttgtcccatgatgaaggcctagacctggtcacggagacttttggatgcagcctttaacgaaggacgcaggcatgagcctgtcctctgtgacgctggccagcgccctacaggtcaggggtgaagctctgtctgaggaggaaatctggtccctcctgttcctggccgctgagcagctcctggaagacctccgcaacgattcctcggactatgtggtttgcccctggtcagccctgctttctgcagctggaagcctttctttccaaggccgtgtttctcatatagaggctgctcctttcaaggcccctgaactgctacagggacagagtgaggatgagcagcctgatgcatctcagatgcatgtctattctttaggaatgaccctctactggtcagcagggtttcatgttccgccacatcagcccctgcagctctgcgagcccctgcactccatcctgctgaccatgtgtgaagaccagcctcacaggcggtgcacgttgcagtcggttctggaagcttgtcgggttcatgagaaagaagtgtctgtctacccagcccctgctggtctccacatcagaaggctggttggcttggttctgggtaccatttctgaggtggagaaaagagttgtggaggaaagctcctctgtgcagcagaacagaagctacctgctcaggaagaggctgcgtgggacaagcagcgagagcccagcggcacaggccccggagtgtctgcatccttgcagagtttcagaaagaagcacggagacccagagctcaccagagccccattggagcaccttgacacacagtcactgcagcctccttgttaaccgcgctcttccaggagcagatccccaggaccagcaggcgggccggaggctcagctctggatctgtgcactcggcagcagacagctcatggccaacaactccttctcagaggggttttctgcaaagaaggagcaagttttccaggccagagttcatcctgttggctggagaggccccgatgacactacatctgccgggatcggttgtgaccaaaaaagggaaatcctatttggctctcagggacctctgtgtggtcctgctgaacgggcagcacctggaggtaaaatgtgatgttgaatcaacagtgggagctgtcttcaatgccgtgacatcctttgccaacctcgaggaactcacctactttggcttggcgtatatgaaaagcaaagagttctttttcctggacagtgaaaccagattgtgcaaaatagctcctgaaggctggagagagcagcctcagaagacctccatgaataccttcacactcttcctgaggataaagttctttgtcagccactatgggctgctccagcacagcctgacaaggcaccagttttacctgcagcttcggaaagatatcctggaggagaggctgtactgcaatgaagagatactgctgcagctgggggtccttgccttgcaggctgagtttggcaattaccctaaggagcaggtggagagtaagccatactttcacgttgaagattacatcccagcgagtctgatcgagaggatgaccgctctacgggtccaggttgaagtctcagagatgcaccggctcagctctgcactgtggggagaggatgctgagctgaagttcttgagggtcactcagcagctcccagaatacggtgtgctggttcaccaagtattctcagagaagaggaggccagaagaggagatggccctggggatctgtgccaagggtgtcatagtctatgaagtgaaaaacaacagcagaattgcaatgttacggtttcagtggagagaaaccgggaagatttctacttatcaaaaaaagttcaccatcacaagcagtgtcactgggaagaagcacacatttgtcacagattcagccaagaccagtaaatacttactggacctctgctcagcccagcatgggtttaatgcacagatgggctctgggcagccttcccatgttttatttgaccatgataagtttgtgcaaatggccaatttgagtcctgcacaccaggcccggtctaagcctctcatttggattcagagattgtcatgctcagaaaacgagttgtttgtatccaggcttcagggtgctgcaggaggcctgctgagtacatcaatggataacttcaacgtggacggcagcaaggaggctggagcagaaggcatcgggcgcagcccctgcactggccgggagcagctgaagagtgcctgtgtgatccagaagccaatgacctgggactctctctctggaccacctgttcagagcatgcatgcaggctcaaagaataataggaggaagagctttatagctgaaccgggccgagaaattgtacgtgtgacactgaaacgtgacccacatcgtggttttgggtttgtcattaatgagggagagtattcaggccaagctgaccctggcatttttatatcttctattatacctggaggaccagcagaaaaagcaaaaacgatcaaaccaggagggcagatactagccctgaatcacatcagtctggagggcttcacattcaacatggctgttaggatgatccagaattcccctgacaacatagaattaattatttctcagtcaaaaggtgttggtggaaataacccagatgaagaaaagaatagcacagccaattctggggtctcctctacagacatcctgagcttcgggtaccagggaagtttgttgtcacacacacaagaccaggacagaaatactgaagaactagacatggctggggtgcagagcttagtgcccaggctgagacatcagctttcctttctgccgttaaagggtgctggttcttcttgtcctccatcacctccagaaatcagtgctggtgaaatctactttgtggaactggttaaagaagatgggacacttggattcagtgtaactggtggcattaacaccagtgtgccatatggtggtatctatgtgaaatccattgttcctggaggaccagctgccaaggaagggcagatcctacagggtgaccgactcctgcaggtggatggagtgattctgtgcggcctcacccacaagcaggctgtgcagtgcctgacgggtcctgggcaggttgcaagactggtcttagagagaagagtccccaggagtacacagcagtgtccttctgctaatgacagcatgggagatgaacgcacggctgtttccttggtaacagccttgcctggcaggccttcgagctgtgtctcagtgacagatggtcctaagtttgaagtcaaactaaaaaagaatgccaatggtttgggattcagtttcgtgcagatggagaaagagagctgcagccatctcaaaagtgatcttgtgaggattaagaggctctttccggggcagccagctgaggagaatggggccattgcagctggtgacattatcctggccgtgaatggaaggtccacggaaggcctcatcttccaggaggtgctgcatttactgagaggggccccacaggaagtcacgctcctcctttgccgaccccctccaggtgcgctgcctgagctggagcaggaatggcagacacctgaactctcagctgacaaagaattcaccagggcaacatgtactgactcatgtaccagccccatcctggatcaagaggacagctggagggacagtgcctccccagatgcaggggaaggcctgggtctcaggccagagtcttcccaaaaggccatcagagaggcacaatggggccaaaacagagagagaccttgggccagttccttgacacattctcctgagtcccaccctcatttatgcaaacttcaccaagaaagggatgaatcaacattggcgacctctttggaaaaggatgtgaggcaaaactgctattcagtttgtgatatcatgagacttggaagatattccttctcatctcctctaaccagactttcgacagatattttctgagcaccttctctgcatgtctgcagtgctgtgtaaaatgccctacctttgcatggactattctttctaatcaagaggcgtgtgtggcgaacttggggcagcccctggaagtcttgttctttgaccattacgtctgcggctgcatcaccagataatgagcttcaccactcgtctgcctcctgtgtccttccgcggggagtaaatgtcacttcagcttgccgcatctctaaataggcaaattttcagtgctcagaaaaggacctgatctttgcacaaagtgctttgatggttgcctgcttgagtcactcccaatcccttcctgaagccctttctttataattcttctgttgaaatagccatcatattcacagtactaatcacagcatctcacatttactaaaaacttaccccataccaggaacccagagttgggggggctgtgtcagaattatgtaatttacgtgtcccaataatcctagacgcttcttgaccatctagttttgtcaaatgagaaaactgaggttccaaagaagtcaataaacttgtccaaagtctgaccgactctgcttgccatgtgacgagtctgtcttagaactgggtcattgccctgcttgcaatgctgtgccctctggcaagcccccccatccccccggtctcctgagctcggtaaggtgctccagctgcttctatcatagcacttcctacatggactgtaacatttctttactgctccaacttctcattaaattgggggctcctcaaagcca

SEQ ID NO: 133989 - DNA, 1959 bp, Homo sapiens
  Payload ID: 6175
  Gene Symbol: FRMPD2
  Gene Name: FERM and PDZ domain containing 2
  Uniprot ID: Q68DX3
  ENST ID: ENST00000474573
  CDS Start-End: 410-1195
agttgctgagcacccgccttgtaccagtgcttgggctggggacatgcccagatctctcacatagttgctattgttaagcttatgaacacctaatcttattgctcagtggagaatacaatctaaacgaacaggtgaatacagaagacagtgccagtcggagggtggcattaacaccagtgtgccatatggtggtatctatgtgaaatccattgttcctggaggaccagctgccaaggaagggcagatcctacagggtgaccgactcctgcaggtggatggagtgattctgtgcggcctcacccacaagcaggctgtgcagtgcctgacgggtcctgggcaggttgcaagactggtcttagagagaagagtccccaggagtacacagcagtgtccttctgctaatgacagcatgggagatgaacgcacggctgtttccttggtaacagccttgcctggcaggccttcgagctgtgtctcagtgacagatggtcctaagtttgaagtcaaactaaaaaagaatgccaatggtttgggattcagtttcgtgcagatggagaaagagagctgcagccatctcaaaagtgatcttgtgaggattaagaggctctttccggggcagccagctgaggagaatggggccattgcagctggtgacattatcctggccgtgaatggaaggtccacggaaggcctcatcttccaggaggtgctgcatttactgagaggggccccacaggaagtcacgctcctcctttgccgaccccctccaggtgcgctgcctgagctggagcaggaatggcagacacctgaactctcagctgacaaagaattcaccagggcaacatgtactgactcatgtaccagccccatcctggatcaagaggacagctggagggacagtgcctccccagatgcaggggaaggcctgggtctcaggccagagtcttcccaaaaggccatcagagaggcacaatggggccaaaacagagagagaccttgggccagttccttgacacattctcctgagtcccaccctcatttatgcaaacttcaccaagaaagggatgaatcaacattggcgacctctttggaaaaggatgtgaggcaaaactgctattcagtttgtgatatcatgagacttggaagatattccttctcatctcctctaaccagactttcgacagatattttctgagcaccttctctgcatgtctgcagtgctgtgtaaaatgccctacctttgcatggactattctttctaatcaagaggcgtgtgtggcgaacttggggcagcccctggaagtcttgttctttgaccattacgtctgcggctgcatcaccagataatgagcttcaccactcgtctgcctcctgtgtccttccgcggggagtaaatgtcacttcagcttgccgcatctctaaataggcaaattttcagtgctcagaaaaggacctgatctttgcacaaagtgctttgatggttgcctgcttgagtcactcccaatcccttcctgaagccctttctttataattcttctgttgaaatagccatcatattcacagtactaatcacagcatctcacatttactaaaaacttaccccataccaggaacccagagttgggggggctgtgtcagaattatgtaatttacgtgtcccaataatcctagacgcttcttgaccatctagttttgtcaaatgagaaaactgaggttccaaagaagtcaataaacttgtccaaagtctgaccgactctgcttgccatgtgacgagtctgtcttagaactgggtcattgccctgcttgcaatgctgtgccctctggcaagcccccccatccccccggtctcctgagctcggtaaggtgctccagctgcttctatcatagcacttcctacatggactgtaacatttctttactgctccaacttctcattaaattgggggctcctcaaagcca
